United States Patent Application Publication US 2008/0114160 A1 - sequence listing, part 32

SEQ ID NO: 8694 - DNA, 45860 bp, Oryza sativa
atctttactcccggatgttctcaccaatcgggactaaagatcttttcccgctatttccaaattctttttaaacccggttagggttaagaaccgggactaaagataatagcactgaattttgaatttcattacatttgtgtttctaaaatagtaaataatgcattacaattatttaaagtcgaaaaattaatgacaaaaccttcgaaaaattattgttgtctgtagtaaactaagtggataatatataattagcgcatgaatgatttaaaattgttaaaatttttaataatcatatataattagcatatgcatgatattaaattgttaaaaattctaattaatatatgtaaataccacatgcatgatttaaaattaataaaaattctaataatcatatataattagcatatgatgatatgaaattgttgaaaattctaattaacatatgtaaataccacgtgcatgatttaaaattaataaaaattctaataatcatatataattagcacatcatgataataaattgttgaaaattctaattaacatatgtaaataccacgtgcatgatttaaaacttttaaaaattctaataatcatatataactagcatatggttgatttcaatttgataaaaattctaataatcatacataattaacatatgccatacaacaattgattttatggatattcaatacatcaaaaatagtttacatcgtgtacacaacaattacggtaatacatcagcggtgacggttgaccgcacgtactttctcctgactattgttccttccttgtgatcgctacgtgagtaaggggtgtcttcatttgttaggaggatactagggtcaatcgtcactgtgaaagggggttgcccatcaaactgatcgtaatcttcgtcagtcttgttctctactccgacgatttttctttttcctgggagaaccacgtggcgcttcggctcgtcaggccctttgccctttttttcctttgctaaacatgtccttgacgtaaaaaacttgcgttacatcattggcaaggacaaaaggttcgtccgagtatccaaccttgttaaggtcaaccgttgtcatcccactgtcatcaatcggtacgcctccaccagtcaacctagcccataggcaccggaacagagggaccttgagaggtccatagtcaagttcccatatgtcctcgatggcaccgtaatacgtgccagttgtaccatcgtgtcccatggcatcgatacgaacaacactgttctggttcgtgctcttcatgtcttgggctctcgtgtagaatgtgtacccattgatttcatatccctggaatgtcgcgatcgagccagatggtcacctcgccaggaaggccagttgttggttaatcgtctcgttacccatgagatgttgtcgcagccacgcggagaaagtatcaatgtgatgccgtgtaatccatgcatcggacttaccgatgtttctggcacgaactagagccaagtgctcctcgatgtaaggagccaccaatgaagattgttgcagaactgtgaaatgggctttacgaaataaattgttgtctaccgtcattattgctttccttccgagagtcccctttccccgtagtctcccttcatggtgtgattcaagtaccccgattggcgaaggtcttcaataaattctacgcgaaattcaatgacctcctctgttccataccccttggcgatgcttacctctggacgagcacggttacgaatatatttcttcagaacgcccatgtaccactcgaaaggaaacatgttgtgtaggtacacagggtcgagaataccgatctctttgacaaggtgacaaagcagatgcgtcattatattgaaaaatgaaggtggaaatatcaactcaaagctgacaagacattgcaccacattattctgaagggcttctaatctatccggatcgatgaccttctgcgaaattgcgttcatgaaagcacatagctttgttattgttgcccggacattgtctgggaggataccccttattacaactggtagcagctgtgtcatcaacacgtgatagtcatgagactttatgtttgtgaacttcttctccttcgtgcttattattcgctttatattcgtggagtatcctgacgataccttgatgctctccaagcattcaaacatactgtccttctctgccttgctaagagtgtagctggctggactcaagtaatggcttcctttctcctttggttccgggtgaaggttgctgcgttgttccatatgtttcagatcattacgtgcttccagtgtatctttcgactttccatatacacctaggaagccaagaaggtttacgcaaaggttcttagtgaggtgcatcacgtcgattgcatggcggacgtccaagaattcccaatagggtaactcccaaaatatggagtttttttttcacatcgccgcgtgaccatcttcgctctctataggctggctgctaggcccctttccaagcactactttaagatctttcaccatagcaaacactgttttaccgctgcgatgttttggcttcgtacggtggtccaccgtatgttcaaagtgcttgcctttcttccgtactgggtggtttgctgcaaggaatcgacgatgacccatgtacacaaccttccgacagtgcttaagatacgtactttctgtttcatccatacagtgagtgcaaaccttgtaccccttgttggactgcccggataggttgctaagtgcaggccaatcgttgatggttacgaacagcagtgctcatacgttaaactcctcctgtttgtcctcgtcccacacggggacaccttccttcttccacaacagtttaagatcttcgaccagtggtcttaggtacacatcgatgtcgttaccaggttgcttggggccttgaataataatcggcatcattatgtacttcctcttcatgcatagccaaggggggaggttgtagatacacatcgtaatgggtcaagtgctatgaccgctgctcatctctccaaaaggattcatgccatccgtacttaaaccaaaccgtatgtttcgtgcgtcctttcaaaagtctttaaattttctgacgacgtttcgccactgcgaaccatcggcggggtgtctcaacatcccgtcctgttgacgctctttagcgtgccatcgcatcattctagcattccccttgttcctgaacaaacgccttagacgtggtattatagggaaataccacatcaccttagcaggaattctcttcttcgttagctgctcatcaacttctcctggatcatctcttctaatcttgtatcgtagtgctttgcaaatggggcatgcttctaggttctcgtactcctcaccgcgatataggatacaatcattcgaacatgcgtgaatcttctgaatttccagtcctagaggacagactatcttcttagcctcgtacgttgtctcggacaattggtttccctccggaagaatgttcttgacgagtttcaataaatcgccaaatgccttatcactaacaccattttttgccttccattgcaagaactccagagtggtatccaactttttgtgcccctgctcgcaacctgggtacaacgacgttctgtggtcctctaacatcctgtccaatttatgggcccccttttcactttcgcagtcctccttggcgtcctgcaacatctgaccaagatcatccgcaacgtcgtaaccatcagcatccatttcctcctcgcccgtttgatttccttcaaatccagagtactgagcaaagtccgaaatattgtcgtcttccacttcatcttcttccatttcaaccccttgctctccatgggatgtccaacagttatagcttgggatgaaccccgactcaaacaagtggaaatgaatagtcctggatgcagaatactccttctgattcttacacttattgcatggacaacaaataaaacccttatgcctgttagcttcggccactctcaaaaaataatgcacgccgtcaataaactctttggactgccggtcagcgtacatccattgccgatccatctacatgaaatgaaaaaaaatcgtacacaaataattattcgtacaataatggcagtcatacaataatgataaaataattacaaactctttcaacactcgtacaataatgacatatcattattcatacaaaaattataaaatattacaccaaataattcttatttactatttctaaagttttaaactaatattaatgtgttttacttcttttagttttcattttagtttgttttctattatttaagattaactttcactatattttccttctcaactattttataaaaccttatttagcaaataaactaaatttctatatattctttcttccccacacaaattctctctcatcaacttacaacaaaattttggagacaaaaaagtgtgcaaaacatagctccaaatgtaatatgacagtaaaaaacattggaggatgaagttgctaaccttttaggcacctccgatttgtatataatcaccaaaataaattcactagcaattttggcaagacctcccctcttttttgaagaaattttgaagcttgctcgggctagaggaggaagaagacatatatacaggggtaggactttagtcctggttggtgttaggaaccggggctaaagatcgccgggaccaaccgggactaaagttacgaactttagtcccggttggtgttaccaaccgggactaaagatcccggggggcctgacaagccctgacagcatttgaaccgggagtgttaccaaccgggactaaagatcaaatatgtccgttaccctttttaaccgggactaaagatcatctttagtcccggtttttattacaaccgggactattgtggaattcggccgaccgacgaaagatggtttctccaccagtgcttgctcgctggttctcgaaccagtacgtagcaatctcccgcaccacaaacctccattggtgttcgagagatgattctactcgctcactggttctcgaaccagtacgtagcaatctcccgcagtgcaacctccattggtgttcgagagatgattctactcactcgctggttctcgaaccagtacgtagcaatctctcgcaccgcaaaactccattggtgttcgatagatgattctactcgctcgctggttgtcgaaccagtatgtagcaatcacccgcaccgcaacgtccattggtgttcgagagatgattctactcgctcgctgtttctcgaaccagtacgtagcaatctcctgcaccgcaaccttcattggtgttggagagatgattctactcgctcgctggttctcgaaccaatacgtagcaatctcccgcaccgcaacctccattggtgttcgagagatgattgtactcgctcgctggttctcgaaccagtacgtagcaatctcccacaccgcaacttccattggtgttcgagagatgattctactcgctcgctggttctcgaaccagtacatagcaatctctcgcaccgcaacctccattggtgttcgagagatgattctacacgttcgctggtcctcgaaccagtacgtagcaatctctcgcaccgcaaccttagatggtcgaggtacgactacagtaataacgcagcagtcctcgcacgacaacttcaaatgatcgagagacacctactcactggttctcaaccagtcaatcgtagcgatctctcgtatatttatttctagtggttgagttacgactactacctggttcttgaccagaggtgtagcgattctcccattacctctacttcaacaaagttgatatcaggtacacaatatctccaagtgttttacccagagatcccttaccacaaaagacacctagcgttgaaacctatcctaatgtccctttacaccgtcttgacaaagcctctgaggaacctaagggaacttcggctggggaagtctagagcggataaggtcttgtcggatcctttagagacgaaagaccatgtaagatctggtcgtgtaagagttcttgccgtgcgtattaaccaagccgtgtaatcggaaatggattttccaacctcacggctgggggctaggatcagtgcttgttcaaccgaggtaggtcaaaggtccaagagccttatcctccgagaacgattctacgacgacaagggtgggggctagggagagtgtataactaaacaaattgactgatcgaagtcggtaaaagagtagatgctcatatacaaaacattggtttgtaaacctaattcattttcagtttttcatacattctataacatgttaccctttgagcactcgctcgggggctatttctatctaatattcttttttgagtattggttttagaaaattctattcggcattatcaaagactccatgtctctatggttctacaccaagatcgactaaggcgagtacgacaaatgttgacaaggctccgtcgcagactctgcgccttctcgatcactcaagaacggttggtggatatcgacaaggaatacggaatgaagaaatggtgtacccgccgagataaaatttccttgacttcaatccaaattctcgattacagcaagacgggagacttagtcgcatgtcctatactttcttggttgacatcggagattgactcagacgaaccctttaggtgcccgcacgaggctgataaaggaagtctaacattatctctgaactcaccgagaacggtcacgagagctcgataacagttcctacaaggtctgcggttgggaatatgaactcgctcatttgcattgaagttgggggatactgttagggttatggataccacatacctaatagtaattgactaaatctcggtaagacccaccacataccatgtctaatacggaaacaacctgcggatataggaggagttccggataaggaaagacaaccagagttctacatggaaatgacaaggactactcgggttgtatccatattggtttccctagttctacttggacaaggggacacctatgggtataaatacaaggccccctaggaggagaggggacacaatcaacgcccaccatagacggaacaacagaagccacaacatacaagccaacatacgctaagacaagacgccggatatcgacttcagggataggcacggctagtcccctacggtgtctccggatactgtcaggagagacgaaagcgctatctttgatctcgccgggcacgaactcgaggaggaagactaccctgttatcgactacgagtcagaccttcagaccgccatgtcgacaacagttagataggctaccccacgtattgtacttgtgtgatctagatgaataaagaacaacaacggcttcggccaacaggatgtagggttattacctgacaattcaggggcccgaacctgtaaaaaatccccgtctccatctcttttacctcagtctcgcgtataccctactaccaatgatccccataccatgcaaataccggaattgcgacatcaaacgtcgacagcgagtatattattatatgtgcagagtatattatatagttatttggtcgtatatagttatttggtcgtatatttggtctatatagttatttggtcgtatattattatatgtgcagagtattaattaggaatattttttttgacagctattaattaggaatattacccatactagctacttgcagcttgggacacatgctcttccctggagcaggcagctagagcaaatcatttcggcctagcccaagaaataatggcccgcttggcccgcatgtgttccggcccaacttgcatcggcttcagttgctccttcatttttcttgctgatctcagttattgggagcactaaaacactgattatagtagtattttttttgaatgattggcacatatgaaggttgaggatgatctaattgattatagaggtgaattaaatattatatatattataaacaaaataataacttaagaacaagttgtctaagcaacgaacacgaaggaaattttatgagagaacatatatatacttttaaaagcgtggatcaaataaagttttttttttaagaaaacaaactttgaaaactgtggagcaagtaatctgaccagcgacaataatccggtggataatctgaaaagaatgaggtcaattagggcttgttaagttcgcaaaaagaaaatttttgggtgtcacatcagacgtttgaccagatgttgaaaggggtttttgatacgaatgaaaaaactaatttcataactcgcctgaaaaccgcgagacaaatttattaagcctaattaatctgtcattagcgcatataggttactgtagcacttatgactaatcatggactaattagactcaaaaaaaattcgtctcgcgatttccatgcaaactgcgcaattagtttttcattttatctatatttaatattttatgtctgtgtccaaagattcgatgtgacgtttttgggaaaaaaatggaaactaaacaagcccttagtctgctaacatctcattcttcctgcagtaaaaccctttctactgcggttccaaaaaaatgagtctaccctacgtacgtggcttgccctatttttctaactgacatgcatggaacattcttttggagaatttatggatgtattttgaaacatcagaattcttttgtttgaggtaattattaattaaacattccataccaacatttccagacatccaaattaaaggtctagacagtgatgttcaccagtttatttctttttttcctcctttcaaaagtctggcaaatatgttcctacatcttccatcaaattccacgtagtttttacttaccatccaagcttcatttttcttgaaccatgcatggtccatggacaaacacacgacgatgacacttttagtcgtttactgttcttcagctggaaatgcagcaatcctcaaatcagctccaaacttgggagatctagcctgccggaaaagcactgggttgttcacacaagtgaagcagactgaaaggcacatctcgtcgtgaagactccggcaccaagaactaggtggatctagggtggtcccgggaccacccaaaatattctagccaatgcatatatacacatatgtgaaaagaaacttttgaaaaaaaaaagaaaaagaacttgtttctaatatatattatgatgcacatttgatctatttatatatttaaagtatttaaaaaattatataagttggatcacccatataaaaatcctagatatgcccactgaccaagaccttgctggctgcaggtcttgccgtcgctacctttatctgaagccaaaaaaaaatacgtacttaatgtagaggctgaattgaattttagtatatgtatgtatctctactactttataagcgaagtcatcctccttttagttatctcctcatctcaacacgccagcacgttcttttgtcacttttcaattatgggtttagcccatgcattaatgtatgggctctcagtctatttcagttatatagatctgacccgttataacttatgggcatgtaactagtatgaaaaaaggagcattaaaaatgtggtcaaatttcagtcaaaaagaaatgtggtcaaattggtatgtatggttattcagatatgaatctttacatgatcgatcattcaagtacattgaacctgcctagcaacgtgccggcctctctacctgttattacaattaatcatagtgtttcagacctgatcgtcttaatttatcttttttgtggacaatggtatgccaaacatcgtactgaatgaaaaaaaaacagtcttcaaggtactataatactgtggaaatggtttttattgtggcttaaaatcagtttataaactgtatatgattgagaaagatgctgataggggaaaaaatatggtaagcttccttgcaagaatgcttggctctggattgattcagagatcgatgatccatttgtgatggcctgatcctttttcacaggactgacaaaacatgcatgcatggatggatgccaaaacctttgcagtttgcagtcaaagatgtgccacagtacttaaaatgaaatatttgacaaagatgataatattactgaatctagttttatacatgctgaccattcactggctacagttgataaaatgccgttttttgcttcttgatcgacctcagtcatatattgacagtagcaccaactgatcagagaataatcacatggttcttgcagtaagtaaacctactgattagagggtaggtcatatgtatctttccaactgacagggtataaacggaagaacagtactgttcagagaatttttagattttttagataattaaccactgcagtcaatagcaacctctccagctgtcaagagaggtcctaattaactacactgattttcatcagaccgtatatcaaaagtcctgccaaccaatttgtcgagactatgcatgcatgtaattcgcattttttttctgacatgagtacattcttagaaacatatatatttacgacatgaggactcatgattcacattttggacttttgtgtctttttgactgatactggcaaaatgccagtacattgctacgtacggaatttaaaatatcacatcggtacattccaaaaagaaaaaaatatatgttaaattttagtctttagagcctaattttatatttagttagagttttttttatcttcttatattttagctataaaaaagtttaagtggattcaactgacttacgttattgcatacgttccatcccttaaaaaagttgcatcgtcaatccataaaaaatatagaagatggcagtgtgtttattctttctttcttttaacttcagtaaaacatgtctaataatccgcaactagcttatataggcaagtcttagatgtttggtggtagggttataatcgcttcttacttttaatacaagataatccaacaaatgtaattgatatgtgtgagttcgatatcgtacaaacgattttgtcccaaaaatattattgccgttagggttttgtccattccgtgtcgttaaatatactattcatcctatagcatttaatggcacgagatggacggaagtctaacggcgatggtatttttaggacaaaatagttcgtacgatggtatttattggaactcacacttgtcgatggtatctcttggatttggacgcttgtcaatggtatttcttggattatctcttaatagaatcaaccttgttttagaaaaaaatagcatatgtttattgattgagcacacaaatctactacgagaatatgtgtcaaacatactaatcctactaaaagtttgaacttagagttggaatatgtgtagcatagagttaaatcggactctatcatagattcactcttaaatagagagagtgacaccacaatgtaatcatgacaactacaatttagtgtaaacgcgtagggagaggatagcgcggcgagcccatggactcgtagcggttatgtgctatgttgattggggaggagcacctataatcagaggcctaaagatgtaggttttcactaaacttcgttaacaactattgtgtgttgatgtatcgtcctttagtgtatcttaatggatgatcactgtaccgactaacgtttataaaccgaactaacgaacacccttttccccaccaaaagaaacaacaaaaaaggcgtaacagacacgtcccgcgaatcgtagagggacatgtggctagacgtacgaggtgctggctactgctccactcgcttagagcaagtttaatagatcctagttagcaggcggtaacatgttccacatcatcaaaatcccaggtggaggagtgagaagagacgaaaaagggcggagcgggcggtccatttatcgcccggctgaagcgtgccgtacgagaaaaaaaagccttcttgcagcccgatgcgagcgtatctgccggcgcttcgttcctcctcctgatcccgtgcgtttctctgccccttcgccgttcctcctccccgatgccagattccttcatccgcgtgccaaattggcctcgcctcccgccaaatcgatgtataaatcctcaatccactccaaagcaaccgagtttgcccccaaattgtctcctcctaaaccctagatgctaaattcgtcaccaacctgcagcaagatggggcggcagtctcaaagggcatgtgtgccgacgcctatggaggtcccgtcgccggggaatcagccgatcgcgccgccgctgccacctcagttcatcgtcccgccttcgtttgcttccacctacagacccggtgcattgttccctgcagtaataacgcagtccatggcgccctcgtccgcaccatgttggttcaccacgttgcagcaaccaggcatgactggttcgtcgactcaaggaccttggttgttctctactggaattagtccatctacggagaatgctgagcgccctgatatccatgcgttgtatgatactgtccctctcttctcaatttttttggttgtttaattttttttattctgtatggatgatttttctgcataatcgattgacatggtagtagtattcagccagcagccggcaaaagtattagcatcgctcttacgtcgcccgcgtgggccgtagtgcatgtgcctcatgcccacacgtgaaacggcgccgctcatctagatatttctcactttagtaccataccgcgtgccaagcagcccctgggcccagttatatagcttcctcctcccaaaattaataactcgtcccaatacctatatataaaggcctgatcagtgatcaccaccaccactcgcttcctgctccctcaccccacttccacttcatcgccatgagctcgtccttcctcgggccattcaccgattttgactactcatccgtgctcgccgccggcgacttttttgccggtcaccatcctgaccagccgccgtcgccggcggaggtggtggtggccgtaggcggaggtgatgccagtgggaagcggagtttccaggccgacgacgacgatgccatgggcgtcgtgtcccgcttgtccaagaggacgaggaaggcgccgtcgagttcgagctcgccgtctcacagcgatggcggcggcggcggcggcggcgaggggaacgagccggcggcggagaggggaggtggccggcgggtgtgggtgcgggagcggagcacggagtggtgggaccgcatgagggacccggcggcgtgcccggaggcggaattccggcgagccttccgcatgccgcgcgcggtgttcgacaagctctgcgacgacctggccgccgccgtcgccaaggaggacaccacgctccgcgccgccatccccgtgccccagcgcgtcgccgtctgcctctggcgcctcgccaccggcgacccgctccgcgaggtgtcccgccgcttcggcctcggcatctccacctgccacagcatcatcctccaggtctgcgccgccatcaccgccgtcctcaccagggtcgtccggtggccggactcccacgccgcggccgcgtccaggttccaggccttgtccgggatccccggcgtcgtcggcgccgtgcacaccgagcacatccccatcgtcgcgcccagggagaacgccggcgagtactacgaccgccgcctcaccgaccggaacaacaaggccacctactccgtcgccatgcaggccgtcgtggacgccgacggcgccttcaccgacgtctgcatcggccaccccggctcgctctccgacgccgccgtcctcacgaagtcggcgctgtacgcccggtgcgaggccgggctgctgctcggcgacgacccgcagtggctcgtcggcggcgcgagctacccgctgacgagctggatgctggtgccgtacgcgcagccgaacctgacgtgggcgcaggagaggctcaacgcgcgggtggccgacgcgcgcgcggcggcggtgggcgcgttccggcggctcagggcgcggtggcggtgcctgcggcggcgcgccgaggtgaagctgccggagctccccaacatgctgggcgcctgctgcgtgctgcacaacctctgcgagcgcagcggcggggagctcgacgccgacctcctacacgacgagctcgtcgacgacggagtggtcgccggcggcggcaatacagtgcgctccgccgccgccgaacaggttagagacaggatcgctcacggtctcctccatgccggcaacactgcttcgagtagctaccaagattaccattacgggcggttataggtgttggaatataaagtgaattgtccatcttttcttatctgtttaatcttttgggttgaactgatccgtgtatgcaactcaataatagataaccgccgctagtaggttcacagccgataaccggttaaagcctaattggagggaggttaatttctagctatcctgattccataagaacatatgaaattatatatttatttatagtttaaggtaaaatttagaattatttctgcatgttaccggttacaaatttaattattggatttgcatttttatcggaataaattcagtaaccggtggtaattaatcaacttgttattggatcgggatatcctccgagtctagtaattattctagataaaccagtgtttcggaactctggtagatactttgcttatactataagaatttgatcaatttttatggtgtacaaaggttttataggacaaatgcaagattgattcgatggatctcagtataatgtatgtctcatgtgtttatgattgtaattgaaatttgaataattatcagaacacaaatttcatctaaatcttatattatgtttgtatacggttcgatcttatactagacatatatatccttgaactcaaatttcaaaaagggctacgttcactacgccagatccttgcacctgtgacggcatatctgtgacgggcataagtgctggtcagtgatgagggtcacctttgacgggtcctacaggatgccgtcatcggtgagccatcaggaggtgacccgtcacaggtaactagtcacctgtgacggttcaaaaatgaaacccgtcaaaggtgaggtaaaattacatgtgacgggccaaaaatatttagcccgtcacaggtaactagtcacctgtgacggtccaaaaacaaaactcgtcaaaggtgagataaagtcacctgtgacgggtcaaattttatgagcccgtcaaagatgataaaaaaaaaaatctttctcataaccctcccctctcatcccggctcatccttatcctctactaccggctcatccttatccatctcaaccactccccccatctctctctccctctcaaccctctctcttcatcgacctgtgtcggaggcggagacggcaccggcgccggcgggtgcgggggccgcgtcgtggtgaccgacgtccgcctcttcgccctctccggctcttggggctcgtctcggggagcagcggcgcggcgccgtccatcgtccatcggcggggaccagaggcggaggcggcggcctccttcgcccacctccgaaggtcgccgcctccttcgccctcagcctcatggtcgccgccgccgtctctccgccgccccgtcgtcagctccttcgcccaccgcctccgggtcgccgcctccttcccgcctgcaccacgccagatccgggtagcctcctccttcctgcctccaccacgccagatccaggtcgccgcctccttcgcccccctccccgaccgccgggcgccacggccgccgtcccccgactgctaggtgtcggatctagcctccacgaggttgggggacacggatccgcccgcccgccgccgccggttgttcttgcagcggcagcggcgaggagggctcaacggcgcgcggcggtgcagcggctcgacgcagcggtgaggagggctcgacgacgtgcggcggcgaggaggaggtgagtggcagcggcgccgcatccatccccatcctcctcccccttctctaatttctagattcggtgattcttggagcggcagtggcacggattttgtgaatgtgtgatggatttgtgaatgtgtgtgatggatttgtgcatgtgtgtgatggatttgtcccttactgttatgggtgatggatatattgttgatgagaaatttaggttatattttggctaatttgtgatggatatattttgtgatgcttctgtttactgctgctgaaatataatttctaaatattggctagcgatttgctagccaatatttagaaattttttttgtctggatgtacctcatcactgacggttcatattgaaaaagccgtcacaggtaaccataccagtgacgggttacaaaatggcatgggttagcgcagacacttacctctgacgggcggaagagttctagcccgtcagaggtgactgtcatcagtgacggtccttcacccgtcaaaggtgattggactcaccagtgaccactgatcactgaccaagcccaaagccgtcaaaggtgagggtttgggcccgtcacaggtgaccttgtccagtgtagtggtttcttttctcaaatgagaactatccggtacgttcaacaaattaagaaaagttttgcttgctagcacgcactactggaatgtataacagtatcatgctattgctctaattaaaatttctgaaatgattgaagatatatatcattttggagcccgccgggcaccatgatgccccaattaaatttagtattaattttctaacaagattaattaatactcgattggctttttttatgaccatttaaatatatttttgcgaagaaaccctaataaatccttaacatgagattggtttggcaatgcatgtcaaatcatcatttcaacgtgttccctcgcttatcctatcttactataaagttatcccccactaactccttaagattaacatgcaaagatgccacatcattatccactaataagatgccacatcatcatccactaattaacaagatgccacatcatcatccactaacaatcatcacatttaaacatcatgcaaatatactatatctttatagtttttataatttaagagcttttcaaattcaaacatgttaaattatcatccaacataattcacataatgtttcaaatacaaacatgttaaattatcatccaacataattcacataatgtttcagtgtatatctttattatgttttatgatatcctatatacttatatagttcatcctcacttagttagtgcttaaatgattaatctatggtccaaattatctctcctttttttctctaattaagtcatatcacatcaattgtttttagccattagatgattaatgtacggttcaaactatctccctactttttttcttccataaagtcataccaccttactttttaagtttgaatcaccattctacatactatttaaatttaaattatcataaaccacattaatttacttaatctgatgttatctagctatcttacacgctattttttttattgttatcatactaaatttccgcagtaatgcgcggggtttcacctagttccatatatatggatgctctcatgtaatcttaaggcatccaataataacatcttaagaaaaatcatccataaattgaagctttctctgatcgttatgattttatcaccggaaattacgccctttttccactcgggggtgatgcattaattaacggggtgatataacaaaagggttcatttttttatttcattttcatgtgcatatgacttggccgcgtgcaaatctctgcatgttagccgtgcaccgcagtaacagttggtgtataatctttatcgtcaaattaattactttatgataatatactacatatagaatacattccggcatgtcgagctgcaaatttaatatatccctaatttaatatgactggctgatttattttctaagaaacatagtataaacgtagatgctcgtaacacgtgcacacacaccctgtaagcacacatgcatatcttatccgtattagcacctctagaagactaagccggcttatcttgaaattggcgaagtcaccacaggtgcctcgttatcaatgggtatgtagcttaccaattaaaaaataattagccgtaattgcgagcacccgtgccatgtctaggatttaaaatcggatttaaaatatatatggaagtctaaccagtggctaaattttggatagattagggacgcgccggaacgtgcatgaagattttgattattcggattatgaataaattagccaaagaagaatgtacatgtgtacataaaacacaaggtaaaagcttttgcctttgcttaagaaaatagttgttggtaattagctttgctttagattcgcaaatatttgtatgtaatctaaaaagagtctaattagatggttcagctgccaataacggtagatcttgaatataccgaatttaaacatttccagtgtattggtacacagccataaattaatgcagattaataatagcattataaagctaaggcacaatttaagccacttggcaggtgaagtggtcactattgtagaaaccatctttatccggtcaggcaaaaaccacaataatcccggttccaataaaaaccgggactaaagatgggttttagttccggtttataagcaaaacgggactatgtgctctttagtctagtcctggttcatatgctgtcaggggctgccagcccccccccctcggatctttagtcccggttgataacacaaaccggaactaaaattcgatgtatcgtatataatccctaggacttatcctcccaaactcctcatctcctattcttactctctcttatcattttctttgcactatcctctccttccttctagctacagatggagcttatccttttcttgccttatcctctccttgcagatcgagcgaggagcgaagagcgaggacggcggagggccgcggcggccggcacgcggagggcggcgcccggcggcggccggcagggccattgcacgaggatggaagcggccggtgcggagggccgccgtggtggtcggccgtgcgaatttgttttttcttttatcccttgtgaatgtttgtttattgaggataatttgttcattcgatctatgattttagaatgattgttgttgtggatgatttgagattgtttgttgaggataatttgttcattcgatatgtgatttgagaatgactgttgttgtggataatttgagatgattatgttgttgtggattatttgggattatgttcttgtggatgatttgggatgttggaaaatgatgaaaaaaaacttagtcccggttggtaacaccaaccggtatctttagtcccggttatttcaaccgggactaaagatattttgtcccggattcttagtcccggtttgcaacccgggactaaagggggttgtaaaccaggagtaaagatggtttctccaccagtgggtaatgttagccaaaaagacacgagtctaattaaatggaaattgttatgcatccgattcaactatccaactcacacacgactgaatttgatcaacggttgcaaacgactacagtgcatatgcacatgatctcctttaattgatttatggtttcatgtttttagttgtacaactggatagtatgtatagcattactcaattaaaataatttcaaagtgaggcgtgagtctcgtgtgcacaaatatgtttcaaagaaggtacaatctcataaaaatgggaacatgtggatgctaaaattatgtggatgtcagtggaagatgctactgtcagaagaaatcggctggcaaagacttttaatacagtcttataataaatcactgtagttaattaggacctgtttgacagctggagatgttgacatggaacccaatggttaattcaaacaaaggatatgataagaaggtttccaagacatataaattcttcaacattgttcttccttcaagaaccaaatatacgactttagaaacaataattgtcctgcaaccaattactgcattttgtcaagaacaagtgaaaaggacattttgtcaactgtagccaccacattttgtcacgtagaaaaaacttgaaattactatctctgtcatttttcacacattccacacatatcaatataaaataataggattaggataccctccactttatcaaatcccaataaagttatcctcacttccaatgcatttgtatcctactttcataactccaatacaacttgattgcttaaaaagaaacttattgtgagaccaagaaaaagaggcaaaaatcaatttattttggaatggatggagtatgtaattttatcagctttgtcaaatagtatttccattttgagtatactatatatagcacacctttgaccgcgaaggtatatatgctcacatgttctgggagtcctgctaacaaagatcaaaatttgacaatcaactccgtcaaatggatcacctctgaaccaatccagagccaagcatctctatgcaagcgcttatcagtattattcggcctacctatcagcatcttattgtatacaggaattgtatcagatttgtagaatttcttcagcatttgcaaggcatcttgcaagttcttgaattcgcctgctgcaacaatctggcccttaaccctcctggcctatatatctttgttcagcatgaacccatgtgtattcaatttcagtgaatagatcttcagttaattattggcagccggtttttaggcaactctaagaatggaattaatgttctcgatcgcatatcacatatattcccactgacatagctgtgaacacaacatatacatcacaaccagcactgttaatttactcacttcttaaacctgtgttatagtgaaaataattacaattctgtcttattatgggaagaaaaggttgaagtaaaaactgcagttgcccaactctgaatttccttgacatccattatatttacgactagtacttaaaaaatagctatccacacttccacaaattagttgtggagctaggatattcatttttttttaaaaaaaattgatccatatatgaatgaaattaagacaataaaatgaccgtgacaataaaattgttccgtacacgaactattcataattgtgaagcacaataaagtgacaatgacaagttttaaagtaccaatattagcaaaaatatgccattcaagatatgtcctaacgagccagctcatctctacataaatatcattgataaaagtgtgtaattaagctgaaatgataaatgtgtcaacttagggctgctaacagatggaatttttgtccatttaaggtgtattattattgtttcaattcaattttctatgcacatgcataatatatcaaatgattttttttgtttgccataacttaatggatattaaacttaaatactctctctgccccactcaataaggcgcacacacattttaagactcattaaatatttgacctataaatagtttattataattaaatttattatgattttgttgctagaaacattataatacatgagtaatttaaataaagatttatattgaaaactctgcaagtttgactgtgactaaatgactaggatggagagagtacccatgaatcacattggatcctcccttgtcagaaaccattcaaacccactaggccactatatggtccactagctagcgagtgggcgaatgccactgacccatattttctacatatatatgtagacaaacatttggctgtacgtaggagttttgacggaaattaagttcacgtcatcaggtgggaatttaatcatatatacgaactttcgaccctttttttttttgataaattgatccttctcaaaacttattttgaaactagtccttgcaaaaaatttcaactaaaaatatgccgtcaactcagcgtcaaggacattggcgctaaactctaatcgaggtgacatggatttgccgagtcatcataactcatcgccaagatatttggcgctaaagtcctgacgatttaaattaatgtaaaggcgttcatttccaatgaaccacctataggacaatggtagcaagcttcagctatagccccatacaccaaggttcggttcccatctctccttttttttgttcttttcagttttcccatttctcttttctctctcttcatttatttatatgttttttctttttggttctctcattttttttctctctctttatctatatttttccttttctgtttgtctcgtaatattatcttcaaacgatatactttatttgcaacttttttcttgaatttgaaaaaaaatattaaagtggtatattatatggcaaatgggaacttaaaccgaaatttcaaatcaaatttaaaataaaacaaattatagaaatttaaaggagcatatacttctttcatattggcactcaaaatcaaactcaaaataaaaaaaatttacaaatgaaacaatcattttgtaaagaataaaagtgagtagtcaagagaaaagaaacttattttgtcttactctcataatattatatagattttaatagatagtaatctaaatactatataatttaacttttcaaatatgcgatgtaaattgaaaattaaaataaatttataagtagaacattttaatttgaaaagaatggtaggaaggtatgctaggaggaagtttgtcttactctcctaatattatatagattttaatagatagtaatataaatattatataatttaagttttcaaatctgcgatgtaaattgaaaattaaaataaatttataagtagaacattttaatttgaaaagaatggtaggaaaattatgctaggaggaagagaaaaggaaaaaaaggaaggatagtagaattcaaacccagcaccttagggctcacagttgaagacttcaaccaccaagctatcacagttttgttgcaatataatgcttgcgcatctatttaatctcatttggacctcagcaccaaatcacttggcgctgagctatgatgactcaacaaatttatgccacctcggattagagctcagggccaatgctattggcgttgggaagttatatctcagcgccaaggtccgtggtgctaaatccacggcctatttttggttaaagttttttttaagggctagtttcaaaataagttttttgaaaaggaccaatttatcaaaaaaaaaaaacggcaactttcgtgtggagtgcaaacattgagaaactttcggtcagctcgcacgacaggatcaatttcaatagcaaattaaagtcaacacaagtagtgtttacaacttgcctataaacttcgtaaccttgtacttccctatcacacatatattccctcagtctcaaaatgatataagcagttcgatttaaaacttttcacgaagagtaatgtcgacgtttgatgttgcgattccggtatttgcgtggtatggggatcgttggtaccaggatatacgcgagactgaggtaaaagagacagagacgaggatttttatacaggttcgggcccttgaattgtcaagtaatagccctacatgctgttgtcgacaacatgctcttattcattataatcacaccagtacaatatttggggtagtctatctaactgttgtcgacatggcggtatgaaggtttgactcatagttgacaacagggtaattttcctcctcgagtctgtgcctggcgagatcagagataacgctttcgtctctcctgacattatccggagacaccgtaggggactagccgtccttatccctgaagtcgatatccggtgtcttgtcttggcgtatgttggcttgtattggcttctgttgttctgtctatgttgagtgtgtcccctctcctcttagggggccttgtatttatacccatagatgtcccctgtccaagtagaactagggaaaccagtatggatacaatccgagtagttcttgtcgtttccatgtagaactctggttgtcttttcttatccggaacaactcctatatccgcaggttgtttccgtataggacatggtatgtggtgtgtcctgccgagatttagtcgactactattaggtatgtggtattcataaccctgacaagtaagtagagaggcgtaaaattaaattaaatatgattgtaattaattaagatgtaaaattaggtgaaaaaaaattaaataagcagaaacgattatgattggataagatgaagtcgagaagtgatggtatcttatgagttttacgagtaactttaatgttataaatagctactatattctagaaaagatgacgtaacaatatcgtacacgtacactgtaggtgaagatgattaatttatatagaaacctgacctgtaacgggacactactacaaaatatgaaataaaaaaaaaatgacatctttaaacaattatagataccgattttttttaaaaataaacctttaatattaaaaacccgcacctcctaattgagccgagctgacgggcccaccacgaacgacgagataaggccccggtatcatgaggagataaggcattcacagactcttgcaaatctctctccctcatctctcgactctctctcgctgctcgtggccggtggaggtggcggtggccgcgccgtcccttccgccagatccggggaggggcggcctagcggcgggaggcggcatgtggcggcggaagggaggggggatgcagcggcgggacaagaggaggtggcggcctggcggcggcgccctccctccatcggatctgaatgttcttcaatgttagtgaatgatttctgtgatgttctttaatgttaatgaatgatttctgtgaaagatttctgtgatgttcttcaacgtttcttattctgtgatattgtttgattggagattggggattgcgattgatttggagttctgtgatgtggggtggatgagctcgatgcatcggctcaatgcattgagctttttattagctcacgaggggtctcaaaggtgccggtttttaaaataggattggtgttagagcactcatcagtaccgcctccgtgatgccggttaggaaaaccgacatcttaaggtgtttcccaaccgacaccttttacgtgttctgtgttagtgggagaagcccgtatagtgtagtatagtcgatcgtctccaatcgatagaaatctcgtaatgtatcgtacatgtacactctaggtgaagaggattaattaattgggaattaaacctgacttgtaacgggaaaagacaggctagtgtagttcaatcggtagaaatctcataatgtatctcatgtgctgatgtacgtacatatagtgatacacacagtactatgtactccctcctaaatatagaaatttatactaccattctgaaaaagaaaaactctatctctactaaattcgtactccctccgtccccaaaaaaaaaaaaaaaaagacaaatcttgagtttccgtgtctaactttgactgtccgtcttatatgatttttttttataattcgtattttcattgttgttagataataaaacatgattaatattttatgcgtgacttgtctttttaattttttttataattttttcaaataagacggacggtcaaacgttaggcatgaaaaccagggtttatcttttttttgacgagggagtactgagtagtacctattctaattaaggttttatatattttcggtaagacacggagagtacgtcttgtctctctaggagaacaaaacaacaaagcacgcaatatttggatggaattgacagacgtacgttcaaatgagagaagtggcggcggccgccgggcggggtcggtggcggccgggctgggaggcaggaggaagaatcttttggtaggatttgtgttgaatttgttgtttagaatttgtgatgtatttgattgtgatgtgaataagtgatgttttgtttttaaatttgtgatgtaaccatctttgagattttgtgatgtatgatctgtgatttggagatgatttggggatttcacgatttgggatgattgatgtgtgatttatttggggatttgacgatttacggataatttgggaattgagtgaaatcaatatgcaaggagttaaaaataataaaaaactaaaaaaacatatcaatcgggacctggcctcttccatcgttaccaaccgggactaaagatttcatctttggtcacggttgttaacaccaaccggtactagagatatttcacccgagactatcttttgtcccggattcgtagtcagtgttagaattcacgttgtcaacaatcgaacaagtacacacgaacacacggacacgaaagtggagggcaatcaactttattgatgtttctctctctgttacaagtattactttgccctcaacctcactattgtatttatacccacaataggatatcctatatggatacatacatatatatttggtataagcccacttcattaataaggaaacagaagaatagaaggaggaggtaccgtgatcctcatgatcacggtcctacaaatccgactccttcgggagatcggtttcataacactcccctttggatgaataccgcgctatacatatgcctcatcaaaactccttccaaaaatccagtgggagaaaaggaataggagaaggagtacatagtacacgctacttatattgcactgttgtctcattaaaaacctaaatgtgagaaacttcaaagaaaactcactaaagggaaaaagagtacaaccataagctaatctactggataactctttcattcttcaagaatgatatactgatctgcatgatcaatatcaacggaacacagttagggaagtgctccccttgatttgtgcacatctctcatcctcctcataccgatgccatgcacaagcttctcaaaaacactagttggcaaagacttagtaaataaatctgcgagattttcactagtcttggtgagagtcaccttgatttttatttcttttgcaattcatgcatatagaagatttaggcgatatatgttttgtgagactcgtcttcacataacccatttgtatttgtgcaacacaagctgaattatcttcataaataatggctggagttggtgtgatatttagtccacatgtattctgtacatgttgtatcaccctcctcaaccacatgcattccttgctcacttcaaataatcctataatctccgagtgatttgttgatgtcgcgaccatcgtctgcttcgtcgacttccatgagatggttgtaccaccacagagaaacacatacccagtctgtgacaatgctttgtgggggtctgacagatatccagaatcagcatatcccgccatggttaaatcttgattttttctaaagaataaaccgagatcttgtgtgccacgtaaataacggaggatttgcttaatgtcattccaatgccgtttggtaggagctgaactgaaccttgcaagtaggttaacaacaaatgcaatatcaggcctggtaccattcgcgagatacattaaagctccaattgcgcttaaatatggacattcatgtcccaataattcctcgttattttcctgtggtctaaatgggtcactctctactgctagagatcttactaccatgggggttctcgtcggatatgaatccttcatattaaatttctccaatatcttctggatatatgcagactggtgtaacaataccccttcaggagtgtgctcaagctgcagacctaagcaatatttagccttacctaattctttcatctcgaactccgtctttaggtaagaactagcttccttaatcacctgtgtggtctcgatgatattcagatcgtccacatatacagaaataatacaaaatccatgttctgattttttgataaacacacagggacagtcatcattcttgatgaatccttttctaggaattcactgagccggttgtaccacatcctaccggattgttttaacccatacaatgatcgttgcaatttaacactgtatatgttgcgttttgtttcttcaggaacttgaatcccgtcggaaactttcatatagatttcagaatccaatgacccatataaatatgcagtcactacatccatcaactgcacttctaagttcaaattgactgccatagatattaaaaaccggaatgtaattccatccattacaggtgaataggtttcatcgaaatcgatgccaggtctatgcgtaaacccttgtgctactaatctcgctttataccgaaccacctggttgttctcatcctgttttcggacgaacacccatttatatcctacaggggatatccctacgggggtacgatcaacaggaccgaatacttttcttttattgagcgagattaactctgcctttattgcttctttccatttgacccagtcttaacgctttttgcattctgccatggactttggttctgggtccagatcaatgatcttagcgatcttttcggcaaagtatatgtcgacaatagtagtctctttattgtatgtttcacctgtatccacataattggtggatatttcctctattctttcacattcctgatcttcattgtttcctgcaatgtttaagtcaggaatttccggtctcccagtgctagtagtaattgcgcgcgcattctcactaggttcattgccatctgggcatatcactgcaggtggctcatcttcctggtgagctccttcactattctctggtgctgtggtattctgtccaatctgttgtttcgtaggacgtctcctagaaactttagtttggttgtgtgcaaccggtggtctccccctcttcctagaagttagggtagatgtagaaattaatttgaaaaccggttcctctgcgtcatgaggtatttctattctttccggtgcattcacagcaggtatatgagatttcatgatcccctttgggttagtgaaggcttctagcagattatttgcaattctttgcaaatcaattatgctctgaacttcatggtcagattccttagtacgtggatctaaatgtaggagatttttagtttcccactcaatttcgcggcattcgaccttctgtaggtactttcctccccctaatgctgggaaatgatcttcattaaatatacaatcagcgtatcgacccgtatgtacgtctcctgtcaatggttctaaaaatttaatgatagacggagattcaaatcctacatagattactaattttctatgaggacccattgacgtacgcttaggtggcggtatagggacgtatacaacacatccaaaattgtgcagatgggaaatatttggtgcatatccacgtgtaagctgcataggggatacaacattgtatgcagtgggtctgatttgaagtaacgccgctgcatgcaaaacagcgtgtccccaacatgtagttggtaggttgctatgcagtagcaatggcctagcgataagcttaatcctcttaattaatgattcggcgagaccattgtgagtgtggacgtgtggtacagaatgttccactttaattcccaaagccatgcaatatgcattaaataccttagaggtaaactccccggcattgtccattctaatggattgtatccggttatccaggaaattggctctcaactagattatttgggaaataagccgcgcaaaagcgtgctttctagtagaaagtaagcaaacagtgctccagcaagttgatgcatcaattaataccataaaataccggaatgatccggacattggattaattggtccacatatgtcgccctgtattcgttgcaagaatactggtgattctgcgtccacctttaaattagagggtctaacgattaatttccctgttgcacaattagtgcaaacaaaatcttcttggtttgggaaatcgttagttcgtaaattatggccatttgaagtgttgcacaatcagtgcaaacaaaatcttcttggtttgggaaatcgttagttagtaaattatggccatttgaagttaagatgattcttctcatcatccctagaccgtattctgtatgactcaggatttttaaatattgttttcagtgcaacattttcgggttttatatgagtgtagtacagtccagatttcaaggaagggagtttttcaacaacagtcttatgatttccgtctaatttcgttatgagaagaaattcgagtttattctcatctttggtttctacgtgataaccataagcacggatatctttaaagattagtagagtacgactggactttagatataatagagcatcatttataatgatcttggtaccatgtgggagaactactgttgctcgtcccactccgacgatgggtgcattgcttccggcaatagtagcgatttgaccagtctttttctttaaagtctggaaatacgtggtatctcaaaagatagtattggtggtacaacagtctaccagacacatctcctcttccattgccatagtacgtaacactgttctatcataaagaatttaaatatagtcaattcatgaccatatagcaaaaataacactttaagatagaaaaataaaaatctggagaatatattaaactaaaagagttcactcaattattaagataaccacgctctgaaggagcttacagaaactatagttctgctaggaacacaaactaaatgcacacttgaaaaatcacctaactttagtctattacatagtctaaaatttaaagtaacttataatgcaggaagctaagatacaaattggaagacttaaatgtccccatataactgatcagagtccatgagatcatctgagagcttcagctctgcgtctgctgcattcttttccatcttatcatcgatgtgcattgcaaccactgccttctcgtcgacctgcttgtcgatatgcatggcagccatcttctcttctgagtgctggatctcaacagtgaagtgtgactcatgctctgacttcttcttcctgtgcttctcttgataaagctcaatgagatgcttaggggtgcggcaaatgcgagaccagtgtcccctagtgccacacttgaagcatacctgatcttgctttccatattcaccactagtagagcccttcttagacttactgttctgatttcctttcttcttgaaagacgtcttgttaactttgccaccatttttccagaaattcttccctttgttctggttattctggtttttccccttcttaaaggagctagcatttgcttcaggtgctgctgaacttccagtggggcgagacgtatgattttcaacaagtgtctcatcttctccttgtgcttcgatgagcatggagaccagttcagaatacttctcgtatttagcctggcggtattgcctctgaatattcacatgattggcatggaaggtggacaaagttttgtctatcatgtcagcatcagtgattttctctccacatagcttaagacaagtgacattgcggtgaagaactgagttatattgctccacagatttgtaatcttggaaacgtaagtgaagccactcacgttttgtttttaggagcaaggcctttacttgatggccatagcgatccttcagtgagtcccaaaggaccttcggatcttcctcagtcatatactcattcttgagagtagtattcaaatggtgcctcaggaaatgcagtgcctgatttttctcagctgaagttggtaaattattaactcctccagctgatgttgcaatagttgggtcctgaatgcagttcaggagtttcttagcaccaagcatgattttggcatccagtgcccatgtcaggtaattcttgccgctgactgctagttcagcaaaatctctcttagcaatatcagtcattttcctacattagtcatgcaaaattcaataagtactgcaagtaggagcatgacaagtgtgcaaatagtaaattctggttatctaaatttagtactgtgtcaatatattcccataattctcccaataattttcagaattgtttcactaattatttaggtaccaaagtaattactgaattactaacccattaaatagtattctgaaaacagctaggaaaaataaaccataaacacgatgctcaggttcaaatgatgagagctcattgcctaaaaaccatgtctctaggattttatggttgattcaaaaattaactaataaatagttaatatacagaaaattgaaaatacggaataacaaaaataatctgacattctcagtaatttctataatcccgagggactattccgctaaaattccaaatccgcgtgtatcctgaaaattctaggacatatttagaagtttgccattttcgggccaaatttcgatttgagcccgactccttttataggcctaatttatactcggcccacctctatgtaccggctactcaaattttaaccggcccgtcgggaccgtcggcctgctaatggccttggcccataagcggcccaacaagagcgctgcaccttatccaatcgggtggctagggttgaaaccctagcccccaattccaccgattcgatggtggcggcgagtatcccggcggctcatgcgagtgaggcggcgaggttgacggggctcgtcgtcatggcggggtcgacagagctcgtcggcgcggcggggtcgatgacagaggcggagcggcggtgaggctacaagcagcactgacgctggcgtggttggctacgggccgtatccagcgtccggcaagcgcagctccttgctgtgcgccggcggaatttggctcggcatgtgggccggcaaggcggacggctatcagcggcgggaggccgcggcggcttcggcccccgacccagtcgtgtgcggtagcgctggaggcgtgctgtgcgtgccgtcggcgggggggatgcgggcgcggtctcctcagcgtctctgcgggcggcggtcgtcgacggcgagtgcggatggtcgattgaagacccgtcggctggcttttcaagggcgaaccgacgacggaaagccgatggcacgattctgcggccatcggtgaagggggtggctggcgacgcgtgctggcggcagcaagggcacgacggcgcatgctggcgtcatcgactcggtttcgtcatcgtcaacatcaggaggacggcggcgctggcatgaggatttgggccaattcgttcgtaatcggcaattacgttagccaggtacgcgattcttctcatgtgcatcgcgattacaccctgaacgtagcgtcgcccttcgaggcatcactagttctaaaccgtcgttcttgctgtggcttgtctgatccgttcgcgcgtctagggcgtacggtatccgtgtctttgtttgcaagaaaagaaacccagcgcaaaggctgggaacagatctaatcggactatagcgataaccgcttctcgttcgatagatcggttgtacaagggataaccccatacgcctgtcgcgcatagggtggagagctgcaaactctcctgctacgtgcgccataagggacaaatccacgtagtacaacccatcaatcgaacgattagcggagaaataaaaataacagaaaacgatctagcaagtttatcgttatccctatagaacgagattagaacagatcgatgttgacaatataccttggctgaagagcacctcgtgctgataacgtgttagaattcatgttgtcaacaatcgaacaagcacacaataacacacggacatgaaagtggaaggcaatcaactttattgatgtttctctctctgttacaagtattactttgccctcaacctcactattgtatttatacccacaataggatgtcctatatggatacatacatatatatttggtataagcccacttccttaataaggaaacagaagaatagaaggaggaggtaccgtgatcctcacgatcacggtcctacaaatccgactcctttgggagatcggtttcataacagtcagggggttacaaaccagagttaaaaaccctttctccagcagctacctattgttgagaaggccgcactcaattaatttctttaatctcacatgattatttagattcaggacttttggtttgtacagattctgatccttgcacggattgagggttggtcttctttgatgaaccatgcagagaacacgggatgttgggatataggatatccgatcttcttttaatcttctagctagtacatgttgtatcttgtagttttagtctagtaatttataatttaatttttaccaattatctcaccattgcttaaatgactggatgtttgaattgataggctgtgttcttggttaatctctttttttacacttatcacatatataattaattaattatataagtcataccacatgttgagagacaatggtgacacaatcgacttgaaatcctggctccggccattatggcacgtggaggctaagaaataagcaactcaatttacgggttccgcatggtagttgggtggtcactgccatcactactataggttctaatatcgaataattgtttgttaaaattttaaccaaacaaaagaaaatatatatacactttaaaatatactccctccatattttaatgtatgatgccgttgactttttgaccaatgtttgactatttttttattcttttttttgtaaatatgaaaatatttatgtcatgcttaaagaacatttgatgatgaatcaaattacaataaaataaataataattacataatttttttaaataagacgaatggttaaacgtttgataaaaagttaacggcattctactttaaaatacaagctagctagtccaagtccagagatagatcgatgcatgacctaattaattaactctccggtgtgtgcgtgtgttggggctggggcctgcaggcgttgccttcatgcagaagaaataattgtagtggtggtccgtccgccggccattggatatgtcgtcatcgatcgtcttcggcgtcgtcgtcgtcctttctccagctctcgctgacaggattctgtgtggagagcggccggcggagttggtagcgaatttgcaaatgcacgcggtcgcgccgaattctgtgtggatgacggcagcccgcccggtcaccctagcatacgcacccggtcttgaaaacttgagaccagtatgaaacattgaaaacccctctgcacgcatatatatatatatatatatatatatatatatatatatatatatatatatatatatatatatatatatatgagttgcataatatgaaccaaggtgcatatgcacctatatgcatagtttgacacatgtatctacctgattggttcccttcatggtggctgtaagggatggtacatgttatgatttttgtggtccaaaatgtcccttaagtagtactataatagttcgaatgaattgtttttgtggttttcctttttttttcaaagtaatgtcctatgtttatttaatatgttgataaaaaatatgacattatatttctgaaaaacatataatgtagattcactacaacatattgtgagataattttgtaatttttttataactttagatatgtaattgatattttattcaagaataatgtatttctatttcccccctcaacggttgtattatctttttatgggtggattttgtgttctctttggtttgcatttgcaagaattttttttctcatggttttttagtcaatgcaagttataggtttagatataaattattttgtaaatgctatttagagatgtgtcatttgcaagtttcatttttagagaaatgtcattagtatgaacattaggagaccatttgcacattttatttagagatataaaatcattttctaaatgctatttagagaaatgtcaataacagatcatctgcaaattttatatttcatacaaacgaagatatatgatatatcagtatgaacatgttcaataaatcttaatatatattactctactacaaagttaagagaaataaaaaatactaatatttatatgtacgagtacaagatagaaatttgctttgaatcaatgaaccaatgaacgtctcgtattgtaacatactagtataaaagggcaatttgggacaaactcaaagtgggcagtggcattgtgtaccttccctcatctctcccctatatagtaatagcacaaatcttagcagccatcaatggtgtaaattgttggtgcatatgaacctaggttcacatttgcttttccatatatatatatatatatatatatatatatacttaaaaaaaaatttgtgcgttacaacgagtgaaggttattttaatcttattattattatacggtttagttaaggtgaaatttactgtgggaattctcttagatatttttttttacaaaatcaggagctgcaattaaaagtccgatcgtcttaagttagtatataagtttttctttaaaagaaatttcttatatgacttttatggtatttctaaaagcgaaataacttaaaaactgactcaaacacggatctgtatttctaaaaacgaacgaacttaaaaaccgacttaaatacgaatgaggtactaaaataccgataaaaacatcttcaatgtttataatagtaaagagagatagaaataaagatacttagcacaattatttgcttaatatttgattttcttttcctaaaaaaattatactttcggtcgttctatatctgttccaagatgttttgatttctgcaataatgtcgttctatatcggaagtatgtatttgttttgatttccttttatttttttttctcgttcacttagttttcattctcttcttccgtcttccgatgcgtggacgctgcatattggcaagacctccggtgaaaactcttcattcttaattgcatctgacggttcttgttattccgatgatgtggtttaatctgctaacgagaagaaacaaccaactcaacatgaaaaaaaaaattaaacccttactttatctatacctaataaaaaaatacgtaaggcttccggtggtttttttcgtccgtcatcccacgttgctaaaatccgttttactccgcttaatagtcggatcggaccttttctaatctactccaaaacctcggttgatatacaatatttaccgctcatgtagacaccaaccacaactagcagcttgcctacttggtcagtggagaaaatcttcaacccgccgaccacggttcgattcccaccagctctcccttttagacctattactttgcctctatctctccgttttagacctattattactttgcctctatctctccattttagacctattattactttgcctctatcaggctagattgctcagaaatctcaaatcctattgctactttgcctcagaataagtctactttgcctcccacatctcaaatcctattattactttgcctctcctaggctaaattgctccgcaattttttttatccgcctactttgcctcccacatctcaaatcctattattactttggctctggctagattgttgtgcaatttttttctctctgccactagcacgttagtaattctgaaatcttataatgaaccagtttttaatttgaaaattaagcataattatttttttccttttgtcatctgcaaaatacgacatattagagtccgcaccatctatcgtccacgcatgagccgtgaaaacgattcgtctccacgcaagtccatgttcgattttagaaattatatcaggctcttaccatgcatccgatggctgaaaaatcaaaagttttgcacctctttcttcaatagatatttagtgattctgaaatcttataatgaaccagtttttaatttgaaaaataaacataattattttttttcctttcgtcatctgcaaataacactatattacagtccgcaccatctatcgtccacgcatgagccatgaaaacgagtcatctccacgcaagcccatgttcgattttagaaattatatcatgctcttgccatgcaagagttgagagagagcgtgttacgataatatgagtatatcaatatgcaatagcgtttcttatcaatcctaattatcattaatccagtgaacaatttatctatcttagaacattattatatacatgtcaactgggtatttatatcatttaatctgtcaatatacccgtagcgaagcacgggcattttgctataataataacaaagggattttggctggaaaaacaggaacccggaggctatgggccaaagtactgctaggaacttatgggccactttctctggtggaacctgagcccgtgctagtgttgcaccaaaaatgtctctcttctacagatgtggacaataagcacttggatcatctatgcaaccatttggatcccaagatagaaaatacaaaaagaaatttaaataattcaccgagtcttctcgctgctttgcatttgttgtggccttgtggggggttcttcatgcacacctaagtactctgaaactaattatctgcactcatctcaataaacatgttccttaaccgttctatcattaatcaccaaaactcatttagggggctagatgcactttcactattctcaacttgctttgcttgtatatcaagtgtgattgagtctcttgtctagtttttatcttgcttaattgctcgagtcttttgctatatgttgactagattgtcctagagcagtcggacaatatgagcccctttacaactttccgtttttcactctgaccggacaatccaccacattgccaaactctccgactgctcctatagttagactgtccaacctaatgtcagactatccggttaagctttattccactgcaaatttttgaatttccaggaatgcctattcactcttcctctagctctaggcgatgtatcccatcctcaaggccatttcaaggacaacatcgatggcagagatatcgatggcggtgaggtcggaggtggctagatctggtggcctctaacctccgaatggctggatccgatgaggaggagcgggtgttgcccggatgtgatatgcatcctggtccaattaggatgaggcatgtgtggcccatgaaagttgtgtgtgcatgtttggtaccacatttgctagtttagtaagggtgaaaccaagttataagggcatatttagtaccataagagtttttgtgaggcttttgtgacccataagagttgtgtgtgcatatttagtaccatattgctaatttagcaagggtagaacaaacttatattttcttttgtaccagtagtgatgagtcagtccattattgttgggtttttaaataaaccagcactgatattctaggtttttttaggacacgcgtgagttgggggtgggctcgaaacccttatcggtgcttggtttagtctaatcgacacaaataggggtggttatgatggctattctgtagtacactagtacataaatgcccttatgtgcctgttggaaactggttgtaggtgccgctgaatgatcgattaatcctatatatacatgcgatggtgaaaattgcagtgtagccaaatgattaatcctatatgtacatgcaggatgaagaaacacgtggatgaatacaaaactcataatttcaacattgggcagaagaacaattgtgagttgatgaagttaaaatatcgatcatgtaataaataattttagtctaaaaaatcatgacacattgatcaaatccatcaattgggctagggttgaaaagtatggaaggaatgggcttttggcccaaaaccaaggaatagttataattaactttttcaattatagtgtatagcaattttaatgttttaatttgttgctaaactcctaatagttgtaccattgaagaaatgcttttacccgttgcaacactcgtgtattttttctaagttaactttaaatgagtactatcacaaactctgaagttgttaccaggttcaaaattccggaataatactttcaaaaagtcatgaatttaggcccgccctatatgaaactatttcgccgaaattttcaggaatgttttttttttgtgaatttagccaaagtagtttttcaaatttaacaaaacttgttcaaaattcaaattattctgaaatttccacaattagtgaaatttcggttcaagcagagtctccagatatagaaagctccaaacagaaaaatctgaacctagcttggtcgttatcagcttataaccgccagtaatggtagctagtagtagcagctactcaaagaagcattgccgacgtgatgaagaccgtacgtgcgcgatccggtgatctctcacctcttcggcggcggcggagcgcactgtattgccgccgccggcgaccactccgtcgtctacgacttcgagctcgtcgtgtaggaggttggcgtcgagctcctcgccaatgcgctcgcagaggttgtgcagcacgcagcagacggccagcatgttggctagctccggcagcttcacctcggcacgccgcaggcactgccaccgcgccctgagccgccggaacgcgcccaccgccgccgcgcgcgcgtcggccacgtgcgcattgagcctgtcctgcgcccacgtctggttgggctgcgtgtacggcaccagcatccagctcgtcagcgggtagctcgcgccgccgacgagccacagcggctgttgccacccgagcttgtcgtggccgagcagaagcccagcctcgcaccgggcgtacagcgccgacttcgcgaggacggcggcgtcggagagcgagccggggtggccgatgcagacgtcggtgaaggcgccctcgtcgtccacgacggcctgcatggcgacggagtaggtggccttgttgttccggtcggtaaggcggtggtcgtagtactcgccggcgtgctccctcggcacgacgatgcggacactggtggagaaaccatctttcgtcggtcggactaattccacaatagtctcggttgcaacaaacaccgggactaaagatccccggttaaaaagggtaacgggcatcaccaaccgggactaaagatctttagtcctggtttaaatgctgtcagggcctgtcaggccctcccgggatatttagtcccggttggtatcgtaacattagtcggactaaagatcccagcgatctttagccccggttcataacaccaaccgggactaaaatcccacccctatatatatatatatgtcttcgtcctcctccagcccgagtaagcttcaaaatttcttcaaaaaagaggggaggtcatgccaaaatttctattgaatttattttggtgattatatataaatcggaggtgcctaaaaggttagcaacttcatcctccaatgttttatttttttcatattacatttggatcatgttttgcacacttttttgtcttcaaaattttattgttagttgatgagagagaaaatttgtgtggagaagaaagaatatatagaaatttagtttatttgttaaagaaggttttataaaatagttgagaaggaaaatatagtgaaagttaatcttgaataatagaaaacaaagtaaaatgaaaaattaaaataagtacaacacattaatattagtttaaaactttataaatagtaaatatataattattcggtgtaatatttcataattttgtatgaataatgatatgtcattattgtgttactgttgaaagagtttgtaattattttataattattgtatgactgtcattattgtacgaataattatgtgtgtacgattttttttcatgtcatgtagatggatcggcaatggatgtacgctgactggcggtccaaagagtttattgacggcgtgcattattttttgagagtggccgaagctaacaggcaaaagggttttatttgttgtccatgcaataagtgtaagaatcagaaggagtattctgcatccaggactattcatttccacttgtttgagtcggggttcatcccaagctataactgttggacatcccatggagagcaaggggttgaaatggaagaagatgaagtggaagacgacaatatttcggactttgctcagtactctggatttgaaggaaatcaaacgggcgaggaggaaatggatgctgatggttacgacgttgcggatgatcttggtcagatgttgcaggacgccaaggaggactgcgaaagtgaaaagggggcccataaattggacaggatgttagaggaccacagaacgtcgttgtacccaggttgcgagcaggggcacaaaaagttggataccactctggagttcttgcaatggaaggcaaaaaatggtgttagtgataaggcatttggcgatttattgaaactcgtcaagaacattcttccggagggaaaccaattgtccgagacaacgtacgaggctaagaagatagtctgccatctaggactggaagttcagaagattcacgcatgttcgaatgattgtatcctatatcgcggtgaggagtacgagaacctagaagcatgccctgtttgtaaagcactacgatacaagattagatgagatgatccaggataagttgatgagcagctaacgaagaaaagaattcctgctaaggtgatgtggtatttccctataataccacggctaaggcgtttgtttaggaacaaggggaatgctagaatgatgcgatggcacgctaaagagcgtcaacaggacgggatgttgagacaccccgccgatggttcgcagtggcgaaacatcgacagaaaatttaaagactttggaaaggacgcacgaaacatacggtttggtttaagtacggatggcatgaatccttttggagagatgagcagcggccatagcacttgacccattacgatatgtatctacaacctcccccgtggctatgcatgaagaggaagtacataatgatgccgattataattcaaggccccaagcaacctggtaatgacatcgatgtgtacctaagaccactggtcgaagatcttaaactgttgtggaagaaggaaggtgtccccgtgtgggatgaggacaaacaggaggagtttaacctacgagcgctgttgttcgtaaccatcaacgattggcctgcacttagcaacctatccgggcagtccaacaaggggtacaaggcttgcactcactgtatggatgaaacagaaagtacgtatcttaagcactgtagaaaggttgtgtacatgggtcatcgtcgattccttgcaacaaaccacctggttcggaagaaaggcaagcactttgaacataaggcggaccaccgtacgaagcctaaacatcgcggcgggaaaacaatgtttgctatggttaaagatcttaaagtagtgtttggaaaggggcctggtagccagcccatagagagcgaagatggtcacgcggcgatgtggaaaaaaaactctatattttgggagttaccctattgggaattcttggacgtccgccacgcaatcgacgtgatgcacctcactaagaatctttgcgtaaaccttcttctcttcctaggtatatatggaaagtcgaaagatacactggaagcacgtaatgatctgaagcatatggaacaacgcggtgaccttcacccggaaccaaaggagaaatgaagccattacttgagtccagccagctacactcttagcaaggcagagaaggaaagtatgtttgaatgcttggagagtatcaaggtaccgtctggatactccacgaatataaagcgaataataagcacgaaggagaagaagttcacaaatctaaagtctcatgactgtcacgtgctgatgacacagctgctaccagttgtaataaggggtatcctcccagacaatgtctgggcaacaataacaaagctatgtgctttcatgaacgcaatttcgcagaaggtcatcgatcctgatagattagaagccctgcagaatgatgcggtgcaatgtcttgtcagttttgagttgatatttccaccttcatttttcaatataatgatgcatctgctttgtcaccttgtcaaagagatcggtattctcggtcctgtgtacctacacaacatgtttcctttcaagaggtatatgggcgttctgaaaaagtatgttcgtaaccgtgctcgtccagaggcaagcatcgccaaggggtatggaacagaggaggttattgaattctacgtagaatttatcgaagaccttcgcccaatcagggtacctgaatcacgccatgaagggagactacggggaaaggggactcaagggagactacggggaaaggggactctcggaaggaaagcaataatgacggtagacaacaatttattccgtaaagcccatttcacggttctggaacaatctttattggtggctccctacatcgaggaacacttggctttaattcgcgccagaaacattagtaagtccgatgcatggattacaaggcatcacattgatactttctccacgtgggtgcgacaacattccatgggtaacaagacgattaaccaacaactggcctttctggcgagggaaccatctggcttgatcacgacattccagggatatgaaatcaatgggtacacattctacacgagagcccaagacatgaagagcacgaaccagaacagtgttgttcgtatcgatgccatgggacacgatggtacaactggcacgtattacggtgccatcgaggacatatgggaacttgactatggacctctcaaggtccctctgttccggtgcctatgggctaggttgactggtggaggcgtaccgattgatgacagtgggatgacaacggttgaccttaacaaggttggatactcggacgaaccttttgtccttgccaatgatgtaacgcaagttttttacgtcaaggacatgtttagcaaaggaaaaaaagggcaaagggcctgacgagccgaagcgccacgtggttctcccaggaaaaagaaaaatcgtcggagtagagaacaagactgacgaagattacgatcagtttgatgggcaaccccctttcacagtgacgattgaccctagtatcctcctaacaaatgaagacaccccttactcacgtagcgatcacaaggaaggaacaatagtcaggagaaagtacgtgcggtcaaccgtcaccgctgatgtattaccgtaattgttgtgtacacgatgtaaactatttttgatgtattgaatatccataaaatcaattgttgtatggcatatgttaattatgtatgattattagaatttttatcaaattgaaatcaaccatatgctagttatatatgattattagaatttttaaaagttttaaatcatgcacgtggtatttacatatgttaattagaattttcaacaatttattatcatgatgtgctaattatatatgattattagaatttttattaattttaaatcatgcacgtggtatttacatatgttaattagaattttcaacaatttcatatcatcatatgctaattatatatgattattagaatttttattaattttaaatcatgcatgtggtatttacatatattaattagaatttttaacaatttaatatcatgcatatgctaattatatatgattattaaaaattttaacaattttaaatcattcatgcgctaattatatattatccacttagtttactacagacaacaataatttttcgaaggttttgtcattaatttttcgactttaaataattgtaatgcattatttactattttagaaacacaaatgtaatgaaattcaaaattcagtgctattatctttagtcccggttcttaaccctaaccgggtttaaaaagaatttggaaatagcgggaaaagatctttagtcccgattggtga

SEQ ID NO: 8695 - DNA, 183443 bp, Oryza sativa
gggacaaaatcgtttgtacgatggcatttaaaggatctttgtccggatgaatggttaggatcctttcactactggaaaaagtgtttttccaggcgggccaatcaccatttcactggcgggcaagcggtcctcctgcaactcaacgattgtaaaaatagttgatttttgcaggcgtgtaattggttcgcctgtgaaaatagcttccagcgctaaaaaaaggcacccaccgccgtttccggcagtagattcccgttcccaatccagttcccacacatttcccatccaatccagtgaatccaaattcaacaaagaagtcaccagttcatccaaaattcagtttcacacacaccagccatatttcagtttcacaagaatcaattcaagcaaagaaagcaaacaaaatcacatgtaaaatcattcctaaaatcactttatacatatagctcatccatcttcatcagcaaaaactcccacatcgccgggagggagggagaggccgggagccatcgtctgccgccgctgcctcacggccgcgccccgccgtcgtccgccgccgccgccaccgcacggccacactccgctgtcatccgcgccgccggccaccgtcctccccccaccccctccggccagatctgggagggaggggccgggagccgtgccgcctcaaccctcctcgccggccgccgccgccaccgcccgtcgccgctgccgccaggagcacgcgccgccaccgccgcctctggccggcggccaggagaggtgaggggaggagaggggccgatgagagaggagaggtgtggaggggaggccgggaggagaagtgttgagggagagagagaaatgagtggtggggagggggtgggaggaggagataaggagttaagattttttttagtacgatttttgcaggcggaccacataagggtcacctgcgaaaatccggttaagtggtccgcctgcgaaaataaagcggacaatgaacttcaccccgatttatatttttgtaggcggttatttggttccaaaggtcatgtccgcctgcgaaaaaagacctcgcgtcgggaaaaatgccttttctagtaatgtttatacttatgaagagagatagtatttcattaacttttaatttatagcctatgtagctaataaattgttaatattagcgtgatcttttattaaccgagcaatagaacatagaaagaaagaaacgttgtagtcataacttgggaaacaacttcagtgacatggccacttgatgagttttgagagcggttttcactgacgtggctcattgacttagtcaaccatgtaaggacgtggtagtccaatcacaaaataaaagtgaatccatatgtaagtgactagaaaaaaataaaaaagataaatgaggcccacttgttatactcattatctctctttttcctccttcctccctctccctatccctctctcccttcactattcccctgtcggaagtggcgagggagggagtggtggcaggggctcagggcgatggtagtagtaaccggcaccagagaggggctgtgtgatggcttgccgttggtgccagagagggggctgggggaatgtcgtgccactggtgttggagagggggttcggggactatgggaatggcgtgccaccaatgtcaaggagggggctgggggactagcggctcttcgcctgcctccatagcttcaccaagttcgactccaccctcgcctcctaccttgatggcttctccaagctcgagctcccattgctgagtgcggcgccaccactccccttttcacttagtcctccctgttgctgtcccatcccgcctcctcgctgcccacccctccttcacctccccgcagggatcttgtccttcatatctctcccaggtttcgccaaccgccgccgccgccaacgaggttgttgccgcctccagttcctcttccaccggacaccaaacccctccccctcctccgtcgccggtgatgccaagctaagtggcaaggccgctggttctagactttgagtggttccaagcatgaagaagttaggggaaaggaagagggctgataagtgggctccatattttttatattttttcctagtcacttatatatgggccattttctattttgtgattagattgccatgtcaacgaaaaacactatgaaaaccgctaagggagttaaattatatcggtttaatagttagggtgaagacatccgatattatggtttagggatacaaatcaaattggacatatatttgaggggggtcataatggacttactctatgggaaaggcaattttgaagaggaaggatgcggccaactttaggccttgtccagcaggcctcaattccggcccattccctgttgatggacctgaattaaagcagggccttgagagaaaaaataataatttgtccaagaaataattttactctgatccttagtgcaattcacgaggggaaagaagaatagcattgcaactaagtaaggaataagttcactctgtgaccctaaaagtgattgaaatctaatccgtgaccctaaaccgcaaaacaagatatctcgacccccaactcttaaaaccggtgcaatttgactctctcgcggttttggagggcggttttgctgacgtaacgcctaagtggcggtgttgacagggtcttccttacacgtggcgttgacgtggcgcttgcgtggcatcagaattaaaaatatatatatatatatggcccatttatcattcacataaaggatgacatgtgggacccactgacatgtggggcccacatgtcatcctctcacctccccttcttcctcgtccccctccctctctcccttctctttttctctcccccaaactctcttcaccagagcggcagtggggacggcaacggcgtagaggggaactggcggtcgggagtggcggtggcgtccggctcagttgttgtcgcccgccaccatgaccgatgaatctggatgacgacggttgtagtggtgggcgtagcgcgcggggccgtggcgggaggaagtgagctcatcgaagccgttgccgtccgtgtccatggcggcatgaaggtgtggatctcgtcctcggcagccgggcgaagaacgagcgagcgaaggagcgcaactgcggcggcgactgctgctgcgatgacgacgtagacaataggggtgaggcggcgcagtggtagtggtggtgggtgtagctcctggggccgcacgggaggaggcaagctcgtcgaagccattgtcatcagcgtccatggcggcatgagggcgtgggtctcgtcctcggtggccagtaggactgcaagaggacgagcggcaggaggactgcaggaggagagacggcggaatgggggcggcgtgcccactccgcctcctctccaggcccgcgcccgctgcccacacgctccccctcggggcacgctgctcccacggccagcctctctcttcccccacccatggccgctgccgactcccaccgccacagccgccgctcctcaccgcccaaccgccgctgtccccactgccgctccggtggtgaagagagtttggggagagaaagagagaagggagagagggagggggatgaggaaggggaggtgagaggatgacatgtggaccccacatgtcatcctttatgtgaatgataaatgggccctatatattttttaattctaatatcacgcaagcaccatgtgtaaggaagaccctgtcaacaccaccacgtaggtgccacgtcagcaaaaccgccgagggagacaaattacaccggttttaagagttagggggttcacggattagatttcgatcacttttgagagtcacaaagtgaacttattccactaagtaagcatctctgcttttattgggtaaaaatgacacgacgcattgcatcagaaactgatcatgaacaaccatcataagaaactcaaatttgactcctattacaccgaatcaactcaatgtggaaaactcaaaagtaagtgctattacaccctaccaaacttcaaatcggtcaaaagaatcgacgacgacaagcaccatcaggtgctctagtatgtatgcagtacacgtatacgtatatgtatgggtacacaaaaaaaattaaaaatgaaaacccctctaatggcagctaacgctcgcgccaagatttgaataaaaattttattgcttaattcgatcgatcgtcttcctcctcggtgggctcgtgctcgatcagcggtagcagcggtaggccggggtgtacatgcagctctcggcgtacttgacgaggtcgtcggggcgcgggaggcggctggcgaggccgagctcgtacgccttggcggcgaccttggcggcgatgtgtgcggagatcttgcggatgttggtgaagggcgggaagatgagccccctggcgaagttgtcctcgctcacctgctccgccagcgcctccgacgccgccagcagcatgtcgtcgtggacgcggatggcgcccgagatcaccacgcccagcccgaaccccgggaagatgtaggcgttgttcgattgccccggcacgtacgtcttcccctcgtactccaccgcgtcgaacgggctcccgctcgcgaacaccgcacttccctgcacaaacatttcgattcagatcgccattgacgatttcgattcagctctattgatctctcaccttggtccaggtgtatgcctcctccgcggtgcattccgagtgcgacgtcgggttggagagcgcgaagatgacaggtttctgcatttgatttcatgttagtgcacttgatcatcatcatcaagaagaggagcgcacatatgcagccaccatgatgtgtgcattggttacctcgttgaaggcggccatggcctcgacgacctcctgggtgaatgtcttgccgacgccggaagtgccgatgagcacggtcggcttgatggactgcacggcctccagcagcgtcttcaccggctcgtgctcgtgcgcgaatggctgcttgaagtgctgcagcgactccttcctcgactccacgatcagccccctcgagtccaccagccacaccttcttccggcaatcattgatcggaatctccgtctacacgaataacacacaatcaaatcacactccatattgttgtttatcatattcagtgaaagtgagtgaggcaatattcagagtttgcagtgtgttttcattcagttacctgctttgacatctcgagggcaatgagctctgcgatgccagttccagcctcaccggcgccaaggaacaggtaagtgtgatctgcaagagttccaccgaccaccttgagcgccgcaatcagacctgcgaggaccactgatgctgttccctgccatccatcgttgtagaccaaattcatcacattagtatttttgtggctactgattcagacaaattatatgggcgtgaaaccagaagaggttcacaaaagtttcgctttcttgtacctgaatgtcgtcgttgaagacaaggtggctcttgctgtactttgcaagcaagtcaaaagcattgtggttggcaaagtcttcaaactgtggaaaggaaatttgatgttattcagtcatctcctgaatcctgataaaggtaaaaacagagtgtgcacatgtaacttaattaattcttctatgcagactgacctgaacgagcactttctcgccgtagttttgcttaactgcggtcataaactcctcaagaagctcgtggtattcctgataaccatgataacagagataagataaaaaagaaattctatggtaaaaagagttttctgtttcaccaattaattgcaggtgaactacgtgtgcagaaactgtggcttacctctccggtagcacggcgttgcttgagtccaatgtagaattcgtcgttgagcagtgactcattgttggtaccaacatcaattgtgattggaaggcactgcatcatacatatattcacatttatagtcagcaaagcaaatccatcaacagactaaaaatactttgatcatttcatgaagacaagaacactcacagctgatgggcgaactcctccaagggcagtgtacagagacagtttgccgacaggaatacccattccctgacatagtaacagcagcacatatcagcaaatgcttccaggtaaacatacatcatcacatctaaattctttcgacacattcatgacagcaaaatcagggcaggaaatgggggaaaaatgcactacctgacaaccaagatctccaaggccaagaatgcgctcgccgtcggtgacgacgatcacctggatgctcctctccggccagttcttgagcacctcaaggatcttccccctgaatccaccaaacaaacaaacacagattcctgtcaggctgcaaattcctaatcaacctcaccatcatcagaaggaaagcagaatcctagcaacaaaaaccgcacttgtccttgaggctgatgtacaggccctgtggccgcctgtagatgctgccgtacttctggcaggcctccccgaccgtcggcgtgtacaccaccggcagcagctcctccacgttgtcgatcaggagcttgtagaacagcctctcattcctctcctgaaaaagaaaagcacaaaaaaaccaagaaacatgacagtgttcagtaatccacagttctagtgaaagggcatgtaggtgttgagttcaaatctccataggaacaaatttcatgttgggttatctaagggctaagttctctgtttggtaagctaagtttctaatttaaaaaggctgcatgtatccgattgaatgtagagctcgagtaaaaatacccttctcaaaaaaaaaaaaagaagtaatccacagttcttgctgcatgaacattatcaatgcatttgatttgagtgggtgatcaaacttttggtggtggtggtggtggtgtttgtgattgtacctggaggtccatcatggcgatgtagcgctggagggggacggtgtagttgcggaggttgtgcatgagcttcttctcctggagctcctgcgagacgatggatggcgggaggaggccgcggaggtagtgcgcgtcgcgctccgcctccgagaaggccaaacccttgttgtgccgcgggtctctcagcagcgtgtacccgctgcatcacatcacatcacagcgcaagaaattcgaattcaaattcaaattttttgttatggccaccgaacgatcggttgcgattcggaaagactcaattctcaaattaatgtagattttcatggatttgatgcaatgaacgacacgaatcagtttttttttaggccggacaagcttgtaactgaagcgagtcaggaaaccggcggagtaaaacaaacggaaactttatggtgggtgtagagaaagttgggaacaaaaacggaaggaaataaaaagcagaggcttgagatagaacaagggattgatggatgccgaattcgaagaagaagacgaactcgaaggagatgatgtctctaacctggcgacggagaaggaccatggggtgatgagctgatcctcggtggccctgtcctcgccgtacgtgtcctccacgccgccgccggccatctcttccgatcctcttctcttctcttctcctcaaaattcaaaaaccaaacgatcgaacgaaacgatcgatcctcttctcctcagaaataaaaaggaaacgatcgatctgctcttgtcctgttataggaagaaatatttgcgtggatgggatgcggcgaggaggagaggagacggggtatttatagagagaaggtgggggcccgcgtgtgaaagggaggaaacgtcgggtcggaggagtcgcgcgggtggtggcatttaattcgtaggacgggtggttttcccatggagcgaaaggggggaaggtggtgggaaacgggaggggattgaatagtgggaaagcggaggtaggtgacggaagacgagtcgtcgtcgtggcggccgtcgccggcgagcggcgaaccggcggcgggggtatgtgcgtctgttgtttttgcgatgggcgggcaagtgcacgggtgggtaccggtggatggtgcaatggtgggggtgattggttttgcacctggttttcgggcttacccgtttgcctgtggctccgtacctggaacggtgcgaccccaccatttcccttttctattttttattgcttattataaaagtgaaataaaattgtatgtgtagtagcagcattggtagaaaaacaataaaaagagtgtagctggtttaggttttcatttagtggaagtgtggaactaacccatccgattataaggctgtgtttgaaagataggggattgagaaaagtgggaagatacgtaaaacgaggtgagccattagcacatgattaattgagtattaactattttaaactttaaaaatgaattaatatgattttttaaagcaacttttatatagaaaatttttgcaaaaaacgcaccgttaagtagtttaggaagcgtgcgcgcgaaaaacgaaacaaacaaactccctttgttctccaaacgaacgcagcctaagttagatttgatggcgtatttttcttatggatgtagtacttatcaatgttgataacccgtgataatttcgtcaattttaaaatatgcttatctaatcatatctactcataaaaattaaatgtgtgtttatagagataattatacacgtgttgtggacatctatcctttatatagtgtttctatccatcataaacaattaaagatataagtatatttgaaactttaaataaactgcaccgggtccttcgcagctggcttttacgtgcctgcattttgagtactacggcctgtttagattacaccataaattttttcatcatcgaacatttgaacacctgtataaagcattaaatatatgcttaaaaaataactagttgcacagattgcgactaatttgcgagacgaatcttttaatcctaattgctccataatttgacaatatggtgctacagtaaacatttactaatgatggattaattatgcttaataaatttgtttcacggcttactgacggatgctgtaattagtttttttactaatacccgaacaccctatgctacaccttatataatatccgatgtgacacgctaaaactttactccctgcatctaaacaacccctttatcgcacgtaggtttggttcaggtggtgtttggatccagagacttaactttagtccctacatttagacactaatttagagtattaaatatagactacttacaaaattaattatataaatgaaaactaattcgtgagacaaattttttaagcctaattaatccataattagagaatgtttaccgtagcatcacataggctaatcatggattaattaggctcaatagattcatctcgcaaattagtacaagattatggatgggttttattaatagtctacgtttaatatttataattagtatccaaacattcgatgtgataggggcttaaaagtgttagtccgtctaaagtcggtctgttttcgcgggagcacatgggccgaccagccacgtcagcataccctgcctgcatacgaggaatgtcgtcaaaggatcggcgatgtacggacagttcatcatgaaaaaaaaaaaacgaaattcaaaggaagaggaagagaagtccctccaaacaagttttaaaaataaattataagcacgggatctcgaaattaaaacaaacataccacttgtcaatgtatctcgaccgtataacatgccattgattcttcgtccattcgcgggacgccggctaaggcctgtttatttctctatttttttttaaaaaacatcacatcgaatctttgaatacacaaatggagcattaaatatatattaaaaaaactaattgcataattagagggaaaatcgtgaaacaaatcttttgagcttaattagtccataattagccataagtactacagtaatccacatgtgctaatgacggattaattaggctcaaaagattcgtctcgcggttttcagacgagttatgaaattagtttttttattcgtatctaaaaattccatccaacgtccgattaaatatatgatgtgacactcaaaaaatttcttttcacgaactaaccatgccctagctcaccgtcctggcaaccagtcaagtttcagagtttttactattttagggcatattcaggtttcacactagaattcaacttcaacgttgacttttcaatggtccacagggtacctggcagctactattagccccaggcatggtcaaactacaaacccaattcgatcagacttgtttactcgtatcttttctccaaaagtgcaaggctttgagaccaaaatgcctttgttcgttcgccgcatctccggagtcgttgcttacttttaattgtctgttatacatggtggtcactgaaaacgtgtatagtacaccaaccaacagattattacggactcttggtcagtgtatactagggttgaaaacggtatggaaactttctggattccggatctattttcgaaaacagaatttatcggtcgaaattttttcggaaatttttggaaacggaaacagattcggaaatattttctcggaaacacaatcgaaaatgataatggcagtttccgtcggaactcggaatcggtcggaaactttacggaaattttctcggaatttctagaaatcacaaaataccttgaattctttttttaaagcactgaatagttaataccatggtgtttggctgttatttttttaaaaaatatttattttgcaaatttaaaattacataagaatatttttttctgtattgggatttatcaatatcattactaatttattccatagattgtgttttatgatgtattattgatacttaacaattgaacttatatgattgtgttttatgataaattgttgaccattgagacttgagaattgggtttatcagtttaaggggtttttttttattccgataaattttcgttaccgtattcgtgccggttcgttttcgctccgttttcggtttcgataatattcgattccgttttcgtatccggggtttccgattccgatttcgattccgaaaaaaatatgaaaacgaaaacgataaaaataatttccgtccgtttccgtaccgttttcactcctagtgtatacaaggactgaacactgcaaacgtggaaggaagaaccgaagaagtggtagccagcatatctatggctgagttggattgttggaggtggagactaatccctcgtgcatgtaaaactaaacggttcattagttcatattaattatttcttaaaaaagattaatataatgttttaaacaattattctataaaaagaatttgcaaaaaatatactgttagcagtttgggaaatgtgggcatgaaaaagtataatacggggttgggaacccatctccccgcacggaaaacagagcagtccattagcacgtgattaattaattattaccttttttttttcaaaaaatggatcaatttgattttttaaacaactttcgtatataaatattttacaaaaaatacaccgtttagtagtttgaaaaacgtgcgcgcagaatacgagaacccctcatccgcacacaggggtacaactagcagtatagtaatgctcaatctgaaaacagatgtttattggatggattgtggcattatagaggtaaattaaatattttaataaataaagttaacatatcacttaaaacaaaaaaaaagtagtctaaataatgtagttgacaaatgtttttttataaaatgtattttttcaaacataaagtaagagtaatctgttttaataaccatggtaaacattatttacctaagcacaatatagactctaattcaagaatacataatgtaggaaaagtcaatttatgatttagttacgtatgaactcattcttactacgagttgtgtaaacggtcacgacaaaattcaatatgccctactacgtcaacttcacaaacctgtaatgctataaaatcaatctacatgtcccacaatgttgtttctttgttatagatcgaattttcactttaaattggtggatgcatggctactccctccgcttcatatttattagaaggaaaaagtacgaattaccccccgaactatcgcggtcgtccgaattacccctgaacggtcatgataatggctatgtctcggtcatgatgatggcttggtcaggatggcgacaaggactggttcattttctctctttttcattttatttttctccaggagagccaacccgtggaccatttgtgctgaaataacatgtggatcacctgttgatagttgcattggagccacatcgaggatcccagattaatcttccattctctctcttaagcaatatgcatgcttagttcattgtgatgtctaattttatggatatctgaaatcccaatttgcatgtccattgtccaagatacatgaacaaagctagagtttttcatgaatgatttatgcaacatatatcatgtaggtaggttgtgtttagtttttcttttcttggctcatatggttatgtctaggtaaccttattgattctctggttggtaatttatataagatcattttacctgtgtacaaatgagtgtgctttcagtactaatatgaattgttgccatgggttcatattgagcctattgcgccacccaatttggtaagaagacagaaggtggaggtcaacagggctgagcgtcccttgctttaggtcttgctgtccatttaagcgagttgcagcccatcatacttttcttttgcatgtgttatatatgctaaattgctaatttctacgttgtattatttattcttaattgcagatgtctccactactcaggatgcatatggctacggtatgaaattcccagttccttcgttgtctacagtatgaagttcaagctgattaatgcatatgcttgtgtttctccaaatagtgtcgtttagtgtcatatattatttctccctctgttgttttagtttgacatgaaatgcatttgtgatatatttcttcttattctttgtatatgtaatagtatgcagacaaattgagcaggtcttcttttcatgctcttctgaagaggttaagtgtttcgatgtgatctctgcaaattattgattctatgatgaggttacgtaaatatgaagtataatactatctagattccaattacactgtggagtatagtaaatgttctgattgcttttgtaggccatagtatatatattatattacatgctttttgccccttatttggttcccttccttcccggaaggctcctgtgagttgcttctttctagagttcaattaccatgttggcgctttatcttcaacaccatggacgaatttactatgccatgtcctaagaaggttatgcatgacaagaaggtatcttcaagtttatgaagataacacttttaaggtaatgccaattgttaaacatagacaacgtaagtaatctattttgtttccatttacttcaggtgccactcacaaattgttcaattataatgggggaattaggttttcttattgttattgggatcaatcagatatgtgttttctatagtttgctcatggctgtgtacactagcaaatttagattgtaaaattaatggacccatatttccagctacacttctagcctacatccttttagtattatgtgtcactccaggtttggtaagtgttcaaacctacctataatatcaatgtgaataaaaaatggaatatttcaacaggaagcatgcacttgctgaccatgggtccaaatccaacatttcatccttgaactgttcatttgaaagttaatgcaactttctattctggattagccttttgcctgaaccaatggttttaaacaatctggtgggattcagttggtctatgagttacttctatagtattgttgaggctaaaaattgactctgagttctggtgagttccaggttaatctatgttgtaaagattcaaagttggcatcccatatcacgtatcactgagatattatatttagtttggcgaaactatttcaatgattattatatgttgtcacatattgattgcacttttgtgcaaatggctgaaatgattctatattttttaatttcttcgtgattcatgctatatcattgcttcagaatttatgttgcacttcttgcaagatatctgaagtttatctcaaagttgataagttttgtactaattccaatattatgtttgtttctcttagggctagagaatatatatgcattttgtacttcaaagaaacctgggtagagtggcccatttatctgttgtctttccaaattgccattgtgtcaagaaagagaaacggacagtggtttggacatctctatatggtttagatatctcagcaatgttgtatcaaagtattgtgtttcttatatcttgggttatttgtttacttacatgttgtaaatgttaccttacggtaccaatagtttcgatagaatctctgtatcttatttcgttatcttttaatgtccacatgcagcgtagcgcgtgcctattgctagtttatttaatcgtaggcaaacgtgggtgggtgcatgcaactccgtcataaaaaaataacataaaatccaatttccgctggtggtgtgggtgttagggcaagtgatatggtagatgtgactaccccatctaaatttatccacatcattcactcataaattaagaggtaacctatacaatatgtcacctctagtaaacaaatatcaatgtctcttatactctcacacccctcttgaagtatggagtattatagcacttgcccttagagcaggtttaatagatcctaatcagccggcgctagcacactatgcgtcagccaaatctgacgtggaggagtgagaagggaagaaaaaggatggagcgggcattccatctatcgcccggctaaagcgcaacacacgagaaaaagctgttttcttccaaccagaagcgagaagatgaggtgtacatgtgaatattaaatatctaaatcttcaatagagataaacaaacagctaacctaacagctatcctattatattagtgatggctataggtgacatgatattagagtcggcagctggctatattattatacgttggtgtcggtttcctcctcgagcgccgcgtcgggttagcacctgacctgacctgactccggtagcggccgccaccacaccacaccacacccacccccacgtctttgaccgcgacgctgactggctcggcccagtcgcgcgcatgccgcaccctcactgcgcgtgggccaggttggtcggtgggtggcccacgttgcagtgaaggtaagagactctagttggtgggtgggtgggtgggtgggtgggtgcggtgcggtgcgggagatagtttaagccggtcaggtcatgacctgccccgggtcgcacctgggcggtcaaagcgcacgcgtttttctatttcttggacatgcggcgtgcgggtgccactgctcccttttccatagacacaagtcagacgatacgatagctgttcatcgccatcaaaattaattaagtgctgtgagcaagttttatgctgtgttttacactaattttttaacgtacagtcccttgcttattttatgtgcatgttttctgtactactaattaaatggtatttgttttttaaataaattataaaaaaattacttggaaaattatattaatttaaatttttaaatatttctaagctaatatttaataaatcatacggtaatccactgttccgtttcaggtgtaaggagaaaagttttcgaacacatcctaactgtaattaacacagccttaacctttgttaaatcaaaagttactacttctatttttcggttacttaattatattgattaattaacaatgcataacaaacaactccaacgatagttgttactgctagtgttgtgccaccaaaattttcacaaaatattatcgtatacaataagggctcttcatattatgagcaatgtttttctgatgggatagtgcttacattgcacccaattgttggtatctagattccagaacctgatagttcgaactgatagcaaacatttgttgatgcgtggaagcaaagggacaatcaacaccagaagtttgctgctagtcgatctcacattcccgtcgggagtgttctattcggttcggttgaatggtatatatggaatactaagagcaagttcaatagtatagcccactactagctccaattcatctatagccaattcatacaatagttacttactatactattaatatatggtctcacatgtcatacacacattgcgtcttggagtccgtactgtaactagctacagatctgtagcccgctgctcttctctctcatcttttatctcattaaaatatgtttatagttggctaatagtctgctattgtacctgctctactagatgattagaatacaaataaaagctaaaaatagatttaaaatactttacgaagcttagcataaataaatgggggatttagggacttgtcgattgcccaagatttattgtaagacgtattggtttattaacgacttaaaaagtaatttatgtgtaaaatttatccgtacttctttaaaaagcattactgccatcctaacatggtttttacaaaataacccttaatatttttctgatataatggaataaaatctatgacatattataatgctagctcaattctacccagcattccagcaaacaaaaattccaaacttaaattttttgtgtagtttaaccattgccaaacagtaccactcacatagtagttgttagggttgtattttgggtggtcccagtggcagtttctttattgacctaacggcagtcggtcacgcttaccgacggtcggtccggtgttaactttttcttgggtctgtggtttggtgttgtcggtgtgtgtgggtggtgcttattccttttgttttcctagttacgatgttccattgttgtaatcttataattttttctgctcattcaatataaacttcacactgtctggtgcgagtcggtaaaaaaaaatagtagttgtagggtgattaattaaagctcctaatctcttggagagaaatggtacatgtccctttcaagtatctgaattgctggtgacggcagagtgacaggtgcatcagtgcatcagtgatgttaactcgaggctgctaatactatcaatgcaaacctaaataattagggaccagtaattagttaagttaggtttacgctacctactactccagtagcttctgaaacgtacaccagcaagcaatgaattgaatgcatgcgtagccatccgatcgatgtatcatgtatccgacgcttcacggccacacaagagcgtgtgtggttcctgatgctgccggtacgcttggactatgtttttttttttagaaaaacatccctatgaacgcagagattgacgaagtcaccacaggcgtctcgctgtcgacgggtacgtcgcctaccactgaaagaataattagccgtaaatacgagcacccgtgtgggctggttccactacaaggaacctaaccagttgagctatactcactttgcacgtttgggctatgttaactcctgcaattaaattcattcaatccgacgtgagaacgacgcgcagctgctcgatcgattggcctaatccgatgtcgtggacaatatgctatccaaactaaaaagacgtgaatattagggaagatctaatattaaataattaaaaaaagatgaggctttaaactttagagcgtatagcccaccaccttgtgacgatctcaccaccttataaagctagccaaaagacccataggcgtttctcatgttatccaaaatctagtgatcaccggttaattatcggcttctctctaattataactgcgaaggattaagaatatgtgggacgatttgagaagaaaaaaaatccttaagcgcgataattaattagagaacctagctagcccaagctttaagcgcccgatatataaaatttttttatatatggagcgcccgattaaccggtgatttttaaagatcgcaccgttgaagagcctgggaattaagcgcgcatatttattcaattattttagaaaagaacataccctggtattccctctgttttttttatgacgttggttagttcaaccacatatatttagggaagttggtagcatacgtttagttgatctgcgtgtagtataatactgttgggttaaagcaagtttaatataatatagaaaagaactattagctattaacatatatagtattagattaatatgtataacagattagcttcaagactgtctttaattttttttactcctctctcttttaatctcacctatacatttaatgtattttatcgagtatgtgaagaactagctctcacatgaaaggcggcacttattttttttaattctctcatatttatatatactccctccgtctctaaatatttgatgttgttgacttttctaaatatgtttaacagttcgtcttattaaaaaaaacttttgtgaaatatataaaactatatgtatacataaaaatatatttaacaatgaatcaaatgataggaaaagaattaataattacttaattttttaaaataagacgaacagtaaaacatgtttagaagggccaactacgtcaaatattatttaggaacggagtgattaggcctggtttagttcccaactttttcttcaaatttttaacttttccatcatattaaaactttcatacacacataaacttctaacttttccatcacatcattccaatttcaaccaaacttataattttaacgtgaactaaatacacccttagtttattttattgctcatagcaactttacgtgcatctggaccaaccgatcatgcgacgggattctatctatgtaaatggacatatcacatgtctttggttgtacttgcgttgctttagtattaaatcgatcgatctgtgtaccgccggcggtgagcggcctcgttccggtggacgccgacaacttttccggtgagcgcacgcaaaaaaggcacggctttttccggcgggcggcactgctggttgttggtgtacgctcgatatatactttggatccaacagttttcagctgccgattgtatactactagaaagaagcagcagggtacgtacactgccggtgctgatgctgaggtatctatgtgcgctgccgggttgtgtgtgtctgttatgtttaggtggacaagaaggaattagtgcggtattttgaaagaattttacgggaatttgaactgattttaagaaaatcatgtgaagttccgtagtacgatcggaaggagattagaacaaggaacaagtccatgtttccaaaattccgattttggtttaaattttttttttcaagattgaagaatgcatagttggcgctttggaccgtggagcaggcagggcggccaaattgtacggtgtccgtttcgtaatttcattcccttgcggaataagttcacataccgttctttaactttacatcgagtctgtctaagttccctactatctaataccagaaatcttcacctctaaactatacaaaaccatgcaatttcggtctcatggcagtatgatccatggtttcgctgacatggcattctagttagcaaaataaaaaataaacagttatgggacccacatgtaagtgagaatagaaaaattataaggcccgcatatcttctttttctcttttcttttcctcttttctcttctcttcatcggcggcagagagggaggaggtggccgccacacctgatgacgacgatgcacacgtgagcggcaggcaagcgcggcagccaccggccgaccaaccgcgtggtgaagttgtcaaagcgagcggcctctcgagcgaaaggatccgttggcgtacgagagctggtggtgcatgtcatcgatggctgcggcggagtgcgaggacgagtcgccggagtcggctatggtggcgagtggcgacgttggcagtggtccaaccgttgggcacagtggcgtggagcatgcacaagagcggctcatactggttcaacagcagccggccggcatcctctccccctctccagcgggacggtctaggctggcggcggcgagcggagaagctcgttggcgatggcctcctcgagccagccctcggcagcgccaagcaagctcgccggccgaaaatggtgttccccctcctccaccaccgctccgcctgccgcacccccgccactcccccctctcccgccggcacgatgtgtggaatgggcgggagatggaggaggggaaaggcggccggctactgctgctgctgccgcgctcgatcacccgcagcggcgccgagaacgacgccctcaacctcctcgatgtgcaccatggaagaaatatagaaaagagaagaaagaaaggctgacatgtgggtcccatatttttttaaaaaaaatgctgactaggataccacgtcagcgaaactatgtatctatactgttgtagtgctgtggaatctaaattgcactgttttgtatagtttaggggtgaagatttttagaattgggatttagggatgtcaaacaaactcgtcgtcaagttgagggacggcgggtgtgaacttattcctttccttgcttgcatctcatgggccgaaacctacaaagtccaaattatgaccctccttttctctatctatctctctctctctctctccttttccacggttcccgctgcatggaatcaattggtgacccaatattacaattttacaagttattttgagaaaataagatggtgaaaaatgaagttatttttgggattttttttctaaaaaaaatacgtacatgaaatgtctcattctattcatgcatggagccaggttgtgtcagaatcagggttcaaagtttcagactgaaactgagatttctctaagttttgagtctacatgaacatccccttctcccagatacgaaatgaatttggccatttttttaattcttttttcatttttatgagtttggtaaaattgttccaattttttgaaaattcaaaaatatttcgaaaccaaaattaccaaaatcttagcactatcggtacaatcttctaccctataattcaccaacaacagtcctacattctacatacttcacacttcattgatcggtcaggattgtttcactcaaatccaacgtcccatatcactcccacttctcctctcgcactatctccacaagatggtgtgaacttgtacttggatatgtttttgttgttgttcatgtgcaggcgttgcttgaggccacggagagtattgaccgtgatgaatctcatgcgcagtttcaatgcgcagtttcaagatgcaaaatttgatcaaattccaaagagaagtaaaaggtgactctaatactgattgtaggatcatatttagaagggtaagtgacctatttatataagtgggggctatcattttttggatgcttttgggatgagaaagttatccaatcgatcttgagtagccactggacgtggctgtgatactaattgtataatcgtaaatgacatttcatcctaaaagttatccaacgagataaggaccccacttatatattaggtcccttgtcttttcacaatcaatatgggactatttgatataattatcttcatttcaatgtccattattttaactttgtttcgatgtgttggtgtccataccttggagcaacacaagagtggaagaggcatcacttgcatgtttggccacgatagttcattcacattcacatttctcttgctcatactctattctatccatcacactctattctgtccatttattagtgttgatgatgttgatggatcttaatttgatcaggttaccgaggtgagcagatagaactaccctcctcttaaggccattcccaactcatgacactggatatagtttccataaactccacatcaccaagaaactagtactaaacaccactcttctaatgcaaacaccactattccatacttaaatttaatgctacttatctcacatgatgtcttggatattgtgtagaaaccatgtcttatgtaagacatggtttctttctctttccttatttattcacttgccacatcacttttcatcctatgtggcagcttatttaatgcaatgggcaccatcctagtcattgggttgggaatggcctaattattatgcactttgtgttgtttaatatttaacacggttaacttttagacgtaagtttgactattgatattattaaaaaaaaatcatataattataatatattttgttatgaattgttttatcatcataagtatatttgcataaatttttgaataaaacaaatgatctaaaaatcaatggtgttgatcattagaaagggggcaaagtattttcctttcaataatttattacagtcccttttatcgatctgttggatctgttgttttctaacatttcactctttttctttgtgtgttagtacatattgcatcaccctaactatttttgagcgttacactagtttagagtgatgtttcacgctgctagtgatgtttcacgctgctaaaaatgttacaccaaacatttaataaaacatttcattgttatattgtttaaagtaatgtttcactttttctccactaacatcaggtatataatgaaatattttgaccatgtaaaaaatatttgaccatccaataaaatgactgaggctagatgtccaatccatatctttgtcatgtactattttctgtgttttttcgattacatggcagacatattcttttcaagtgttgcacatagtttacagtgatgtttcacgctactagaaatgttgcaacaaacattcagtgaaatatttgatgccattgacttttttaaatatatttgactgttcgtcttatttaaaaaatttaagtaattattatttttcctatcatttgattcattgttaaatatacttttacgtatacatagttttacatatttcacacaagtttttaaataaaacgaacggtcaaacatgtttaaaacaattcaacggtgtcaaatatttagagacgaagggagtatattgtttaaattaatgtttcactacatcatgcatccaatgaaatattttgaccatataataaaatatttgaccgtccaataaaatgacttagattagatgcccaatccatatctatccactctactattttctctcttttttttgtcattacaagacagacacgcatacgtacacaactgtatacgcaacatcatactccaccctcataaacgtgcccctaaatcatgttgtaagagacagaaaccaacggcacataactaatctcactaaatatcttttgaaagctcacatgcatgtgtataatatttgtgaatgctagaattttgaaccctggtgggtggagtcatacatccacgacttcaccaccacaccggtggtgttttccgcctactattttcctatttggctagcatgcattaataaattgtttttgccaaaactgtaatgaactttattgtttgctactgaataatgtcatttcacagcggacaatcaatcagagatgtcgaaagaagcaaagtagtaggaaccaaaacaccaactataaataactagatgtctttctagcttggagcggccacaaccatggaatgtgaagactttcgttgcctttttcgtacttgtgtaagtgtggctctaattttactggttaactagtacttcttccgtttcatattataagtcatttaatttttttcctaattactcaaatgacttataatataaaatggagggagtattatattagtcaagtttgcctagaaaataagacaaattaagtttgacgaccttggcacaccaaccaaacggatattgaattccagcattttaaccaatttattgtaaagtatttggattgttgcaacatgtgaaggcaaatccgaagggaatactagttctgaaggcaacacttccattaattttctatgtacaatgtacacattacaggggaggggaacatacatgcatggtgcctagtaatagaagtggcctgctccaatcatttccacggtaagtctatctttgttttgaacaacgatatgtgccgttgaaacgttctcccccagacattttgctccccgcattggggtttaaacactgatattttcatgctgtacatagcatgcaaataacttagttgctgttattattatagcacttcctccgtttcacaatgtaagtcattttaatattttccacattcatattgatgctaatgaatctaaatagatatatatgtctagattcattagcatcaatatgaatgtgaaaaatgctagaataacttgcattgtgaaacggagggagtataaggtaataatattcttaataagagcgacttgatatcaatcctgtcctagtaatcatcaaatcctattataacaactctttaactttcacacactttctaacagttcaaaattaacccaaaatgaatagtcacaagggattcttttggttcaattttcttttttcagtgtgcggtacacgcatacgcgcacacataccactgtacacacaacactacactcacaccctcacgagtcacgaatgtgtcccgtaacatatgcaaaactattaaaaatagaagtccaaatcacaaggtcaccaactaacatgatagtaaaatgccacaagtgtcacatttatactgaaatatggtactacttatgtcccctacaggttagccatatcctggttataagctaatgctgaaaaaaaatcactttctatgaaaacactttaaaattaagtttaaaaatttaaatgttgtatcaaccttttttttatctttgatttgagacgctctccattatccttttgtccttcgcgtcgccgttcgtttggaaatggttggtacctgcatctatctgtacagaattgatggagaaaaggaggacactgtaaataattgtggtgatctgatctccattaacgtcctctcaacataatttccatgtagaacttgcaaaagcatctatgtaccttgttgattgttatccctttttggttcacatcacccacccaaaattttctccaggaacccttttttcatcctgaaatgacctccacttgcgttttctgttttccaacagtcactcgcaaaatttcgcagcacgcttagatgtaacacctgtcggttgtgtttttccctttattttgtcatacgaattaaaatgccttagttgtaaaaagtagatgaaccggtgttgaaactgtttttaattatgaaaactagcggatttcccctttcgcggagctagattttaattgatatacaactcgtggcttcatatcatatatttaaaaatagatttcaatttaatacacaacttttattttctgttttcaatcgagtctacgccgttataatttggatgcactatgatcaaagtttttattttctttcctctgattaatgtgttgtaatttctaggactagaaagagatagtgatgactgatgaccccttgcctcttttgatagtaacataaataatgtgctgctcccccggccgtttcacgttttatattattattcgttttgatttttaaaaatcaaatttcttcaaaatttgataagtttataaaaaatagcaatatttatatcacctaattagttttattaaatctaacattaaatatattttgatattttgatagtttctttgttttatgttaaaagtattattatattttttttctataaatttgatagagctataaaagtttgacttaaaagaaattcaaagtaattaataatatgaaatggaggtaatacctatcagacatttatgtttttgttacagggaagaattaagttgaatagataattatgcgcaccatagttcatgtcaacctcatgaatcttaacaaggaaaaaacagtgagccatccaatggccataagaggtttctctcaacaattattgtcaacaagtacatataaaccatccgcatcctggcccccaggagaaccaaatgctaccacatctagaaaaacacatgaccaaacttgtttagaaatgctctgcgtggctcacgactacaacaacaggtctgtttggggggagcttaagattttgagatagagctgattggtagccagcttctgagaatctaaaaaaactgggttttccagcttctgtcttttagtttattttctggattctacaattacagcttctaggaatctggatataaagctggactgtttgggggagcttctgattttgggagaaacggctatagctagaagctccccgaaacaggcccaacatctacagcccatcctgttgctgcaaggacctcgccaagccatcatcaatcaataatccaaggcatccatttgctcatccaatggtcgagggaaaaaaacaaaatataacttagagataaaaaaatacaaatatttttttaaaaaataaactttgcttatgcatcatggcacagtacagaacatcaaaattcatcggctggctgccaacatcctccatccgattggctgtctgtcctagcatagggcctgtttggggagtttctagcagctgcagcttctcctagaatctgtagttaccagaagttcccccaaacagttcagttttttatccagattctgagaatatatagttgtagaatctggaaaatgtactagaagccagaaactgggtttccagcttctccagattctcagctgttagcttttcagcggctgcttttaagaatattaagctcccttaaacaggtccataaactggtaacgaaatcaccttatctccattttgcttaattttaaggaggatggatgatggcgccaggtttaggggcttgtcggatggcggcaagtccagtcacgagccaaccacgattcggccacgggggagccgggcccacctgacagcgacaggaatataccacgcgtgttgctcccccgttggctgcagggagcacgcctgcgcggtgggccccggagcacagcggcgctgacgtgtctccggctgtggagcgcgtacggcgcgggcccaccccaaggtcggatcagcttggctgcgttcggaacttcggatctccatttgcagcttgtttggaaaggcgaggaggggattggtaagttaagagccaaaattaatggtgagattaagatagaaatttgatttttaatcttaatatcttgtttggtagagaatgtggtatttgacagaaagtttagttggagattaggtcattaatgaaaatgaatggttgagatttgtttaggtaaaggaagaatttcctcccaattaccacacccctactcagatattgaaaatgagggagttcattactcaaaacagttaatagactcatccctctaaactcctaatcccttctaaaaactctccccaaccaaacaggccgttgggtttagctaatgtctcattactcgtgagtactgatgggatacgcgtaggctacgatagcataaatcaaaattttctatcgcgtgaaccaggaaccatgcaagtattagatcatagatcgttaccattcgacgtgctgcgcagcggaaaaagacgctgagaagtcaaaggaactctcgcgaagtagcgcgcgtcaatgtagacgaagtagtcgatcgcaccggctcgaccttctcctcctcgtgcgttctcctcgccgtactcccacgtcgatcagcaccgcaaaccagcgacacctctaccggtatccacacgtacagggacggaacaccacgcacatatgtgctagcacccgtgcgcggctagggttttgctcggggagggaagtgacggctagggtttctcacgtgatgcaatgcctccgccggtcacacccctcacgaatatataggatccatcactcgggcttccaaggcccgtagaactcttattcagatccctatccgaagtaagctcatattggatctccatccaatccccttattacggtccattaagcgtgcgaccctataggttcatatatactcggctgtaacccaaaaactcattttcggtccacgcgtcaacagcggcccctagcagaacgtattgacccaccgggcatacataaagatcatatcggctgaacctctagtgtatacttgtatgaacccctttgcctcacgatatcgattaagctcaaggctagatatgtgccatcctctattagctcaatcattcactcgaacctgttgatagattatataacttgtgattgactcctcaatcacctttggcatggccatgtacttccataatctacaacatcgaggggcccagagatatctctccataggaggggcaaattctatcttaattattcatatcccactacatatttcatagcatacccgaaaactacttttataactaaccaattatggagtagcatttagcagtccctaagtaagctactacatatgttgggaaccatgataatctcaggtctaaggattcaacaccaatactaaatgagatcactgacactacaaaataattgagctattgccaccaaattattacaacaaaaaataattcgtagcaatatattgtactattgcaatgataacttttctgtggcaaataattatattttattgcaatgatctacaatcgttgttttatttagtacttttgttgtaatagaaaatgagatatcgccacaaaaagtcgtactgttgtaaaaacatgttctctcaccacaattttaatttttgtggcaatttacatagtacatgtacttttcactattttttgttgccacaatcaacaaattcgttgcaataaaaaaattgtcgtctcataatttaatttatttttttatatggacatggattgagacaaattttatatggaaattatagctctcgacgagatctacaattttataggtgataaatttttcatttgaaatcttttagatattcaaatctatgattcaaatcttagttaggtaggcttaaatggaatgatatgtattttccaacagaattgatgtgtaggtgagttggtaaaggagagcacgcgtggaggataggtcttgggttcgaatcctagccaagacacgatatcaaaaaaaataaatagacaaatagataggatgatagattaatatttaaacttttaatttagtatgtaaaactactattaggtatgtggtatccataaccctgacagtagcccccgacttcgatacaaatgaacgaattcatattctcaaccgcgtgcagaccttggagtaactgttatcgagctcatgtgaccgttctcggtgagttcagagataacgttagacttcccttatcagtctcaagcgggcacctatagtgtttgtctgagtcaatctccgacgtcaaccaagaaattacagagcatacgactaagtctcccgtcttgctgtaatcgagaatttgaattgaagtcaagaaattttatctcggcgcgtacaccatctcttcattccgtattccttgtcgagatccaccaaccgttctcgagtgaccgagaaggcgcagagcctgcgacgaagccttgtcaacatttgttgtactcgccttagtcgatcttggtgtagaaccatagagacatggcccaccacataccatgtcctatacgaaaacaacctgcggatatagaaagagttccggataaggaaagacaaccagagttctgcatgaaaacgacaaggactactcggattgtatccatattggtttccctagttctacttggacaaggggacatctatgggtacaaataaaaggccccctaggaatagaattttcctgaaatcaatactcagaaaagaatcctatcttactataaagttatcccccactaactccttaagcttaacatgcaaagatgccacatcatcatccactaacaatcatcacatttaaacatcatgcaaacatgctatatctttatagtttttataatttaagagcttttcgaatacaaacatgttaaattatcatctaacataattcacataatgtttcaatgcatatttttattatattttatgatatcctatatagttcatcctcacttaattagtgcttaaatgattaatctatggtccaaattatctttctccttttttcctataattaagtcatatcacatcaattgtttttagcctttagatgattaatctatggtaccaactagtatctctctacttttcttcttccataaagttatatcaccttactttttacgtttgaatcaccattctacatactatttaaatttaaattatcataaaccacattaatttacttaatctgatgttatctagctatcttacacgttatttttttattgttatcatactaaattcccgcagcaatgcgtggggtttcacctagtattagatagaaatagcccccgagcgaatgctcaaagggtaacatgttataatatgtatggaaaactgaaaatgaattaaatttacagaccaatgttttatatatgagcatctactcttttaccgacttcgatcagtcagtttgttgaatcatacactctccctagctcctagccttgtcgtcggagaatcgttcttggatgataaggctcttggaccctttacctgccttggttgaaaaagcactgatcctagcccccagccatgaagttggaaaactcaatttccgattacacggcttggttaatacgcacggcgagaactcttacatgatcaggtcttacatggtcgtttgtctctacatgatccgacaaggccttatccgctctgggcgtccccagccgaagttcccttaggttcctcagaggccttgtcaggacggcgtaaagggacatgaggataggtttcaactctaggtgtcgtcgtggtaagggatctctgggtaaaacacttggcgatattatgtacctgatatcaactttgttggagtagaggtaatgagagaatcgctacgccactggtcgaaaaccagttgtagccccaactcgaccacttgaagcaaaggtagtgggagaatcgctacaccactggtcgaggaccaggtagtagtcgtaactcgaccacttaaagtgaaaatagcgggagaatcgttacacctctggtcgaggaccaggtagtagccgtaactcgaccagttaaagtggaaatagtgggagaatcgctacacctctggtcaaggaccaggtagtagtcgtaactcgaccacttgaagtagaaatagtgggagaatcgctacacctctggtcgaggaccaggtagtagtcttaactcgaccacgagaagtaaagccactgggagtattgctacactactggtcgaaaaccaggtgtagccttaactcgaccactagaagtagaggtgcgagagatcgctacgtcctactggtttgagaaccaggagtaggagcctcttaatcacctataggggtgctaaatttggtttgttacatgtgcatctcatgtagccagcatgactcatatacccaacttatagcatatccggatgtccgctcgcaatcatgtcgggtgatcaagccgacaacgttcacgagaatttattcgttaacaaccttttctcgaatagcccagccttggtcggcgctatgagataggtcgtcggtcttcgttggtaggttgggtgcgacaactccgtatttgtcgagaacgttctcgataatggggtgtgcttgaccacaacctactcaagtgctcaattgtttctgaaaaatattttctagaaggcaagatatatagcagagaatatcgagtatgtactcaaaaaactgcatagatcttctagtattatcaggacataacgagcagatgtaaatatcagggattatgtaaatcgtaaacaagcatgatttatactgaagaaaatagaacgagcccccagcgttaaaccgtagtcaatttaacatccgaaacactcacacaatagatattgtataaaaaaacatgctctaggtgaccataataaattatagatctgacgacgatggttctgatcttgtcggggcacgtactctggtcatgtcggatctccctggttcgaagtcgtcgagtagcttgttgttggagaatccgtctcttaaacccatctcgtcgaaactttgaagcaccaaaagatcccctacctggcgcaccactgtcgatgtttgatgtcgcgattccggtatttgtatggtatggggatcgttggtactatgatatatgcgagattgaggtaaaagagatggaggcgaggatttttatacaggttcgagcccctgaattgtcaggttataaccctacatcatgttggccgaagccggtattgctcttattcaccataatcacaccagtacaatatttggggtagcctatctaactgttgtcgacatggcggtctgaagttctaactcgtagtcgacaacatggtagtcttcctcttcgagtttgtgctcggcgagatcagagacagcgctagatccctacggccggcctctgtaggtaccggatagggtcgatctaggcatatctctgatgtcgatatccggcggcttgtcttgacgtatgttggcttgtatgttgtggcttctgttgttccgtgtcctctatggtgggtgtgtcccctctcctcctagggggccttgtatttatacccataggtgtccccttgtccaagtagaactagggaaaccaatatggatacaatccgagtagtccttgtcgtttccatgtagaactctggttgtctttccttatccggaacttcttctatatccgcaggttgtttccgtataggacaaggtatgtggtgggtcctgccgagatttagtcaactactattagttatgtggtatctataaccctgacacatactttttttttacgttggcccacacttcgtagacataggtaatttatttttgtgacaaggaaaaactactactccctccattccataatatttttttttcatccatcccaaactaatacaaaacaaaaatactacaacatccatactttatcaaattccaatataactattccccccttatctactttcaatattaagtaaacttattttaagaaaaataaaatgagttaaaaataaacatattatgaaaccgatggagtaacaagtaaccaacagtcgaacacttcaattcttcctttcttagggcatttacagtgtgtcactctcgtatgaggagcctcagtgtgtcacgtaggctagagctacgagtcctaaatttgaattcttcacactacaagtggctctgcgagtggctttaattttgtatttcagcccctagtaccttttgtttcagttctcatattttctttaatttgtggagatccaaaatttacacttaacacccttaaatccagaaaagaatataaaatcccccatttcccctctttcccttatcctcacgcccactacctctcttcccctcaatccggcgccgcgagcggtgcctctcctccccttccctggccgatgccctcgagcggcgcctctcctcctcttccctggccgacgcctctcctccccttccccggccggcgccagtccccactccccacgtcggcggcggcggtgtccatggagtggcctcgcgcggcgggcgcggatcaagcctagcacggccggtgagctcccagcggcgcggattgaggcgggcctcatcggcgggaaaggaccgaggctaggcgcgaccggcgagctagctgagaccggcctccccaacgcctccgccggcttttccttcccctccccatcgccgctgccttaccctccccctccggcgacgaccacgaggcaggcattggagcttcgacgacgactagatcgggggcgccagcgtgcctcggctgtcctgtcctcgttgcgagcgtcctctgctgggagcctctagatcaaggcggcggagaagagggagacggcgacgaggtggatggcgagcagcgaggatggcgacgagccccgcggtggcgcagagctgagtgtcgcgatcttcttggcagcgcggagaggaggatgacggctagctccttgccacaggctacgacgggcttcctctccgaccgctgatgagctcccttccctccatctcccttctccctctctctgtttccaggcgacgtgggcaaagacgatgcgaagcgaagccacgccctccacaacgcatctccttccttctctccccacactgccaaccctcgaacatgccgaagaacagagtgaccatctttggtcatgcggtcctcaattttgtgggcccacctgcaaacgtggcatcgaattgcatatgaacaccgacgtggatagttcaggctgaacgacagcgggatgcactgtgaacgcccttacctctgcatgaggcagagagagagggagtggatgtgtggtcaacaggaggtagaactcatgatgctctctttcttccctttcaacctctgggaaaggagcaccggcttctgcagcatctagtaggtataattactgtcttactggaaggctgcaaaagaagaggttttggacatttgggtcctggtcaagtttagactttgcgaaacctgacaaaacaaacagacctcttactctgtactgtactggagtacgtatgccaccgcccaactactgcatccctgcgactgcgaacagcaggacgaagaatgcaatcatttctagcgaggcaggcgtctttctgtccgctcaggagagaacacgaggaacaaatacatgctcttcctcctcacagaagtttgaatttctccctgttttcttcttcatccaaagtgttctctgtctgtggccgtattaggtccacagccaattttttttaaaattatatggatacatacttaaagtattaaacatagactaataacaaaataaattatagattccgcatataaactgtgagacgaatttattaagcttaattaatccatcattaccaaatgtttactgtagcaccacattgtttgaaagttcacattgaagtttggaagtttgattgaaattagtacgatatgatatgatagaaaagttgtgtgtatgaaaggtttgatgtgatagaaagttggaagtttggaaaaaaactttggaactaaacatggcctaaatcatgacataattgggctcaaaagattcgtctcgcaatttacatgcaaactgtgcaattggttttttttcgtccacatttaatgctctatgcatgtgtccaaacatttgatgtgacgaaatttttggaagtttgaaggggaactaaacgcagcctgtggtcatctatgaaaaaaaatagataaggctactctgaggataaaatgatctggatttggctgcgggagctatcggagacgacgaagagagatgatgctagggtacttgcttgacggggttcacaaatttgtcgaaatgggttcaaatcttgtgaaattcgaccctctcgacatgggccagaattagatatgccttcagaatttcaaacggtttcaaaaggttcaaatttggattgggaatttactaaaaggtcacttttttcgctatcacggttggggttaaaaaaaaagctaaacaaccaaagagtaatgaagaaaaaattggaaaagaattaaatatgggcctcacggttgaaaccactccttttaccacttcactgtcaagtgcatatcggaaagttaaattacactgttatattggttctaactaaatcttctaagaaagatatcacgtgattatattttctataaaaaaaaggaattatatgttgcagtccattcatctcttttgttgcttatttgagtgtttcactctttttcattgggatgttgcacatgatgtacaagacattttcttggacatagaagggtcgtgatgttgcaatcaattttttttcaatattgcatctgattaaaataattttcaccaagtgatggaacatttttttattgagcaatgaaatatctaaaaccttttttgctcaaacaaatttactaagcggtaaatatctgaaaacatttttcatatataaggtgaaacaccatttgggttttgactgggatcggacgtttgatccttagtcgctctcttattcagggccaaatgtgtgcatacatcttcgaacaatcctagccctcaaaagtgatagtcgattgacaattgaaatactccctccgtcccaaaataagtgcagttgtggatttccgtgtccagcgtttgaccatccgtcttatttgattttttttatataattagtatctttgttgtaattagatgataaaacatgaataatattttatgcatgacttatttttattattttttaataaaatttcaaataaaacggatggtcaagcgttgaacacataaactcacaaccacacttaaaatgggacaaatggaattttttaagaaaactttcagacatcttgttaaatctgggtggggcgcattttccttaaatgaatacttctatccattctccagcaaatgcagcacccaccacagtagacgtcacttggcctcaaagtgatgtccagttcaggcagctactagcaaggttaatttcagacaattcatcacgtttgataaactgtacaaggtagtagtagtagtatatatcatcatcatgatccatgttatccatgtcttgattcaatgcttgttcttgacagtcaccagtcaccacttaccactacacacactaaccgcccatgagcaatgcctgatgattccataaaaaagtcaagagcaaccaaataagcatgcagccaagccatacatacatccactattgcccatgcaacttttttgctagagatttgcatgacatcacaatgcatcttccccatatggacatctattattatatatttccatctattactaattcccccgtttcaagatgtatgacgtcgttgatttttcacataatatttatcaatttgttttattcaaaaatttagtataaatatgtaaagagtgtaaaagtataagttaaggttatattttatttgatgataaaacaagtcataatgaaataaaaaatatttatataagtttttttttaataagatgaataatcaaatgttatgtgaaaagtcaacgacgctatatatttttaaatggatggagtaatttagttgcatatctataggtatagcaagatgcaggcatgttttccctgaggttggagacagattaattaaataaactaacaaagtgacatacatacatgtaaagttgtcatgctagtgctgagcttatcttatcccatccaagcttgcatttttattaattagtgttaaaccctacttgcatatatgcgtgcgtgcttccctctcaaatgtcactagatgactctctctcaacgcaatcctggttctggcgacaagtcctcttcacagccttctctgcttagatatgaaacgagctttttaactctatatagtacacatatataaatcaacaacttatctatagcaagtaggtcggtccaaatttatggatttaagctcctcctctgcatgctctgaagaatataatctcttttttttccattttgcactaagagtataaacacatttttataagctcctcattttttttttgccaaagtcatatctcacaaatgcaaaatcgagtttttttttcctaatgtactctaggatgaatgtgagtcctctattactcttgatctaacagaatactacaagattttctggattaaaattgaaattgaaaatgtgtagcgttaaggaaaattcacatgttcaatagatgacagtggaaattactctaattgaagtctcaaataaagcatttttaaatagctctgtagatgaaaggtatttgttgttttaaacggaaccgtaggagaagaaaattatatttcaattaagcggaaataaaaacccaaatggggttacatgaaaaagaaaagcatctcctcaaatagaagagactcgcaaaacacctcaagaaaaagaatcgtggcctttacagcatacggaacaactaaacaacccttaaccctagctaaactaacaactaaataactacggaacccaatgtaaggatcaacatcaaacttgtcgtaaagagtacaacacaacagctccaactttgcaaacatgtgtcattgttgctgagcttgccacctaacgacacaacagctttgactctacagtgatcgtgtcatcgttgccagaggcattgtcaaaacgaataaacaccaccgatttcccaccatggacataagcctaagccaacaagtgccacttcctatacatggttagcaccagcacccttagaaagagagaataatatgttatcattgccaagcttcaacacaccctcaacaacaaagcaactccgactccacctagcagaaacaaactaagaaagctggttctacaccataaacaagaatggaacaaagatggcaaaggcttcaccaaacatcccaggcttgtagagctttagagtcgatgcaggggtccacgaacgaccttcgctataagggtaagcttctccaaagcagtgtccccacggaggacatgatgtgaaacacgaccaccactcgtccagaagccgaaacaaggttttcacctgaagatggtagggatggggaaatgttataacaacgcctccaagaacggtaataacgcctcaggtgtcaccatcgtcaagctggcccaatggcctgacaaggctttcgccaacagttccccattcaacaccatgaaaccaacccgtacaacgacgcttgctagaacaccgcaccatcccttcagcaaccaagcccaggccatcaccccatgctcaggcgtgctcacacaagactgctatcccacagtgggtttcccaaccaaaaagccacaaatattaatttcctctcctacccctgccggcaacgcgtctctctgctccctctctcttgtcgccgctctctctgctctctccctctctctcagcaaagcggacggcgagccacgcgggtcgcggcggcggacggccctgccccaccccgctgccggcatcgaagcggcggcatcgacggggcacggggcgagatctgggtgcgcgtcgccacccctctccctttgcccgtcgccaacctccccgccgccgcccgtcgcaccgttgccgtcgccgtggtgtccagatctggtcggccgcgccgtcgccgtcgtgggtggatctgggcgcggatccggggctagatccgcgccgcatcgagacggacgtggcgccggcggagatcagggaggacgacgactcttccacctcgccggtgtcggatccgctctttccccctctcttccccgccgccgctcgtcgccgtccacctcgtcggcgcggcctccagctcctccaccacctcgagctctagccaagggtgttacgggaaatacgggtgtggggaacagtgtccacaagctacggtgtgctcaacgcggctcctcgcttcgtttctctgtcaaaagtcatcgaggggcacgtccccctggagaaaacacgcgcctctccaggggcacacggcacggacgggcaaagtaacggcggtaagcaggtacacgggttgagggtactcattaaacatggcttcagaaagacaacggctccctagtgcagtgctgctcccgccagtaatgttgttgctcctctgtctctccagagtccagaccctactcctacttcaaggacctgaacttccttttcactgtatcgtagcgccgtgccaacatagctatactcgatagcaagacagaaaattcgtctgtacacttgaaaaattgttcatgagagagagagagacgagagcttgctgtgcaagaatcttgaacaaatcgctgaattcaggagtactaggagtagtacagtactagagtggtagagaagagagagagagagagagagctgggttggagtggagaccaggaatggaggaagtagaaaggtgtcagtgctgctgctttgcctgcaaaatccccttccttccaaagctccccccctgcccttttcggtctctgcctgccctgcttcttgcccaccaccacctgtgtcctcttcctctcctctccttgcattgcagccttctccttgcttcactgcctccctcacctcctatatatccttcccccttgcctcctccacccacccacacttcacacttcttgtttgatcaatcacagagacagagagagagagatggcttggaatggcaggtttggagaggatggagaggaagagaggagccttgagctcagccttgccctccctggatacttctccagctcaggtcaccacctcccttgctctcttcttgattcatcttgccctcaaagtttcctgctttgtttgatcatatctgtgtgttttgtcctatgctttacatttctggtggattttcatttctcaggtttgcaggggaacacgagcactgctgctgatggagccaagggaaacgatgggttcaaggcaaggtgatgaaaattttctggttttttttttgggagcagtctgtttgctcgcaacaacatttttctgacgaatctgcagcaaaaagatgctaaaatttgcccctaaattctctgcgattcgcagcaggccggcggctccggtggtcgggtggccgccggtgcggtcgttccggcggaacctcgcctcgtcgtcgtcgtcgtcgaagccgccgcgtggaggccgagacgccgccgccgccgccacgggaggcaaggtggcccggttcgtcaaggtgaacatggacggcgtcccgatcggccggaaggtcgacctggcggcgcacggcggctacggcgagctctccgccgccgtcgaccgtctcttccgcggcctcctcgccggtaaaccccaccacctcgacattatatatcatcggagttttctatctcgagctttctcttgatggtgtttgctcgcttgcttgctcgcgttggcagctcaaagggacccaaccatggccaccgccgccgccgccgccgctgccggcgagagctgcacaggagaggaggaggcgatcgccgggctcctcgacggcggcagcggcgagtacacgctcgtctacgaggacgacgagggcgaccagatgctcgtcggcgacgtgccatggaagtgagtccgacacacacacacaccatgaatgaatctctcgtcttctccaaagctaatggcgacgaattcttgattgattgcagcatgttcatcgccgcggcgaggaggctgcgcgtgctcaggagctccgacctgaacgcctccacggtcagcgaaatttctggttttctgctcctttttcttgagaaatttgatcgattctgacccgtgatttttgttcttgatcttgtttttgcagatacgagcagggagcaggaagagggcagctgccgagtgatcttgatcttgtttttttcatcgccgggagcagagcaggaagcatatctgcatagtgattatgatagctctctgttttgtttttaatccttttctcttcgcgttcttggaagatttttgtgtacaaaaatgcgcaagaagcgtctttttttggggatcatgatgttgtcgactacgactaggacaagatgtaatcgagaatggaaattgttagtactattaattaggatcaagttcatctgttcttgcaagctactaatcctggacatgctgagtgatgtgtctttgtcagtgtcgccggttgatgttttatcttgcgattctcgtgaagcatctgcacatctttcgcaatcgtcgattcaggtttcggagagcaagaaacgcacgttgattttgggagtgtttgtagttattcgtccgagcggtcaggcctatgtgtgttcatctgagtttggctcggttcagacttcagagtagattcagtattcagttacacttggtttagaacggaaatggtttcaaatcttggttttttccgctaaacggtaatatcttttacaaaaattttatattaaaaaattgcttaaaaatcatattaatctatttttagtttttttagctaatacttaattaatcatgtactaacctactatattgtttttcgtgtgtaggaattaattcccaacacagcctaggatttcttctgagcttttagaagatggtgaaaagaacaaaatgaatatttttcagaaaaatgttttaactgctatcagctgaaagcctgaaactctcatgttatctccctctgaagttatctgtggtattgttcggttgttcgagaagatatcttcaaaattatactcctactcactatattttgttgtctaaatagtcctagagcaattataatattctggttttatttttaacgatgattgcttatctagagaagaataaatagccttttacggtccttgttagtactagtattaggctattgggaccacctatacatttgtcgacaaattttctcctaaaaatttgataaatgtaattataatacaatcgtagtgtaattacaatgtaacttaaatgtaattacagtgtaacttacatgtaactacagtgtaacttgtatataagtttcacgtaattttgaatcgttaaatctattacaagatttgttttggtgaggaagaaaaaaaaatcacagcacacacatatgtgtaaggatttgttcccacaacctccattttacccaaataacatattacagagatatttttgagagttacatacaagttacactatagttacatatagttacagtgtaattacatgaaagttacagtgtaattacattacgattgtactgtaattacatctgtcaaatttttgggagaaaatttgtcgacaaatatatagcaaaatcgttttcggtttgctgtaaaatttacaaaaataaaacagtttttcttaatgggccgaaaatacgtgggccaaaataggaaacgaagcggccgaaaaaaaacttgggctgtcgtacaccagcaatagcacgatgtcgaggcacacggtggagggacagccgccgatcgataggttatttaatttagaagaaatgggttgtatccattggttaaaattctgcaaaatttaaagctttaaatctgtaagaaaaataaataaatagatagtccctttaaagcttattacgtacccatcaaaatgtacgctacttgatcgtgtgtagtgtaggcgtaggaaaaagaaaaaaacccatcaaaataaaaaaaaaactccctactacaagttactttggcttctttttgtcaaatattttaagtttgactaagtttatagcaaaatatagtaatatttttaacacaaaataaacatattattaaaatatatttgatgttagatttaataacactatgttgatgtggtgcatgttgctagatttttctataaatctgatcaaacttgaaatgatttgactagaaaaaaagtcaaaattacttagggccagtttagattccacccaaaaattttacaccttgtcacatcgaacatttaaacacctgcattaactatcaaatataggctaaaaaataactaattgcacatattgcaactactttgcgagacgaatcttttaagcctaattgttccatgatttgataatgtggtgctacagttaaaaaaaatatgttaatgacagattaattaggcttaataaattcgtcttgcggtttaccgacggatactgtaattagtatttttattagtgcccgaacaccctatgcgacaccctatataatacccgatgtgatacgccgaaactttacaccctgaatctaaacaccttatgagatgtgactgagagagtaattataaataattaaaaaaatgcccagcacgaatattgcagcagccgtccctgtccttttttcctttcttctcccccaatccaactcctacttcgttgcgttcgttctaaacccgagcccgatttcagtgtgttttgagacttgggcccttatacaaaggcccgtagtacactaggcctccgactctcgccttccccttccttgttgcccccttacccaagttgatccgtcgccgagttcgcctgagccccaatctccgatcccccaccatcgccggcgccgccgccgctccaccctgccgcttttcctcccgccgccgcatcctcgccggtgagagcatcctcccgctcgttacatcttcctcacaccttttattttttttatttttctctctcgacgaatttgcgaacctagactggtagttcaaccctagcttctcctccctagatctggaagctacttttacctttgcccttttttgttgttgatcttggtagtaatggtggtgacaggtagtttgtcccccggagaaaatctccccactgattcttcgttgggattttagggttttgtggcggcgatttcctgtggttctcgatttgtttctgctcgctgtttcgcgagattagggagattgggaggtatagtgtgtgtcgtgtgtgtgtgtgtggggaggggttgtggcggcggtggattggttgcgagggggaagtgattcatgtgcgcgagatgttgatttgattttttttttgtttcgtcggtgacagcgcgggatggccggagcgacggatctccccccgaagggcgggttcagctacgacaattgcgcgaggaacgccatgcttgtggagaagggcttgaagatgcctgggttcctcaagaccgggactaccatcgtcggtttggtctttcaggtactcttttgttctgctaactggtactcttagtttttttttcttttttcttttgcgtgtgctggttaatttgtgtgcaatcaagggaatcataaaactttatggacataaggataatggatataactgaattgtgctgtaacattagttttctcagctttttttcccctcaactatagtttttagtatgtgcgcaccgcacgaatttatgcttctgtttatgtaaaattttttgaacctgaaagaataatggattaccagaggagatttctagtggcaacattggctattgcagttgctttcagcagggaagtagatggtgcttgttttaacctcctattgtatttttgctcctagtctcctagttgttaatactttgatggatgattttgttttccatgcttcgttccatctaattggcatccttttctgctcatcatgaataatttgctgagttaactttggtgtaactatgctttctacttaggatggtgttgttcttggggcagacacgagggccaccgagggtcctatagttgctgataagaactgcgagaaaattcattatatggcgccaaacatatattgctgtggagcaggaactgccgctgacactgaggctgtaacaggtattaattatggtatcctggtagcatgaagagaaaaaaatagttgtggactgtatactccaacccagttgtttcattagtttgcttctctgtcttataaaaaaaattgaaaaatacaacttgttttgtttcaactctagatatggtcagttcccagcttcaacttcaccgttatgcaactggtcgtgagtccagagttgtaacctctcttacattactgaagtcgcacctttttaggtgattgctctctgcctccctctctctcaaacattgcaaatgtttatgcgtcatcagctagactatcatacattgcaaacgttttaccttctttcttccttatgttttagctaccaaggtcatgtcagtgctgcccttgttcttggtggagtagatgttactgggccacacctgcacactgtgagtaactgagtatggttgtctgttaaaaatatctgttaagagaaattttgggtagttttgttaatcttttgaatcatataggtttatccacatggctccacggacactcttccttttgccacaatgggttctggatcccttgcggcaatgtcagtgtttgaatcgaagtacaaagaaggcctcacagtaagtgaaccagtgtaattttgttctttgttcaggctagcatttgctgattgctctatacctttttttatttacatatattgatactgcatatcttttcattatgttttatatcattctaattatttcttaaattctctagagggaggagggaatacaacttgttgctgaggcaattcgtggtggtatcttcaatgacttgggcagtggcagcaatgtggatgtttgcgtaatcaccaaggtacataaattattattattattattgcatggcattaacaggcaaactatggttgtggcaatttatttgtccgtgtatgctatctttctcacacatggttgcagttcttgatataatttcctgtgaactgaaattcccattcagttatctatgtccatttcgttctattcagttgctctagtcaataatctatgacactcgtttccttcggtttggttgctctatgcaataatttacggaaagtgcaatagtcttagataaatagatacctgcagtgccaaaaataaatccaaatatttctatgctataatcttcccgtcaggggtagaatatttgattgaaccaactttaaaatgctcttgttgcttgaaaagtggacgcgtgtttctatcttctgttttgctaacaaagtcctcctgttaacattaccaggggaagacagagtacttgagaaaccaccagttaccaaatccaaggacttacgttagttcgaaggggtacaacttcaccaaggggcagactggtcagtgtcttattaatgttacatcatattgatagaaatgcttcagcaatatgaactcattcgtgtttcttctctcgtctcgcagtggtgttgtccacaaagataacacaactgaagccgaaggtagaggtgacagagggtgatgcaatggaggagtgattttgtgtgcttacattcagacaagcagtcacgttgagaacatatgctttcatttcagtggaaatgcttgaacaaaaaaagatgactcttgttgtacttccttgggcttaatgcacatctttaagttgattttcgacacatttatggaggaccgatcttatatatttgctaaacggtggtgcttctattcatgatgttgcttcgtgtattcaaaggttcatttagcgcgaactgaatgactaccaatcttcctcgagtccgatcgctgagattatattcctagcagacttaagtttgtagctggagtctcagttgataagcctttttttttaaaaaaaaaattatcagtgctgacataaattacaatgtcttaaaattaaatccaaaattaagttttaaaattctaattttgaccgtggcttataagggcaacgatgggtgaaaagaatcatataattgatatttcaaaatttaaatccgttgatacaaacttttttttgtgatatgaaggaattattgatgtaagtactgaaccaaaaataaccgacaacaaagttcagaactactttatccggtacaacaaaagttcagaactattttctcctataataattcagagtagatactgcaaattgcaacaccaccaacacatttggcttcgatttcatttctgaaaattttgtttgtagagtccatcaggctccttcgaaacatacagaacttcaccacattctataaactataacaacagcactgagtcactaataaaagttggaactctgtctatggggaatcaattcaggtactgagaatgagcagctgcaatcagggcagctccaaggccagacccgtcgtttgcaagcttgacagccaccgacttcgacgcctcttctccgagcaactccgtcagcgtggtctccaggcactgccggaattcggtgtaatgttcatatagaccgccatcgatggcgatgaccgactttcgcttgtcgcctgggacgcctctgccgatcttcctgaggatccctacgatcccagcagcagccagccgggctgatcttcgggtgacgatgtcacagatttcgacaaccatcttccttgtttctaaggatgtgtctgtgatctgtggtaaaagtggacaatgccgtgtaatgtgttcattgtgcataaaatggatagagggaatacagttcaatgctggatttactgatgaagattaccttcaggttatctgcaagtttttcagccacaattctgagatcaggtgttccatcatgatgcatcacggaaatatcaggagtcctgaatataatgagagagaggataagccagcacatcttttttcaaagttgcttatctcattttggaaaattgcaaagccatatgttttgcgcctaataattattatggatcaatggtgaaactccaagtgatcctatagatattctcagcaaatcatgctttatttgcctagcttatagattaagattaccacacaactgagtttagcgagaaatatacctcagaataaagcgggttttgagcttggtctgatctagattgccaaaaattgaagactgcaaagatattttaagaagcactctccttacgatttcacctagatacattcctgaaatcaatttctcgaagatctgaaaaaaacaagtcatagtttttttagacaacaggtagcagttctatataatgtgggtaaaacttttgacatgtgaggagtatgcaatcttctagagaaacttgcctgctctccagggtttaagctctctttatctagtgcttcatcatattctgttattggaagacaggatgaggagaagttaccccattctgtattaataacctgaaattcagaaagtacagtgagaaagaaatccaaatacagatagtagatgattctatgcagtacatgccagttacttcggttgagaaatatctaatccttaccatgtttcctgattttggtaactcgccttccaacttagggatagcatttgccttctcaagatatgcggcgtttgagccagtgcctaagatcacaccgacgacaatatcttcgtcgtagtagctgcctgccgccaatgtcccaacagtgtcattgatctgaaacagtcaaaaaataatgtcaagcttatcataagaacaaatttcgctttgttcaaaaatgatatggaactgatcatttcagaactaaccaatgcggaaacgcgcatgtccagaccttgcttctccatggccatctgcaattcggccaccacatcttcacctacctgtcatattccaaagaagcactaatttcagaaaaagaaaccaatgacaaaattctgacagcatttcacataacaatgtgaaaaacagattcgctgtgacattgatgttgtgaatttgtttttttagataacaactgatgcagtgatgtgggaaaactgacaaatcaagagaattcttacagcatcatcaatagaaaacgccttggtccacttgataagagtcccagacgcaatcgatgtttgccgcacagggaaagagaaggtgaaccccagttccctttgcctgtcgttgaacacggcattatgtccttcatcagcgacgaacttggctaacgcggaagcgatgaagccaaacagctcctgagattggcatcacagcaacattacaaacatggtcatccaatgagactaaatgtgatgttttactatgatatatactagccaattcacccaaaaacttatgatactatatggaaacaagtgtggacatgctcactcaccgaggagttgccggacatgagatggggagggatcgagacctccctcgactcgcgcttcacgacccgtttctcctttccagcaagctgcacacgcaggactcggaagtttgttcccccaagatccagcgcgtagaacaagccctcttcggtcctacattatttagcacaacaaaaggttgttagtcatgctgatcacgaaaaatacagtaatacacacattgctgttctgcgattttgttgctttggcagatagctttgcttaagcccttttctgctattcacaaaaaaaaaaaaaacagaaaaggagaaatgcagtgataaacacattgttgttctgcatttatgtcattctggcagcaaacttgacaaaaagcctttttctgcaaactacagatttttttttaaaaaaaatggaaactttttttttacctttttatgcagaaatacagtaccgcacacattgctgttccactattctgttgttttagtaacgagaatagcaaaagatattttccgctaatcatacaaaaacgaaaagtctcagctggtgcatctacagaaatgcagtaacactacacgcattgatgctctgcagttatgctgtcttggcagcgagcttagcaagaaaacaatttcctgctaatcgcaacaaataaaagaaaacttttctgctgatcttaacaagaaaacttttctgcctttttttttttggcatcggcaagctgtaactagacacggttacacgctcgcacgctgacacgcaatgttgcacggggtcacacacgtgctgccgcagcaggtgacacgagtgcgagcaatttgacacgcgcatggacacgcaagagcgcggtaactttttcttttttttaaaaaaaaagagtaggtaaattatgttctagccttctagggattaatttaatttaatttaatctaatcccaatttgcttggccccgacacacgacgctgtgtcactggcagctcactgcaggtggcaacaagccaacgatagctcatgttaccaaccgacatgaaaccaaattgggagaaaaaacacctactaaaaatgtgattatcatgcaattaaccaccacctacttaaccaaaggagattaaaccagcttgcaaattaatcctgacaaaccaatttttattttcaatcagagtatccgaatcatctgtagctgctgatattaaagtgttcatggcatccaagaaccacacaattactaagaaatttccaagtaggagagagctaaaagaagaagtggatgatgaaacagtaattaaaaggaaacaagacctgtgattattagtgattataaatataattactagtagtaattagttacccattggggaggttgtcgacgtaggaaacgatcatcttgatcttgctgccgccctcctccgccaaccccgccgccatctcgccggccatcgccgccgccaccccatccagccgcgccgccggcgtcgcgcactcctcccgcagcgccgccaccacctgctccgccgccgccaccgccgccgccaccatggtctccgaccagcaaccaatcgatggatcgatcgaggagtgaggaagacgagaagatccaagaaatgcgagattggtggtcaagatcaaaggccggagctaaccaagatcgcgtacacaggtctctgggattaggaggaggaggagatgaggaatttatagcggtggcggaattgaaagggatttcgtgggaggaagaggagttcgaggcggaagaggaagaaggcggggttgggttgggtgggtgacgcggcgtcgcgtcagcttaaattcgaagggtttttttaaaagaaaataataataaatgactgaaattgggttgaaaaataaggggggcgttgcaaagagtgttgctttgaattcacctctgcccacgggaaacgtatgcttcggttgaccccctgggtttgactgcaattttgcgtttgcgttttttttttgggtgaaacttttcggttcacggaaacacaatttggcttgatttatttataaattttgatcaatggtttagttaacttaaaagttatgaaaaactatattaaaaagcacttttctgttatatagttatattgattttatagctattaaccagtaaaaaaagattttatagctattaatattataatttggaagaaaacaggcaacttaacttgttagattttttatgaattagacttgacacgagtgctcatatttacgatttgttattattctttcaatgacccctatgctcgtatttacgtctcagtgtcatgcaatgagatgtatatggtgagttaacgatgtgtgtgcgcgtgttcatacgaatattgtacgcgcatgtatgtgaatacttaaaaaaaattaaatcctagctgtgaaacctggatataaacatgtccaggtttgtagctaggatttttttttgacagagtagtatatatatgtatctaagaaaatattttatgatagattaatgattaaagtttaatcattaatagtttttagactaaactatgagtacgtgttataaaaaatcacatggcaggagcagtaaactagtgatacaaggcctatctgaaggtgatatctcatcctatgtcgtgatccctctacatctctttcactatctacttttgatgtaagctgcaacctttgacttatgagccacttcagtatacggcagaaatttaggcctcttatgatacgtatggatttttcatttcttattagtgattttttttatctttttccttacaaaattttatatgatctttatatgaaacaacaacaattgttgtcgtaaacaaatgcgcacgcagcctgtattattagtcatgcatgtgctacatcctttgtctcaaaataagtttgcatttatatatggatttaaagatggagggcgcaagtgatatggctaatattatacggttagaatacatttttttttgttaaaaacaattggaatacacagactacacaatataagttcataggtttttcctcctttttttgaaaagcaatacttgtgcggttggcagttgaacacacagtttatagtagtagttgcttggaatttattgtcttgatactcctatttgagaagtgtgtcttcaggttcagaccaaaagcttatagtcaaaaagatacgagtagtattccctacacacaaattttggagctactccatccgtcctaaaatatacttcatccgtttcataatataagactttctagcattatctatatttatttaggtgttaatgaatctagacatatatatgcgtttagattcattaacatctatatgtatgtgggcaatgctaaaaagtcttacattgtgaaacggagggagtaagtatttttagttatgaatctggataactgtgtgtccatcatagctaaaaattgctatattttaggacagaggtaggtggacagaagcaaagacttaaatttgatagcagcagcagccaggttagttgagtcaaaccaacaaactaatcagctactgttctaaaagactagaagaacaaaagagaattatctcaacatactcccaaaccaaaatcgttggacaatcctagtgtacggctctgcaaaaaaaaaaaatacaaagcaggtggctgcgagagaagaggccggtttcaaggaatttgacctggactcccctcgttctggactcggaatagccattagccaatagcagccgggtttggattagatattttaggtggataagggtttcatggcacctcactctgacgtgagaaaacactgccttttgcattgtcatgctatcaacatcctactaacaaatagtaagagaataaaaatttaagataggagagcgtgcatggcattgttattagtattatttaaagtagatgcagtgtttgagctctcgattttcagttttagatttctgttgtcttttgtaacttacgtcccttttggtcttttgggtcttatgcagtggcggaggcaagattttcatgaagccggggtaattctaattaaaactgttacccacatattacggttaaaaaaagtaaaactattttattgaaaacaatggactattagggcctgtttggtatagctctaactcctaaatttagctccaagagttgggtctggagtggagttgtggagctgcctaaacccagctccacaactctagttcattttgtgagagagctccacccagctccactcccagttttggtggagctgaaactgtttggctgagctccagctccaggaggggtagagctggagctggagctgtgccaaacagacccttagtaggcgcgatctcctgcatgcattgatgcttaggtgttttaattcacataactaattattgtggcctcaagtacatgcacaaacagactcaaccaaacgggcatgcatggaacaggaaaaatcaggcaccatcttgttatttgcgttctaaagtatgaaatccatatactctatgaagtgcctatattacactttatcagggttacagataagacataccctatatcctacgacttatgaaatataccgataaggtataccttcacgtatacggcttatttccgtatacgctgttggaaatttatctcaagttatgaaaaatatctctatgagttaatgaatagccggaatcctactcggaggggataaaatcttgggataaaatctttggttataccgtgccagtttacatatctctaagtctttcttggggtcaaggtattccacggtataaaaaggacccctagggagaggcaaagcgcatcgcatctcatcgccaacacatccaccaaagtttacgaagccggagtccacaaagccaactcgccgggagatctcgtcgagatcttcaactacgatctcgtcagtatcgcctgtttcggttactctctttgtaatctgttctcatcatcatcaatcccatataaactggactagggctattacctaataagaggcctgaaccagtataatccttgtcttttgtctgttttgatgtcgtactacgtagacccctgttccaacgtaccacgatactctattcatccggtccgcgagtatcactcgtcgacacactttgaccgggaagatagcaaattgttgcacaaaagtcactctatctcaatgggtcgtggatggggagcctaggcaactgcccgccctagtcgggcggtaaatccgccgctggtcttatgccttgaaccactaagagctaagcttaaggataaaggttgtgtactttaaattttcatttttattaccaatcacaagaattgtgaatatagattacggtaggttattgccatgttcggcaatggtgggctattcatctgccacgcgtacgccacgtaggataataccgctttggattaggtcaagagggctattcgtccggtatagacagttcagggtataaaatatctggttttgtggttaggggggtaatttatactattgtcatagttcgagaggtaattcgtacttttttccttcacaatataagcgcgaaaaacactactacaggatagattttcctggacgcccctcttttttgtttccatgcggttcgtaagtggaaccgcatggaaaaaaagtggacaggctccaggatgtcgcccgcacgggataacacattatcccgtgcgggcgggttaagccaaccgcacacccgcgtggtccaccgcatttaacctggccgcccacctccctctgcctgctctccctcgatctctcccactccactcctccctcccactctcctctcctctcctctctctctctctccctcagtgcacagcgcgcccctccctctctcccttagtgcatgacggcgggcgaagagggcggcggatccggcggcacccgccccatcccctccttccccttgcagaaccgggggaggcggcggcggatccggctgtgcgcggcggcgagcgaagggggcggcggcggatccggcggcggcgatgcacagcggcagcggcggcgtgcgccccctcccctccctccccgtgcagatacggcggagggaaggcttgggggggggggcggatccggccgcgtgcggcggagggcgaaaggggtggtggcgggcgagaggcgtggcggcaggcaaaggggacggcgacggatccggcggcgcccgccccctctccttcttccccttgtagatccgggggagggggcggcggatccggccggcgaagcgcggctctcctctcccttgcagatccggtggaggggagggggaggaccggcggagcagcggcatacgtcggcgaccggcaaccggatctatctctccctcctctctttgttatttgtgatttgttcatgtgagatgtgttcttgttgatatgagatgtgttgatgtgtgttcttgtgagatgtgagatgtgttcttctgagatggttcatttgcgccggcgacgggagcgagcggcggattcgtagccggcgaccacgagggcgacgacggcgggcctcggctaggcagcggcggactagggttagggttagggtttcttttttctttttttttctccgtgcgagcgcccgtacgcaaagattggttttcgcttgcgggtgcgccacccgcacgcgaaaatcgcgatttttccagacgactgggtgcgtgcgggccgcccacccgcacgcgaaaattggatagcccgcccggaaaaatcggtgtcgtagcagtgaaagaagcacagaggtcagcagcgaaagaaattaacgatgaaaagataataagaaagccaagtacaccatttgctttgatcgaattcggctccaacttttcttcgcgtttttgctctctattatacgtaggactagcagtaatcaaattgcaattgagatgatgcattaactaatcagttgtttcctcttcgccgacttgtgtacatcggaatcaggtctgtgggccggccacctgcatctccgtgtcggcccagtccaacaaaactgatcatgatcaattgtgcagccatgattcggtccaatcttatttcagaggccgagattgttagcccattcacaaaaattaggtaccaaaaatgtaattgtaaaatataggaaaaaatatatgaatacactgtttggataaacagcaggaattagagaagagattcaaagttaattttttatgggggtcggatctcatgctaacttttctacaaaacctccttgtcttgaccataggaatttcataggattgttcagtctcaatcttttgtttcaatgaatcgaataggaaatttatgattcaaatcgtacaaatttcatatgttttccctacaaatcggtgccctaggttttgttttttcacacggagagaagcataattcttatagttttctcgttgagatcagactaaactccgaaaatcctatatggcacataatccctccatccaaaaacagccaaattggagctatgtatgtggacattgggatgtcctgatacatagcgaagattttatttaatttattgtttttttaacgaagggaataagtgctggcagccagcgcacgcgcatgtgcatgttgggcctggtgggccacctttggaaacgacaagaatcaaaatcacgattagcgctaattactgattccgcattatctgttttccaataagcacggacaatccatgtgcttaatttgacgagcctcctgcggttttttttttctcaaactgttgttgcagttttttacccaaaaaaaaaaaagaaatctatacttagaatttgaatcttttaaccagaaattgtaaaactctacttaaattctgaaaatttcaacttaaactctgaaacttacaactcaatattccaaactttcatctcaaaattcaaaactttaaacttaaatttaaaaaattttcaactcaagttttgaaactttcatcctaaaattcaaaacttccatcgtaaaattaaaaaatttcaactcaaatgttaaaattacaactaaaaatctaaaatctttcaacaattttttaaaaccgtttaactaaatccgctcggtcgacctccgcccggtaaggctagtgagggggcagggaggctggcggcggcgacgacgtcgtcgaaaggaagggccttcgacggtgacggcgacggcttcatctccaccaccaagctcgcacgctctatggccgacatcaacaccgaccttttcgacctgtccctctccgcctgcgcgatggcctctccctttcccctgacatggcgctcccgctggccacccttctctctgtcgtccgcggctggtcgccggatgccatcaggggaagaagcaagaaaagacaaaaaaagaaaaaggaaaggaaaaggtgaaggatatagaggagaggggagtactgaggatgatatgtggagccacatggcccacttttttttattttttttattcttgtaactgattatgtgggcctcacagattttattattatttcgcattgaattgcctcgtaagtgtgacgtcaatgccatttggcaacgaagacctagtcaactgatccatgtatgcgccacatcagctaaaactagggtcaatactgccaagggacctcgtttgcattgttttgtaagttgagggatgtgttgtatccagttttctggactgagaatggaaaataagactagaggacaatggagggacctagagtgaacttattccaaaaaatcacaagaacagcggaaggtccagtcgaacaaaacaagccatggtttggcccaagcttatttcagaggctgaaattgttggcccaagcttattcagaggccgaaatcgttggcccattcctgtagataggagactttactccaaaatccctgcagcttcagtttttttagagagagacaaagtcgtacaactcgtacagttcctggttgagatcagaccaagcccaagtacccaactgcaaatcaaatccaaaacagattagctaaaaaaatatcaacaattcttttcttgacaaaaacaattacaatttacaaaggcaccgatcaatccccaacctcgcagatgtatttttgtatgtgagttgcatacaaattacattatattgtaactataacatgatacaattacatcataattatattatataatgatgatatttgaaagtgtttcactccagaactgactaaagttgtataggcagcctgtctaaactgaaagaaaaaaaaaggagcaacagaagagcaagggcggcatgagcgtggcatgtacagtatatatgcacgtgcctgcatgataatgcaacttgtcctgtctgcctcaggtcgtcatgattctttgggagctcgctcgctcgcacgcaaacatcggtggtagccttcattgtgtcgcgccgcccgcccgggcagagacaccatcgttagttcacaggcttcctttcttttcttttttttttaatttctcccagttctcttctctgttggcttcagcgatgagcttagatctactccgtccgtcccaaactaaacgcaaccataaattttcgtgtcaaactttaatagttaatcttatttaattttttatgattagtatttttattgttattagattataaaacataaattgtactttatgtgtgacttatttttttagtttttttttaaaaaataaataaaacgaattattaaagttggacacggaaacttatagttgagtagtaactactccctccatctacttttaatagttatatttctaaatatgaaaattctatttttataagcatatttcaatccaacaacatatcctcttaataactttctcggatttaatacatgactctccattattccacacatgattggctacatgggtatcgaaaaatgtaaatattaatgaatcgcttgtttacgaggaatgactagtagcatgtttaaattaatgataagtagaattacttatccttagtctgtatgtcaagatgaaatatgactatcaaaagtagatggaaagagtattatacaagttgcattgacttttttttatttaaacttatattttgattaaatttatagaaaaatttaacaacgcctttaatactaaaatgattttattaaatcttagatttgtcgacgtttgatgtcgcgattccggcatttgcatagtatggggatcgttggtactaggatatacgcgagactaaggtaaaagatggagacggggatttttatacaggttcgggtccctgaattgtgaggtaataaccctacatcctgttggccgaagccggtgttgctctttattcatctggatcacacaagtacaatatttggggtagcctatctaactgttaccgacatggcggtctgaattaaaggtctgactcgtagtcgataacagggtaatcttcctcctcgaatccgtgcccggcgagatcagaaacagcgctagatccctacggccggcctctgtaggtaccggatagggtcgatccaggtgtatctctgaagtcgatatccagcggcttgtcttggcatatgttggcttgtatgttgtggcttctgttgttccgtgtatgttgattgtcccctctcctcctagagggtcttgtatttatacccataggtatccccttgtccaaatagaactagggaaaccaatatggatataattcgagtagttcttgtcgttttcatgtacaactctggttgtctttccttatccggaactcttcctatatccgcaggttgtttccgtataggacatggtatgtgatgccgagatttagtcaactaaatcctatcgatgggtcatgccgagatttagttaactactattaggtatgtggtatccataaccctgacaatagcccccgacttcgatgcaaatgaacgaattcatattctcaaccgcgcgcagaccttggagtaactgttatcgtgctcacgtgaccgttctcggtgaattcaaagataacgtttgacttcctttttcagccttgtgcgggcatataaagggtttatctgagtcaatcttacacgaccagatcttacctttttcagaactcttacacgaccagatcttacatggtcttttgtctctacaggatccaacaaggccttatcggctctgcgcgtccccaaccgaagtccccttaggttcctcggaggccttgtcaagacggtgtaaacggacagtaggataggtttcaacgctaggtgtcatcatggtaagggatctctgggtaaaacacttggcgatattgtgtacctgatatcaacttcgttgaagtagaggtaatgggagaatcgctacaccgctggtcgagaaccagttagtagtcgtagctcgaccactagaagtggaaatagtgggagaatcgctacaccactggtcgagaaccaggtagtagtcataactcgaccactagaagtggaaatagtggatgaaatcgctacaccgctggttgaggaccagatagtagtctaaactcgaccacttgaattggaaatagtgggagaatcgctacacctctagtcaagaaccagttagtagtcgtaactcaaccactagaagtaaatttacgagagatcgctacgattgactggttgagaaccagtgaataggtgtctctcgatcatttggagtcgtggtacgaggaccgctacgctgccggtcgaagaccagtcatagctgttcctcaaccatctgaagtcatggtgcgaggaccgctgcattattgctgtagtcgtatctcgaccatctgaagttaaggtgcgagagattgctacgttttactagttcgagaaccagcgagcgagtagaattatctctcgaacaccaatggaagttgcggtgcgagagattgctacgtattggttcgaaaaccagcgagcaaatagagttatctctcggacaccaatggacgttgcgatgcgagagattgctacatactggttcgagaaccagcgagcgagtagagttatctctcggacactaatggacgttgcgatgcgagagattgctacgtactggttcgagaaccagcgagcgagtagagttatctctcggacaccaatggaagttgtgcggtgcgagagattgctacgtgctggatcgagaaccaacgagcgagtagagttatctctcggacaccaatggaagttgcggtaagagagatcgctacgtgctggttcgagaaccagcgagcgagtagagttatctctcgaacaccaatggaagttgcggtgcgagagattgctacgtgctggttcgagaaccagcgagattgctacgtgctggttcgagaaccagcgagcgagtagagttatctctcgaacaccaatggaggcgctagagttggtttattacatgtgcctctcatgtggccagcatgactcacacacccaacttgtagcatatccggatgtccgttcacaatcatgtcgggcgatcaagccgacaacgttcacgaggaattatctgttaacatccttttctcgaatagtccagccacggccagtgctatgagataggtcgtcggtcttcattggtaggttgggcgcgacgactctgcatttgtcgagatcattctcgataatgcggtgtactcgaccacaacctactcgagtgctcaattgttcctgaaaaatattttctagaaggcaagacatacagcagagaatatcgagtatgtactcaaaaaactgcatgggtcttctagtattatcaggatataatgagcagatgtaaatatcaggtattatgtaaactgtaaacaagcatgatttatacagaagaaaatagagcgagcccccaacgttagatttgtagtcgatttaacatcggggacactcgcgcaatagatattgtataaaagacatgctctagataaacgtaataaattattgatctgacaatgttgtatgatctgaataggtacaataaattcgtagataaaatattgcatacctttatagatatatgccagatgtatctacgaaattagtagattaatttaaaaatcgatctcactaattaccttctgtgcacctgtctgagtagcccagacatatcttaccaaagcaattgtacatatgcactgtgtggataaatgttgattggtccaaacatgcatgcacgtttttttggcttggatctgtctgttggtgtactctgtcgatgatagtagatgccgtgtccagcttggactcagcgggccgatgccttgcaccagctagctgtaggagttgatgccacgcgcggaacgatttgtttgcaccttaacctggctaggacagtgcgacgtttgatctcgattcaaatcgggcccgtgtccgaggacaccccattgggaataggaccgactcatattggatcaatctctcgtgctgtcgataccgttggtcttccaccgcgacgaagtcttgaaccttggtcgatctcgccagatcgaatataattgatgacgatgattccgatctcaacgggagacatacttcggtcgggttaaatctccccatagcagaagtcgtcgagtagcttgttgtcggagaatccatctcttgaacccatctcatcaaaatcctgaagtaccaaagtcccctacctggtgcgccactatcgatgtttgatgtcgcgattccggtatttgcatagtatggggattttttggtactaggatatacgtgagactgaggtaaaagatggagacggggatttttatacaggttcgggcccctgaattgtgaggtaataaccctacatcctgttagccgaagccggtgttgctctttatttatctggatcatacaagtataatatttggggtagcctatctaactgttgccgacatggcggtctaaattgaaggtctgactcgtagtcgataacagggtaatcttcctcctcgaatccgtgcccggtgagatcagaaacagcgctagatccctacggccggcctctgtaggtatcggatagggtcgatccaggcatatctctgaagtcgatatccggcggcttgtcttggcatatgttggcttgtatgttgtggcttctgttgttccgtgtatgttgattgtcccctctcctcctagggggtcttgtatttatacccataggtatcctcttgtccaaatagaactagggaaaccaatatggatacaatccgagtagttcttgtcgtttccatgtacagctctggttgtctttccttatccggaactcctcctatatccgcaggttgtttccgtataggacatgttatgtgatgggtcatgccgagatttagtcaactgctatttggtatgtggtagctataaccctgacaagattaaaaaaatttgttttgtattgaataatttgtcccacataaggcgacacatatcttaatttaattcgaaaaaaaaaactaatcatgctaactcctccgcttcaaaatgttgtttgagagtttgaggggccgtacttaacacggcgaaatggcggtggtgcccttgggcgccctgttttgaattggagagttgattaatctccaatgggctaatggatggggtccggtgggtcgcctgctcctgctccggcgcgccaaccggggaggggaataaaaacggaccatgacgtcacctgacgtcacccccgagaagattcctttttctctctcatcgctcgcctgtcatctgtatgagtatgcaggtacgggtacgtaagcttgctgtcgccgtacgtgtccacaaccaaacttcaaaaagattccgcccaggatccttctgtaaaagacgagttgctagctaggtgaccatttcttttttctatactcctattataatacggctacatgcgtatacggtagtggccacagcaaccagaaaacaacgaccagaaatatatggtagctaaaataaatcttactccgtatcaaattttaataacatcatcaagttttgataagatttctcatgtgtctatcagagtttggtaaaaagactaaataaatatatatacatttttataagtttatcaaaagaataaaagaataatatggtttaaaatgacatcgacggtttttcaccgtatcttgcggcacgtacgctccggccgccggccgaattaccgggcgtacctgtactactccaacttgtgggatcgccgtacatttggaatccggtggtccacccggcggcagacgcgcaacccgtgcaatcctgtggctgcgagcaccctacacgtacgtacgtacggatcaaactcactcaccccttgtaacaacgggtttaccgttcacttgcttgatactactacgactgcagcagcactagctactgaatatttgttggacgaccaaatcgcaccggtgttgcatcaacttaattaatgtgcaatctgcttagtacccctaccacctttcaaaacgccaattccaccgtaccaatttttacatggtacgtactacgcaccttagtatacgagcccaaggacgaaaggatgatagtatgatataccatgcctatgagaaactttcagggatcttccggctagcttcacaaggtggtgggatacatgatctgagttcgaagcctcacccctcctaattatttgatattatgtcattttctaatattctcgtcttttttataccatgcctatagtatatatttgagcccaagaatgaaacgatatatcatgcatatagtcttgttaagtaggcgctgattagaacgtcatgtagcagtgatagaaatagtactaagtatatgaggttatttacctatactactaaataaatgatcttcacagaacccctttctccaactcacatgcgggtcgttacaacgcctgcctacaatatactctatcccgagggagggtagatgggccacctgcaaaaagacatctttgcagacgggcctcttccgtctacgaaaaaacctcccttcacttgcctctcttttcacctacgaaaatacatttcacaggcggtatcttaccactacaagataattgagctattgccaccaaattattactataaaaaataattcgtagcaatatattgtactattgcaatgataatttttctgtggtaaataagtatattttattgcaacgacctacgatcgttgtttcattagtacttttgttgcagtagaaaatgagatatcgccacaaaaaatcgtactgttgtaaaaaacatgttctatcgccacaattttaattttcgtggcaatttacatagtccatggtacttttcactatttttttgttgccacaatcaacaaattcattgcaataaaaaaaattgtcgtctcataatgtaacttatttttttcatgtggacacggattgagacaaattttatatggaaactagaaagatagcccgcgcacatgcgcgggcaccttatataatgtgtgtgaattttattataaatatttatgtgtggctgactttttattaaaatatttttactatattctaaactaaaattaagcttatttagtgtgctttagatgctagttattttcttacaattacacttgcaacatataaattctaaaataaaattacttgagattatgcagttttgaaattatgagaaagcattatgtcaaaacaaagaaggtggttcctatgagaaaatttagggtattttgactccccagaaggattatctcgataccccaaaagaaatccaataatatcaatttttgtttgattttattttaagttatatacacacacacacacacacacacacacacacacacacacacacacacacacacacacacacacacacatatattgtaacagtcctcataaaatgttttttttctatttagaatgggttttaaatccagcaacatttttttagttttcaatttatttcaagccctattttttttcaaagttccattctatgaatcatccttgaaatgctttaatctttgcaatttagagtgaaaatataaatgcatttatggcatggggtaaaggtatatgttataaattttatctcatgaaatattgaagtagtggtcatagtattttttgtgaattatcactaaattgaagtgtcttataacaaataatactccctccattccataatataaagcacaactatttttttctgatgttccataattaatataaggcgtgcatgcatgcatgcaattaattagcacatcttatccattaaattattattttttaaaatcctccaccctcaagatctctaatctattgggtgtatgcattatatttattagggtgatacaaattaggaggtgataataatagtttcttggtatttgggttaagggtggttgtgccttatattttgtaacgaagggagtacatgtttctagattgttctacatcaggactcatgatttaaaatgttagcatgttttaccagaaaaataaaaaaaatggacatggcctttaattcttatatggaattgacttgatatatttctaaggccacctcaaggttgtatcattattaagattcctaggtgcaatccacatgcttattggtatgatcttcaaccgaccacacatttattttcaacttgttgtctataatgctagatgagtacatttatgattaaaaaaattatatatgtcacttaaaattctttttctctaatttattagtgacttcatagatcatatttgtaagttggatgctatgaacatcattattaagaacatttatttatttctgaaaaagattgttttaaaagtatcaaggtcaatttgtataagtacatcaccccgtatgcatgttaagagaaattaattaagtcggtagaaagtcactatatatctaacgggatataagtaatagatagaggtccatttgttttttttgcccatatagataattttaattttaattgttaaggagatagaaaacaaagagaaaataatggcaaggagagagggaggtttgggatgtttttctaaatgatcaatctaaccatctaaaataatgtattggatgtttaagtcaaaaccgatggtcggatgttttgttttcttgtcagaatttttaggattttatctgatctatgagagcaacgtaacatcttaagagtgtttataggtggacttttaacaccgcatgccgcaacggagtaagagagatgcaaggaggtttgggctttttttttaaaaaaaaaagatctaatgacccaaaataatgtgtcaatcgattgaaaataatatttccatagatttaaataaaaaccaatggttggattatttttttcaaaaattcaaagatttttctttgctttaagaatgccatataatagtttagaagcatctatgcgatgtttaatggatttgaatgtcgcataggggtggggagaggagagaggtttgggtttttctatttaaaaatactaacaatctaaaaaaagtattggagtacgtacatacttacgtgggaggacgagaggtggggttttacatgaggaggtaaaaacagtcacagaaattcccgatcgaccgagcgtcgtttctgtataaggggtactatttccgatcatacctttttggctatttttaaattttgttttttctaatttatttctgcattgtattaatgtcgacactgagaagtttaaatgataaatatggtcagttaccggccgatcgagcatcgtttctgaagagatgctaccgattccaaccgtttccgaccgttttcaccctggaggtgcgcctaatcaatctaatctaacggttgataatgttggaccaccgatttaattgaaagtcgagggatggatgttttgctttatctaatccaatggtgtaaaataatgggtccaccaatttaagtaaaatcgacgttgagattaaataatgccacatggcaatgtatccatcaatttaagtagaaatcgataatcgattacttctttttttttatgattttatagtatttctctaatttaatagcaccaagtagcggtttaaaagtgtttgttgtaagatgtataaagtgacagagggagagttagtagacctagtaggtgaaagtctatttgtggggcatttttgcctgtgaaaataattttggttttaattaatttttcataaagacaaagaaagaaacatatagaagtacgtaggtacattgcacattacgtacgcttgtttgtttgtagaggggagcttccagatgtgatttttactgccaaatagatctaacgatctaaaataatgggtccaccaatttaaatgaaaatcaatggtcggatttatttttttttattagaatgccacttggcgactcgatagcgtttataggaagtttaatggacttttagtatataatagattatagctctcgacgagatctacaattttgtaggtgataactttttcatttgaaatcttttagatattcaaatctatgattcaaatctcagttaggtaggctcaaatggaacgatatgcattttccaacagaattgatgcataggtgagttggtaaaagagagcacgtgtgaaggataggtcttaagttcgaatcctagccaagacacgatatcaaaaaaaataaacagataggatgatagattaatatttgaacttttaatttggtgcgcaaaactattgccacatatggagtggtggcaataatttttattacaacgatgtgaagtgttgcaatatgtctttttgccacatccattccgtggcaacatctaaatttattgctactaaataaaaatcgttgcaataacctattactacgctatttattaccacgactagcaacaattttaaaattgtggcaacatgtatctattgtcataattttagtattgatgccacgtttttttttcgtagcatcaaatgatttttctagtagtgtacctaagtacacttatattttgcactatgtgactattgcttctgtttttataaatatgatttctattttgcagacaaaacaaataatatcttcaatataatgttaagtttgaacccgtcacgttcaaagatgaacatgtacattcatgcatttgcaaaaaggtgaacctacccatcggacaaggtgggtcgatcgacccagctatagcccgtgtcacccccacaccccacatagacacctctagccctcctagcagcatatcctgtcaacccaccagcctgataagtcaacaactgcccatcatcaacgttagtcacgtactccctttgtcccaaaaagagacaactcctagcttcccaatgcataattaaaagagaggataaaggaccaaaacatccctcataaatagcaaattagtattgatggataggtagataaggggtattgaagaaataaaatttttcgatttgtagttgatttattttgggacaaagtttaaattacagaagttgatttattttgggacggaggtagtacgtctcacgtacatggaacgatcaacgtctttcaactccgattggcatcactgttggagttggatggttcgtcttgcaaccaacgccgatgttataccgccgttctgcctgttattttggtgtatggtgaatgttatggagtattgcttcatttttaaatgaaaggcaccatcttagattttttttcctttagttgattggttgtagtactatattttctaagttattataaaataaatatgcgatatatatttgattgccattatcgagttagtatatcttcactctgtttatattttaaagctgtgtactcctagctatagcactaaagaccgaacttagtatggactaattacagcgataaccatcggtaattgctactactccatgcagtacttggtttccatatttttgcatgcgtcggtcgttggaggcaagcaagcaagctgcagcgtcgtcagaggtagacgcatcgatgttgttcttccatgtccttcgaatcttcatgattgccgctctctgcttaattactgttctcttcacgcacaccgtccaaatcccatccatctatccatccgtccacacacctgcaagtttaaattcccatgcagttactacatgaacagtactgctgtcaagtttaattaatttcgcgccgctcctccttctgcctactccctccccggcaccgctcctccttctgcctactccctcccccggcaccactccgtcctcctccgcttgctccctcccccggcgccgctccctcccccagcgcccgttagtcctcctccgcccgctcatgcagctccttccctacacacgctcgctcgcccgcgccgctcctcattctgccgttcgccgctcacgcctgtgcctgctcgcttgcacgccgctccttccatccacaccgccggtcgccggttgtttgccgctcctgcttccaccgcccgccgttcgctgctccttcctcactaggagtagacgtggtgctaacatctccaaacgtcattcatcccatccccacccctatccattctaccaaacaaaaaactagcatcatctcattttataaaccaaacaagtatgtgagatcacccaatccctaaaatcagggatggtttcatcctatcccacatagtccccaaacaaaacacatgcttagttgtacgcaaaacgagaaagcttatgagcacatggtttataactatcataaactcaaaattttggtttttttgaaagaaactaattatatgtagaaaagttttttttaaaaaaataaacatagtttaacagtttagaaaacgtactaacagaaaatgagaaagttaccgctcagatcttagacttaactccatagactcatatgaaaggtcactcataaattatttttcacgaataagctgtttggtatataaatcagctctcggtcaaccgatgaggttgtactttggatacatgtgtgcgagtgcatctttcgtgtataacgtggccctgttcttcccctccccacacacatgaatgtgtgtgtatttaaacggcttttggggggtcacctttcgcaggtactataccccaagagctgaaaaaattgcaaggccggggcttagccatatctgctagcagaaacctgtaggctggatcatgtaccagctgcatttgatgcataccctatgctttagctaaggaggagtacgatcgattcatcaatatcgctcgatcggtgacgacgtcgtccctgcgacatcagatcgtactactgctacagtacagcttttgcctgttccaatcactaaccagcctgcctctctctctctctctgccatggatggctagctagctagatcgatctatcgatgcagagtgattagctagctagctagaattggtgaattgtggtgacgacgagatcgttagcaacagtggccacgagtcaagatgctgtatatatgtatggatgagtcatcagtgtgatgcatgatctcacatctcgtcactgatgatctccagcttgagcttgcgctgaggtgagctgagctacactgctgcttctttgaccttctccatcgatcgaatcccgtggtgataaactgttaactgaggtaattgtaactactgcagcttcgtctctctctctctctctctcacgaaagatgcgtgatgctgatgcatatgcggttttttggatgtactgtttggacggttgcatactgtgcccgttcaatgtcagcatctccatcttcatatgttgctgccccgcctcatctcgatcgccaacttctattgtttcgcttgtgcttatacttataagttaaaatttaaattttaaaatttagttttgaagttaattttaagattttttttatcatagtttatttcacaccattatttgcttttcagtagtttaataacatataaataaaagttatatttataggttagttttgagagcactgctcccgtccagcaaacggtacccccaggtaccggtacccctggtacgaaacttaatttgaccattgaattagagcggggcacgatcgggattgaacttaatctcgcgaggactcagtctcctgcccatgcgctgcatccgcatctgaagtctacgccgtgtcaccgccgcaatcctttcgccctactccgacgcggtgtccaagtgccgtcctcttccggcctctgatgcggtggtgtggcggctcgcctctcggctgcccctgtgcggtacggcagctcgtccttcgtccacggtcacaacttgtcccctcccctccatcctctatgcatctcggctggtggcacctacgcagtctccggcacaggatcacaacaccctgagtttctttacggaagatgtatgagagagatgaagtatttctttcctgctggacattgctttgctgctatattcattggaagaatctgctatgttgatgggagaggctgagtttgatttatgttgtgtgccaagttctggacctagttccttgtcttttgatatatgtaatgaacctacttgattttgctgaaagtatgaatgtaatagtagtaaaaaagtagatgttctgaaagtttgtagtttcttgctctgatgtgtaaactgttctttcgttgtagaccttaagcttactgtttcatcttaaacaaaattaacatcggcggtcattgagcaaattgtcaactatcttgaataaaagggacactattacaactagtgatcccataaataaacttctgaaattcttcgatctcttttctttgcttgcccaatttcttcttgcttgtgcgatccatggccaaaagcctttcagccatctcaatatctagcttcgttttttcttctttctgtcccctccttctaggtttgctaatgctcgcgatccaatgcataccacagcgatgcgattccctgaacaaaggcttgcgatggcgtcggtagacgagctgtcgaggccatattcgccgcgctgagctagtcgccatggtcacctcttcttgttggtgcattgaggtcatcatcatccaggggtagatcgactcccagaaatcggcggcggccggacctggaccggctacgggaagggcaagttgggaatgggcaggttggcgacggttggttgcagtgagggaggaagcgaagtccggcgagattggctgtgccgccgccagggacgacggaaggggatcgggaagagacagattaccgggtcagggacttgtaccgtctctatgaaaattgactaaccacgtaaaaatccaattctgcccttccactagttccatacacgcgaacaaagggggaggtaccctgcaccggattcctgtacctcgcggtaccgatgattgtgggtcgtttgatctggctgaatggacggttacgattgcagtaccgcgtggtaccaaaaattctgctggacagtaaaaaatctctttgatttgctaataagcagtatgaataaacatatgcataagcgaaaggctaggtgctactacttctactgtggaagtgctcatggaggggggccgaatggccgatcgatcgagaaagcattcatccattccattctctcgctctctcaaaagttgcaatcttttttttttctcctcttcttctttttctttttcgttttccagctcatctctgatggatcatctctctctccccgtgtggtaattccgatgtgatcgatgacgcgtgcatgcgtcggagtaggagtacagcctctgttgttctttttggtcttcttcttctacttcctcccaaaaatgcgttgtgagcgagaaaaagagaagcttttttttggtgtgcgtgagtgtgcaactctcaatatttgttgcccgaaatctttcgagtttgcgtctttttgggcttacactgtcccttttttatcgctgcgtccaatcctaatccactatttatgcctaattaattactccgtctgttcttgaatatgacaacttaacttaagtagtggattgaaccttacgtggtactgtactatatatctagacatacattatatctagatatattgtaccaggtaatatctcatatagtactaggatgttatattctctggtactctctaccggtagtacagtaggaatggtctgaattgttcgttattaagggtaaattataaatttactaatataatgattacggaatactttattatttatgttttttttgtctaaatcaatttatggtcatccattttattggcatcactcatattttatcgaaaagaaaaataaaagagaaagaagatttagtcactaataaatgacgattataccttacacctattttttttacaataatgctccctcaaaatttctataaccactaactgaaatggtaatataaatagatctaaaccactagataaaaaagataaactgttcatattgctttctatcagtagcctgggattgggacggaggaagcgaagagagagaaagagagaggtggttttgttttgtttgtccggtaatggctgccgcattggtggtggtggcctcctctcctcttcttttatttcgaacgcgacgccacccacgcgcctccccctcccccctgcggtttccctctcttattcaaaacctgtctcgattctcactcactctcactcactcggactcctcacccgctagctaccccggagcgcgccgcgccaccgctcgacagcggcgagatgggcaaggcggcgcggtggttccgcaacatgtggggaggagggaggaaggagcagaagggcgaggcgccggcgagtggggggaagaggtggagcttcgggaagtcgtcgagggactcggcggaggccgcggcggctgctgctgcggcggcggcggaggcttccgggggcaatgcggcgatcgccagggcggccgaggcggcgtggctcaggtcggtgtacgccgacacggagcgggagcagagcaagcacgccatcgccgtcgccgcggccaccgcggcggcggctgatgccgccgtggcggccgctcaggccgccgtcgccgtcgtgcggcttactagcaagggccgctcggctcccgtcctcgccgccaccgtcgccggcgacacgcgcagccttgccgccgccgccgtcagaatccagacggcattcagaggcttcctggtaagcaacgggtgctcgtcttcttgctctggtttcgtcgtcgtcgtcgtcgccattgtcgttaatcatggcgtgtgttcgtgcaggcgaagaaggcgctgcgagcgctcaaggcgctggtgaagctgcaggcgctggtgcgcggctacctcgttcgccggcaggccgccgccacgctgcagagcatgcaggcgctcgtccgcgcccaggccactgtccgcgcccaccgcagtggcgccggcgccgccgccaatctcccgcacctccaccacgctcccttctggccccgccgctcgctggtacgccgctggctaaatctcgccgacgacatcgccatgtatatgttcgatgttgacgttgtgtgttggcgatggatgcagcaggagaggtgcgccggcgacgacacgaggagcgagcacggtgtggcggcgtacagccggcggctgtcggcgagcatcgagtcgtcgtcgtacgggtacgaccggagccccaagatcgtggaggtggacaccgggaggcccaagtcgcggtcgtcgtcgtcgcggcgggcgagctccccgctgctgctcgacgccgctgggtgcgcgagcggcggcgaggactggtgcgccaactccatgtcgtcgccgctcccgtgctacctccccggcggcgcgccgccgccccgcatcgccgtcccgacgtcgcgccacttccccgactacgactggtgcgcgctggagaaggcccggccggcgacggcgcagagcacgccgcggtacgcgcacgcgccgccgacgccgaccaagagcgtgtgcggcggcggcggcggcggcggcatccactcgtcgccgctcaactgcccgaactacatgtccaacacgcagtcgttcgaggcgaaggtgcgttcgcagagcgcgccgaagcagcggccggagaccggcggcgccggcgccggcggcggccggaagcgggtgccgctgagcgaggtggtggtggtggagtccagggcgagcttgagcggcgtgggcatgcagcgctcgtgcaaccgggtgcaggaggcgttcaacttcaagacggccgtcgtcggccgcctcgaccgctcgtcggagtccggcgagaacgaccgccacgcgttcttgcagaggaggtggtgataacgtcatccgagcaatccatgggaatgaatgagtgagacgacgaggagagctttttgagttggtaattagaaataagaatgcgttttaatgtgttcttgggagctctctcgtttttatttttcatttttgtttcttttttttttgcttttaatttgtgatcaatcatgtgggtttctgttcttttctgaactgtttttcatcctctttttttgtgtgtgttaatgggtgccaaactagtgtgtatgaggaaaatttgattcatactacacttggatgtaaattcttgctagctattctctctgtcccaaaatgaaacctagctgttgtcttgttatttggatggttcttaaatgttttatcattttttaaaattaagatattacaaatacttgaattatgtgaaactattaaagaaaaactaaagctccgggtaaatttgttgaataaaaagcacaatttagattagtctcggattcatgaagtcatgatcctgttctccgacactgggacagtagcatgggaagtgggaccaattatgaatgattttgtgtgcttgttttggttagcttccaggctttcttgacatccaaatctaggatatgtagtactactactaatcactttgttgtggaaaaaaatataggagtatattagttatatgatttcgacaaaactgagggagaaactaatcagtgtatatgataaatgtgctctataggaaaatgcaataatcgagacaagaatggatacatgggttttatataacctggtttattcgaagtgttctataatgggctttattcataagtagtaaaaattaaatctagaccgtctttttcttctaatatatattgtaatgtatatgtaccactatctcaattactgataatagaatatttttctattgatagtataactcataaatcaatatttttctgctggtaataacagtagaatctaagtaacattagtagagaccacatctactcagtttatttaatgttctacaacttatgaagttattagggacggtcatagcacaactcatcgagattttttcatggattgagggagtttgaggtaatggtttgaaggagaccaagacaagtttgcatataacgtggtaacaagattgttttgcccttgggcaggggcagcgggggcgataattatatacacaacaagtaagacggtgatatgagtatattagagtcacgcctgtgatggaaccagaatcttattcctaagcctagtgctaaattagtattatttatataattttatcttcatgttctaatttttagaattttaaagtacaattttaatagatatttcaggtcgggagtgggattgcacaaccctactcctatatctgcctctaagtcacaccatttggcagatacatctagggcatgtttggctgtcgttcccgcggcagcgctgctgctgcagcgcttgtgttgtgcggttgcagttttgctgctgctagctatcgtgcagctgcaaaaaataccagccgaacatgcccttaaacctttgaattttctctaattgagaacactcagattagttttgaatttaaaattttattcccacatggaccattcctttcattatttagcaaccatttaaatagctctatctgcttgtgattctttcaattctctagcaagaaccaatagcctattagtttcgcttgtacttatacatacaagcaaaaatttaaattttaaccttaattttgaagttaatttggtgactttttcattgtagtttatcttcaaacatttgctttcaaatcactaaggacatatgtatataaaacttttacctataaattatatttggtagctaataagtaataagccacactgataagtagtataatataagggaaacaatggggttgcaggttttgttttggtctggaattacatttaaggctagttttgaatagcaaaatcgaacatagataattaaatttccacagttttggtctggaattatgtttattatgtgcaaataggagtttttatttgggggagggggagggtcttagtacagtatgtttgaacaagaattacaaaaggccgaaccttttcagaaatttcctgttgtctctctttgccaaagctttctgaccttttttgtgtcacgtgtgctttatatcaaaaactattttgaaccaaagaacaagctttgagtactaagctggaaaaaggaaatgaaatgtcggtaatgggaaatttggatcagtaccaaaattaatgattattctttattccacggtttggtttgtcctaccgttcactcctcctggattaatatgattttcttgattaacttctacataaaaattttttacacaaaacacatatttagtagttggagaaacgtgttcatggataatgaggaattagctattccaaatagctacttactctctccgtcccaaaaagaaaaaaaaagaataatctagatgagaatttaacactacctaggacaataaatttgtacaacctcttatccatatttattatcctgagtggtatcaaatcatcacctatcttgccttcttttttttagatggagagagtagaactcagcctaagatgatggtacgtgatatggtacggcaggagtattaaccttgcaccatgagttgttgaatttttatcaaagtagagaacactgagattagttttgaatttaaaatttttataaccgtacatggaccattccttcattatttagcaatcattcaaattagccccacctgcttgtgattctccaagttctgtaccgagaggtataaagcaagacttcatttggccagtcctcgactgtgattgtggtgcatggaagcaggttttgctgcttgctgttgctgcagccgcagccgagcatcccctctgttcttttagcgaaatgtaacataacaccagctagaagattaattacttttcttttttgatttgaaatgtttattatctgcaaataggagagatcactccgtttttcccttttttgcgaggaaacatctcagtacttttcaacaagaataaaaaaggttgatgttttttctttttttttattggcgtttgagccgcggaaaatttttaaattttatacttaattttaagttgatattgaggtttctattatagtttatttttcagacttagctttattgctatcaataaattacttttaattacttcatgaagttttccacggctcatcaaccatagaccagatgatgagaggctgtcagaaatttccttgtgcacgtctttcactttgccaaagctttctgaccttttcgttccacgtgtgcttcatatcaacaactcttttgaatgaaagaacaaagctttttgggttttatagaagctattactaattgggtagagattgcggtaacgaattaacgatcactacaaacaataaacctatcatgcagctcgtaggctgttattaaccgggtagaaaaatcgaattgaatcctacatgatctactagcattctagctagctaacacacttgtattattaagtacttgcatatactatatagctagattgggcctcttttcataaggtaattagagtatagagattgtgatatgattagaacaaatactaatgagcatagcagctcgtagctatgggcgctgttataaattggaccgcataatcgaattgaatcctagccatatgatctaccaatagcatttttttagagaaaacactaatagcattctagcttgcacaggctgcacagtactctacttatcatttggaattctttctgtagatcctactactatagggtaccatgcatgtagatatttgacctcctcctttagatgagctaccaaagctaatggcatactctctccgtccaaaaaaaaacaaaccctggttttcgtgtctaacgtttgaccgtctgtcttatttaaaaaaattatgaaaaaatattaaaaagataagtcacgcataaagtattaatcatgttttatcatctaacaacaatgaaaatactaattataaaaaatttcatataagacggacagtcaaacgttggcacggaaacccagggtttgccttttttttttgggacgaagggagtgcagtatatatgggcctaccaaaaacactccaagctttgtgcaaagcgagaggctcccatcggatggcctattcagtcaaagaaaaggccaaaatttaaattttcaaatttaattttgacattgattttgagatattttcaacgtaatttctttttcagcattgacttttaagtcaccgagaacacatatattaaagttttacctacaaatttatttttattctctaataagccgttttgacttattacgaaaaaagccaaataatgaggcccaaagactgcacctccatcttttgttagcttagcctagctagtccagctaaaaaagacaatgtatactccatatatcacggtttgttttgaattcagcttgatttgatttgatttgatctcaatagaacatttgagattcgtgcttggatcggagggagaggggaggaggaggatgaggagcggaccacagagacacaaaaactgtgcgcggcgtgacagagagggagtagggagcgctcgtgacgacgcgtggggcatatcagtgtgcatctctctgtcgctcggtcggactccccactgccaacccggacccacctgctccctctcctccaaagcttatccgatctctctttacagaagcgctcccattggcccaatgcccatcgtataatcctaacaataatattatacttatacttcctttatattaagtttatttttagctcatttattttatctcataataattttattttagattaaccattgcattcgattttaaaaataggaatttgattgtattggctgtagataaagttatggatagttgcattggatttgatagattatggacattctagtctttttgttttttattggtatgtgcggaatgagtgaaaaatgaacttattctgagataggggagtactacttttttcttttgcgattagacgggaaacacatatgcacatacaccactgcacaagtaacatcatacacacatccatgcaaatgcattatttaatacatgctctaaaagagatggaaacccacctacatgtgcctaatattaattcgtgggaattataattttaattctggtgggtggaatcatgcactcatgactgctcccccataccactggtgttttcccaaaatctcacactattttattccctcgttaccaaaataagttcattcaaaatacattgatttttaagcagaatttaattttatcttaaaaataggttgaatttcatttctcagtgtatgcatcaagaaattttatttccgatgccccttacttatcaactgtcaatattgttaatgagagtccccctctctgttaacatcttttttagatactagcaggggtgatttcattttaaaacaagggaagcattttaaaattagataaataaattattccgaataaaaataaatttatgattatgaaaatacaaagaccaaacatatgtaatcttagagactatatcaatatccaaaaaactattttaaaaaataatgaagcgagaaattattcacaataaacttataaaaaaataagggtcttaaaaatggataggggtttgttccatatcgacggatttaaattgcctttctagtgcaatttattgatttttttttgttgaaaacatagtgattcaaattcataattgccttattttttttcccaaaggaatgagttgttttgtttgtttgctagtagggctgtatcttttgctcccagcttgttaagttactgcttgtgatcgatttgtcatgtttccggcaactagctccaactcctgactcgggtttgttaagtgggcctaatatgttttcgtttggttgtggggtggtattcaattttcaagcctcctgaggttaattgtagtaaatagttatcgaaaaggattttttttttgccaactcttcaactatatatatatatttttatcaaaacacagtgaggggtccccacggttttgataaaaaaaatagaactaaaataatatacaaaatttggcagatgccaggaaagaaaagaaaagtcaatccatgactcaaatctggctttaaatttcttctccaaaaagaatcaaaaggctgaatttcctgaaaaatcttaaatcacaccgtaaagtcttaaaaaacagaggacgaagataacatcatgcaaaatcgtgatgctggtgctatgttgtcaatatcacacactttcattttctagctatgtatgacacatagccagaaatgcctatataatgtcgtacttagccagaatgcttatatttcaaaatggaaggagtacttatactaatataggagtatatactgacaaatttaactgcaaaagataaaaacaattattaatacatttgcatacatgcaatttaggccccattcgcttcattgtttggaagttacaacttcctcatttttcattagcgcacgtctcaaattgtttaacagagtgttttttttaaaaaaaaaacaaccttgtatatgatagtagaagtttcttttctaaaaaatcaattaaacttgtttttcaagtttatagtaattaatattataattaattatgtgctaatgatttgtcttgttttacatgtcaccaggcccggccctgaggaggtcgagctgtgccaccgcactatgccctcgaagtcgagcggcccaaccccatatatgtatgctatggatataggagcccataggccataggaacttagatttagaaagcccgggagaggaagatatacaacttatttgataagaatgtttttttatgtattacatttgttagaaacatcattatattatcagagttgtattaaagagcctatctttctagcttcgctccgggccactaaattgacaggatcggacctgcatgtcacaaagttaccacaacgaatggccgaaaataactcagcttaggtcgtgttctatagtcccctctcccaattttcacttccttgtttttcgtgcgcacattttccgaaccattaaatggtgtatttttttataaaaaatataggaaaattgcttttaaaattatgttaatctaatttttaaagttttctaaactaatgcttaattatttatgcgctaatgagttatcccctttcctatgcaggggaaaagttcccaatcagcatatcccaacacagccttagtagtagtactccagtttaaaacatggcaaggaaggggttgctttgatactggcacacaaatcatttcatgttccaaatttgaatgtgatgctatccagatccatatgcaccccatccatacattataccaccacttgagcatgtgagatagtagaagttggcctgaacacagtcaggactcaggacccagggagagactctggccactgctgttgcctattgctgctaactgatctagcagcagcagtgaactgaaagtctgaaaatcaccctctattcaaccatccatgcatgttttgctctgtttgtgaggggctacttgctttcttttcagcaatgattaggttctgatttgatagatgaggaggggatagatacggtgatgctgatgctggtgtttgttccctggagtacattggggtagtactgccacatttttgttcttttctcaagattcttgtccttgagctctgttttcctttcaccttgttccaggccggtctctgcacctttccaatcactccgttctttgcatttgccacttgttggttttacatttgacatccttttcaaaggagggactttggagggtttttgaaggaatttgatctaaattcaacaaaaatcattaatacccctaaccttctgtcttagtacgtgttggttggatagagacagagtaacatgtcctaagggttattttcgtcggaaacaagacaatgtcaaaaccggtagagacaattgggcataactcatcgggggttgaacgaattgtgccatttgtagtatctaaacaaacctttgtgttagatcagtttttaagatatggacataaacttatacctcattagaaacacataatttcacaaaaattctaaatatagcttaacatgaatcgatacatctacaagaatcaaagaaaaaatcttgacatttgagatgagaccttataatagtttgcgatgaaacaagtcctaccagttggtcccatgcatgaaccatgggggaagaaaacatatggccaatttggttatcatcaaactttgttacaactggtgtattgtttggttagagaatgagcagtcccaccattttatctacggttaattatgagttatagagcttgtttgggggagcttctagctactgcagcttctctcaaaatcagaagctctcccaaacagtctagcttttggtccaaattctgagaagttgcagttgtagaatccagaaaatgaactagaagtcagaaactgtaaaactcaacttttccagatttttagaagctggctaccaaccacctgcttttcagaatcttaagctcccccaaacaggcccataatgcttattagcgaataaaaaataatttatgattacaatttttatatatgtattattagcgacaaaaagccaagctaaaaaaactactatgataaaaaaaatcaaataagttaactctaaaattaagacttaaaatttaattttgactacaactgataggctgaagagtaaatgatggagcatactctctatatcccataatataaggcatggtcaaaattggcacggtctccaaaactaatttttagcttaaaatttctcatatactataaggtttgtaacaacaaaattataaccatatgaaaataaatttaaatctcaatctattgatataatttttaacaaataaaattcatttcatattatactaaatggtggtcaaatgttttaagggttgaatcttgaaatacgtgcgcgccttatattatgggatggagggagtataaagtaataaaacatgttataccacaactgatgatatctaacctaatcacaaacctaacaaactatgatacgtctaatatttgatgcgtgtgataatatgtggcagataattaaaatcaaggacgctacaatgattcaaaacactcagcacactataaaaaagatcaaatcataattactcttagattatactccatccatctcatattataagggattttggatggatttaacacatcaatagcactgtaaatctggtcagagaaggtgtccaattttatagtactactccctctatcccaaaatatatggcacaaccacttttctatcgtcccatagtataaggcatgcatgcatgcatacatacattaattagcatctcttggtcctataaaattgatttgttttaaatcttatatcatcaaatctcccaatcacattgcttgtatgtatcaaggtgatccaaccaaaaagtcaattaaatgttttttctggtctttgtgtatgagtggttatgccttatattttgggatggagggagtagaatgtatcacatttatctaaaatccctaataatataggatagatggagtatttaattggttggcctgtattgtgaatggatgatggagcagttgggggtggcaatggcattgcttcgatcccagctagggcagcacatggaaagcgtttgaccggtcggcaaaatgcaggggctgcatatgcatgctggctcgtttcaattcaattcggcggctcaggtctcgagccccaactacacctcagatatcactagtgatgctctctgcttgtctagctaatgccaccatcatgcatatcttactcgcataataatatatataggaggaggagagtatctcagtgcttggggagatgggacaagaaaagagcaaatttcgccgaattcgaagcctgaccggaccagacaaggctttgctcgcttgtgttagccccacactgtctgcataggatttgtttatttgagcaattgtttaatccttcgttacaacaataaacctatgataacctgttctttgaagatattacaaccatcttagatgaaaaatatataaaactaaaaagaaaattaaggaaaacggaagagtagagagatggtattacaaatgaccgcagccacaatgctaactaattcccgcatgtccatacggatatggataagtacctgtcatcattttcattcctttgatagattagcaactgacatcactaaataagtcaacaattcgaactataaagtcgacgccatttattggattatcaataacctagctgattagtccttctagatcttgatcaaagatgtcactaataaagtagacatcgacaaagattcatagaagaaaaacaagctctacatatctaatagattcatagcactaaacacgttatttcagaaaatcctaaaaacttatgcttggttagaaaaagagatggaaccccttcccccttgccgttggtgagagggagaccagggatgcaacattgtctcgagagtcatggtgtcgacgagctgttcaatatgtgtaatttgtcgtggatttgggtgacttgttttgattttaaaatgatattggatcaatagtagaaattaggtgtatcaactacgggctttacattttggaataaaaagctattatgataacatagaaactccgtgatttttagaaacttcacaattcttattgaaatttgaacatgttttcgctaaaactaatcaatcttttgctaagtttaaacaaattattttttactcgagatatgtcagaatacactggtacaatattgtataggccatactattagcaatagtgcaatttaatcaaatagtggtaaaaatgaaaggtttggttaactagggttggcagtggcgcaagagatgggtggttcgacttgttcaatttgttatggattttgatgacttattttgattttaaaaagatattggattaatagaaaagtttaggtggatcagtattttactgtatttgtaatgaaaaaaaatattaggataacgccgaaactctgtgatgtttagaaacttcatttttattgaaatttgaacatgttttttttgccaaaactaataaaccttttgctaaatttaaacaaattagtatcttttttttttctcaaggtacacctattgggacccaaaaagtataactttgtgagccctacgatctatgtggaaaaataaaatccaagaaccagcttagtaagtgcctgaaggatctatgttcaaatttcaaaacagagtgagtaatttttagaaccgtgacttgaagatcaaaaactatcaagtgcaacaacaaccttctgggagagacatttgctccggaccaacaaaaaaaatatctcgaggtaccggtacctcacggtaccaaattgttttcaatcgttggatctaacaatgcttatcctgcctagcaagatccaacgatcagaaacgatttagtaccgtgaagtaccggtacctcgagatattttttgttagaccggagcaaatctctttggaagaatttgagccaagtgcccaaacatcattagcacattccaaccacaccaccagtaaaacccatatcatatcaattttagatttttttttaagataatagataaaatctggcatttgctttatcagaaactacactcacttataacatatatttatttcttaggtaaaaaaaaagtataacagtatcagtttcaaataactgcaataaccaatgggccctcacaaatgggaaggagtattttacaacccacaaacagacaaccactgatgcagaggaacgcatcataggatctctcatcatactagcgatctgtgatccgtatatatggccactgattttgtctggagaaaggcaggaatatgggtaactgttatccactgcagtgcctgtcctcagtgtcctggatacacatttacacatactccgttcataaatataaacatttctaaattatttaacacatattaagaataagtggaaagactttcgctcatctcttaaatcaaaatttaaagttttaacttattagattccctttctaagcacctaacaattactgataatgcttagattttcgcacattagaaccggtatcttagaaatacttatattgtgcacaaaatataaattacagatgtggctggctgcatccatcagccagcccagcccgattctgatgctgatcgattgatgaactgaaagctgatgatatcatcttatctcaccaacactcgcacgaggcctgcactgttctacacacagatgttgtgcagccgctagctgcttcttctggcagctagctaagccttcaaatttcaaaaagagacacatggaatcatgcttgcgtggattaaacattgttaagcctgcatctcagatgaacaattatgtacatgttgatcgaaagaaagttggaaaacaagaggaaggagccactgcaagaatgcaggaagaatccaagaatttccaaataataatcaatataatgggatagtatttgtttgtcgcattctctcatctcagaaattccatcctcatagcataggggtaccatattttggatgcctttttttttcctctctctctctctctctcttttcttttgccttaagccatcaaaattcaactgttcatgtcagaatttaactcacatctatggtcctaaaaattcaaaaaactttaccatattattaattgttcacctaagttaaattaaaggcacttcaattcttgtcgtaagtgtgtcatttctttacaactaatgtcacgtactactatagtacttaccacacagtactgcctgttcatacagaagtaattataaacacgatttgaaaatttttaatattgcagcgtgactgatatcatgttccaagttcttcctttgatgtatataggcgatatattaacacctaagtacacgtactttttaaatcttgttaactaagtctgacatggggttagttagttctgcactgtactttcaaaactttgggattctctcatgttttctactactgtatttcatagctactactagcttctaacagttaatatgatcatatagcactaatattttactgctactagatggttttaattattttgttcaaaaatttgtggtgctgcagctgtaacaaaccggcatgcatgacgaacgagatgctggctcttagtgttgtccttaaatttgagcaaattaagtagtaggtgaatcttccacgtagtacgacgccctgagattaacattggatcaggaagctaagcatttaatttactgtgtattattactatatcaggtgtgtacttggttttagtgaagagcagctagatgtacttcagagtgcctaatatgggtagtcttacaaattgagattatataataatatatataaaagaaaaatgttgtttgtgccctgtcactgttgtcgatgcttatgtcgccaaaagatgaggatttttactgtataatctactggtaagtatatatactactgacaagggcaatttaaaaaaatattaaaaaaaagtaccaatttaattaagtatatacggatttatggaatctcggcacgcaatgcacaataggtatacagaggcaattctaccgattttagttttatattgtaatatattcaaatgagagggcaaattaatctaaaccttttgatcatttatactggcagaatactgtaaaagttctcacaactgtttataccgaaccacgagttaaactacatttctgtttccagtgttcaatctctcttgtagttttttatcttttcaactttttgtttaaatataataaaactctaaaaacttgtttataaaagattttttttgccaaaccagctttatgtccttttattaagtacctgaatgatttgtaataattatttgagatacaaatgaattaattaaaaaaatataaagttgaaaaataaattaaaaattactccctccatgctgataatattagtcgttttgaacaagggtaaaatcaatctttaaaatctttgactataaataatttctaaaatatttgtcttaaaaatatgaaaaccatatgtgtagtttagtattaaaaattacttcaataaaatcatatatatttgttgatatttctaaatatattataatagaaatagttgtcaaagctacttttttggagaccgtgcccttgtccaaaacgacaagtattatcaatccagatggagtataagaaatttatatatataattttttgagtaaatatttcttaaaactacaaatattttgattaaactatcgcaaaactacatatttaagatgttacatcataaaactacatatttaatattgaaattatcacaaaattactaattctagagtttaaatcactggcactattgttatgttggagctacaaacgttgttgttttgcgataattggcactaaacctgtagattgggatacattttttactttatttttatttttttttacaaccatcctaaatttgtagtattgtgaaaatttccgcgctaaatgtatagtttgtgatgcaatatgttaaatctacaattttacaataatttcatataagtatctacagttttatgaattttacttaactttttagcaaatactccctccgtactcgtaaaggaaaccgtttaggacaatgtttaagtcaaaccttgggaacataaatcatgaataactctcaagttgttgtgtttgaaaatgtaaaaattatatgaatagatttgtcttgaaaaatgctttcataaaagtatacatatatcacttttcaataaatatttttatagaaacaagaaattaaagttgtgttttggagaccgtgtcgctgttcaaaatgacttcctttacgaacacggagggagtaaatgtttagaagtttgagaagtgtgcccgtaaataggatggttccgttcttttctctctctctccctctctcttttaaaaaagaaaagaacacaaaaagttaaactgcttggatgatagggtagtcttggaggatgacatgtcaaaacgatctaatccggaaataagttctgcagaatttgttttcaacatttatcaagttcagaaattataaaaaatcctcttgtactttaataaaatatttcatccacttagggtgtgcattagcatatgattaaaattaaatagtgggttaatatgatttttaaagaaactttcctatattttttttaaaaaaaacatcgttttatagtttgggcagctagcgcgtgagaaatgagagatttgatattgggaatataaacttaagaatacagccttagtagtataccaccacctttgttgacaggtggtaaatgggtaattggcaggtggtaagtgggttaaattagagttatgtatgacataccatctttgttagcagcaaatctgccatgtaagtactgcactaataatttactctctgttcgaatatgatggagatgaggattaggtaagaacatgtaaaacgagaaatccattattacgtgattaattaagttttaatatttgtaaacttaaaaataattctattcgatattttagaaaaaattctagaaagttttcttacaaaaacacattatttaacggtctgaaaaaaatggctaacacaaaccaagatagaatctactgtacatcattcaaccaacagccaaactttctcaaaggaaaaaaaaaaggaaaaatccggtatggaagcatatgtgcaaaatgtaccacgcatcacacaaggagcagagagacagcattgaagctcataacgacgagccgtacaagtacgaacggtgttgctttgcttgctgcactctgcaagatttatatttgctggcctggtctgatctctctgcaagatttcgtttttatggctcctggggtattaccactgtaggtttaaaacaagcaaagcatgggtcactctgctttcttgtggtccagcttcttctgtgactctgtgtgtgtgtgtgtgtaactactgtttctctagtccttctcggtttccttcaaattttggtccacagtccacacacacaaacaatactgttaaggccaaaaagaaaacattgggaaatgtaagggagagggtagagagaacataagggcaatgtggtcactccatgatactatttcatctatttgactatatgtgtttattttgtaatgacaagttttaaagtgatctctactgatagtgtaatcaatttaaatccattatattttcttatctaattcattatatctatttatacttacaaatttagctactagtactacctttttttctaataacagtaaaactcataaatcgatggtttatatcgtttctaagagtaataatactggtggtagaatattagtaataggccacggtctaaattaaagataagttagagtagaacttctgttcaattgttcttttttctctcttctactcttcttaaatactacgtttacagtctaaatttaacacaagttcagacggttttagcttgtaaatatatcgattttaaacagaagatcatgttcaagaaacatatctgacgcttccattcgttttttttttcttttgattaacaggagaacaaaatatcctataagtttacagagacatagtaatccagcagagagagtaattgctgaagcagcagcaccagttacactgaacaaaaagaagcaaaagattcaatgagatggagattgatcatgtagccgaattaatacttttttccatgagcaatgcttcaatcagagacatttgaaaggactcccaattgattagccatatctgcaggcataacaaactttacatattcttttttcccttctgaattgtagtacattacatgagtttcatcaaccaattgtaggcttgttcaaatttcactgtcatccccaagcttaacccgggtgcattggttatttattgttgttgcacaaaagaatgcttaatgcactgtgctgatttctctgtctgcctgttcaacatatctactcggagttaagagcctatttttcagtcaggaccatctctgtgagagagacagccagcacaaacaattgtctgaaatgtgaaagaaaatctgttcatccaggatgcgtttcagtggccttcacttctctgctcagctataactaccatggacaccaaatggttcaagaatttgccaatgtgcaaagctcaggataccatgaaagttattctaccaatggtcaaatgcgataagtttcgaacattgggaatatagaatatttggaacacaggaatccaatatgaatttcatggttctcgctcctgtagaattcatgtgaaataacgattcaaaaaagaaagaattcatgtgaaagttcttatttccaattgggctataatctcttcatctgaaaacaacatgggtagtcaccttgtttgacaactagtgccattgaacactttgtcaataaatcatgtgaaaatttgcactactattaatctgtacaatcgtacatggcacacacaatcatacactcctgaattctgacctgcacctcctgatcacatagtttggctgatgaacaggtgagaattaaacgggcaggcatacttcctgcaattcagtgtgaggaaatcaaagggaatgtgctgttggtgtacctgaaaaaggaaagataatatacagtatacaaactccacaatcattttttttctcagaagcatgtgagagagaaataccttgcaaaaatgtatcaggaaatgtcaggctctgaattcatcagttctctcttcctccattcctcccaacaagagaatttactgcaaaacaacatatggccactccctctcagttctcaaggcacactctatttatgaattccccttatctgaatcacaaatactagtggctgctcctgctcagttcctaccagaattcagattttgcgcacacaaccaaagcctgcattttcatgtgactttgtcatggcaggaagcaacatcataataagttgctgaaatgaagatgtagggaggatggtacagcgatgatggggtgcagcaggaattgaaagcctgggatcattttctgacgaagcctgcagtgaattgatcaagagcctgccttatgttgctatgcaggtagtagtagacatgcaaaacgttggtaaaatgactgcctaattaaatggtttgcaagatcgaaggagaaatttggaagacaaatttacttatggttgcattgcgagctctggattagcattgcagctatgaaaaccaaaagaaaaaaaaaactcccaaatctctccacaggtaggatgaaaatggaacaggtatttcctgcccggccgccagaccagagactcgtgggaaggatatgaaagagaaatggggtttgaatccaaatccacaaaaaatattgattaggatgtgaaaatagttgtattcgtccgtttatcccgtattatcaaacatatatgaaaatttattctgaatcaacctacaaacataatggtacaatggttaatcactattttataagctcacaagtaatattacataattttttccttgatgtatcttctttaaaactctaattgcctccctagacttaatatctatgaatcaaagatacaatagaaattcgttcccgaatctgactcagaggacaaaaaaatatgagataagataaaggatgagtgaaacgttatccgggactatccgtacctggttctaaatttaaaggaaaatataggttaatatacgagaatgtcgtgatccaatcgttcctgacctaattttaccaccacaggaagtcccacattctcctgtctgttcaaaatttccgctacttttctaaaatattgacttttcatttcccatgtcattcgaaatgcatcataatacatagagctaacttcatattggaagagattgatcatttgcatgtaccacttccctttttctccctttgtatacatggcataaggttttatggggaatatgtcacatacaaataatataatccccatttttatacttctgcaattttttttcttgtgatagaaaacccaatttttttaatgagttgagggagttggttttgttagcagagaagaagttgtaaattgggatttatcgggccccatatcagaggtaggcccaagcggggaggaaggaggcaagtggagaaggggaggaataggatacaaagaagtgaggggataaggtggaggaagtggagcccactaacatgtgggtcctactattttttaatcttcttatttgactgatatgtggacccacatattttgttttattttttaaattattaaattttgcttcatgtgtcttgtagatatagaccgagtcaaattagccacgtaagtgccacttcagctgaaatgatagttgaaaccgtcttgggatttattttgcattggttttgatagttgaggaacccgttttatctggttttccggttgaaggacgaaaatcagatttgttgagaaggtaagggacctcagatgaacttattccattgaaaagtcgaatggcaaaaaggtaaacaggcctgaatttgcagcccacaatccctggcccataccaaaccaggcccaaagaaaacgtgccggttgattccccaatatgggcctcaccggcccatcttggcaacagcccattttaccacaggtaggcccaagggtaagcccaacccagtggcgcccttctgctttcattcatagctaagcttccaacggcttcctttcttccctccctcccctcttggcgctctcctcttcgcttcccgccctcctctcctccaatcctcgccgcctcctccccgaaaccctagcggcgctcgacgaggcgggcggaatccggcggatgcgtggagcttcgcggctcgccgtggtggtggggagagaggagggggcgtcttccccggttgacggagtcgcgtccgacgaggcgggattccgggagggaggagagcgcagcacggcgcggcggcggagcgagagattcccgcgcgtgagaggagcgcggaggagggagcttcttcggttcttccccgtggagcgcgcgcggctggagcgagcgagcgaggcggcgtcggatcctctcgcgcacgcggtttcgctggggattggtaagttcgtgctcatcacaacgtttctgatgccattctgcacgcagatgtgctggattggggattcttatggcggcttgattgtgtgcgcgcgcgtgggttggggattctacacgcagatgctggattggggattcttatggcggcttgattgtgtgcatgtggggggtacattgcatattgattatgtgtgtcatcttctcgcggctaatggatttgcattctgcattctacacgcactagattgcgggtggtagactctgttcttatcgtgccttccgcggctaatcgatttggtgggagacaccactgtggcacgattgatgcaaacgaatgctaaatatttggattagttcatcctttatcaatcagctctgctcaattgattgttcaatatgtcttaaatgcttattgggtacttcgtaactccaatgaagttataactatgaaatgtttactgtaaatatcttgtattctgttattatggagtatttatcaaagtacattcaattatcccttctatttttttgcttctaacttatgcatgtgtcctctggagataatattatgtgtcctctatcaagttctaatgactttccttttgatattgtttgatgcagctttattgtgatcctatataagtggtcataaaaatggttgttccacattgctacatttaccttatattgcctcttctatggataacaaatgcatccgccgttaccatcttcaatgtgaattatatgcccatggaagacaaggtcaaaggccgcaaattatcagtagctgatatccacctaggtggaaatgtacttcaatctgggtgaggaactttacatgatctatgttctctctttctctctctctctatatatatatagatcaaccgtttgtgcacttactgaattctaactttggttgcaacaattcatttcaggaactattatgctgaactgatacttggtgagccaccaaaaaagttcattgtgttgattgacaccacatctaatcttctgtgggttaattctatatcttgtaaagattgccctacaaaaagtgcatccagagtaattatctactgctttatttttcttaacctaacaggtatttggaggtgactaaatattctgaaccaattacacttgtgtaggtcctgagtttctatgatctggagaattcacagactggacaacttttaccatgtagtgatgttttctgcaaacacctatccagctccacatctattccatgccaaaaagaccatccatgcattcactttgaaaagtatggcactgaaaatttgctccacggaaaaattgtccaagattttcttgtacttgaaattgtcatcaaccattacaaaacaagcaaagtcagaactaaagttcaatttggaagcatttctcaacacttgaaatccttatcctcaagctttacagttgatggtgtgatgggcttggggccatccaatacttctctggtgtaccagctggcaaagtcccaaaaatggaagaaaatgtttgctcactgccttgatggcaaaaggagtgggggcatatttgtgttaggccatattgtgggtccaaaagttagaaaaactcctctggatcaaacaaggtacttgacattgttgtttaatatgactgtggtgtagatgtattcttaattgcgaggtgatattgactatggagtatttgccaacgctgtagttctaggtaccgaactactttgctggaaataactgtaggagaaacttctctaagcctttcagctggaaatgttgagataaaaagtcaaaacatgacaatattggaaactggttctctgatttcttacctgccagagaaagtataccagtcgtttctagattctgtaagaaaattcactttcctctttcagcaccctttgctacattcattttacttgtcaatatttattgtcatttttctgtacagatattttctgatcttgaggatatcagtgtcataaacattggaggctattcatgtttccactatgaacgaaggtaaatatgtttatgattttagagattattttttcttcttcggaaaaaatggcatgtgctttctaagttcttaggaaacattaatggtctatccttttttttgccctacattaacatcatgttccatgagataagaatgtagtttgttctataggtaatctgttcaagtaattagatatattaaattttcttgctgatagtgatagattaactttttagcaatatatgaacatctttttgatacattttggtgttgattgcacaatcttcaccaataaattgttcaaagtcacagaataacctcctctctctcactggtctggggagtggcgacatgttttgacttaatggggctactagtcctctcagtttttcatcttgggaacaagcgtaccagtttagctagatccatcaaacaaccagataactaatcaacatgttgtttttgttagtattgatgctaggtttccagaggttgtatttcacttcaaggaactgcttactttgcgagtctaccctcatgaatatatgtttcacaatatggaggtatttcgtaaagaaactatgctgttgctcaaatatgcactgagaaaatattgtgatgtatattgtgttataaactgtttctctttaggagcactattactgtcttgggtttttgagttcagaacaaaggaatcatcgagagaaggacttgttcattctgggcggcaagttactaagcctgtactagaattgtactatttgatggtttgcatatttgacttggtggtaggtggtaactgcttcttgcgattataaacctgtggtgcaggaaatttgttcactgataaagttgttgtatatgacttggataatatgatggttggatggaccgaatttgattgtaagtcctgtcaacgttttagcttcattgactttcaaactgcaaccagtaaaatgttgttttataccaggttctttcgaatattgtgtgcactgtatctgttcaggtaaatccagtgtgcatgtgagagacgaaccgacaggaaaaatatatgaagttggatcgcacaggatgaactccgatgtgaagtgggatgatgaagacgtgtggagccatgatagagtgaagttggaaactgaacatacaactccagctgataacacgtctgagaaaacagaagttcacagtggactgctttcacgttcaagaaccaggttgcttgcgatgattggtgctctggtgtgttacgcgagacggtcaataaccaagctgtttgcgatgattggtgcgaccatttgttacgggattctcttggccacgttgttcctctgcaccaccttccgtcgatctaccagctggagaaatatgagtatgctgaaatggttgttggctctagttgtgggggagattttggttatcattgtagggttcatagttttgtagacaaagcacatagacattgtttcccacagatatacagttttgaagaaaaagttttacacgtagtggatgacacatacaactgcaaacagccagtttgtatagtaccgcacaaaacactgaaacagggggtagagaaagttaactgtacatatttccttcctgttaaaatttgaatgttccattgattgtaaaactgaaacgaggtttgaataatggttggattgagcctgctgcctgcagtgcaaaatcgtgttcagttttggttgtgaaattggtatctgtaacttgcaatgtttgccgtattcgagaagcttttgtttgtgtaagatcatctgatgctgttcgtcttgtgaataacaataaaatctttgatgatatcattgatatgtatatatacttagaaaaaatgccaaagcattacaacgggtaaatgatattttaattttattatcgttatatggtttagctagggtaaaattcactgtgtgaatttgcatgaatattttttaaagaaaatcatagactgtaattaggagtttgtatttcatctcaagttagcatgcgggtttttttaaaagagatttcttatatgactctttttgtattttcaaaaacaaacaagcttaaaattcaactcaaatagggatatgcatttccaaaagccgcagagaaattaaaaaccgactcaaacgaggtaccataatagtaatagagattactttacattacatcgttatgatctcttgttggctagagatgagaggatgaatgtaacaggactgcaaagaggacggaggaagcgggcgagttcatcaatggtgaatccgaatccgaatgcatcgtccgcgagcagcagcgttcccacgctatggaagagccaggcggcggaggcggcgccgagcgtcaagtagtggtgcacgccggcgacgccgcggcggtcggcgaggcgaagggtgacgacggcggccgtggtgctgagccagtagagcaggtttcccgccaagaagtagcgccaccacatcccctgcatcctcgccgcgtcggcctcggcggcggccggcgttagtgcggttgggccgccgcagagcgggcgtcggggcccttggccaggtggcggcgcaggcattcttggtgcacggcgcggcggcggcagcacgccggcgtggccagcgtgtcgcccaccttgaactcgccgaggcaggcgtggcaccaccgctcggcctccgctccggtgtgcctcgggcagagcggcagcacgacgaccgcgccgtcgtcgtcggtcgccggtggcaggtacagctgcaccggcagccattcttgcgtggacgggcgttcgtcgtacacgccaaggtatcgcacgtcgacgaggaggaggtggagtgcgccgccggcgccatcgccggcgacgtcggtggcgaaggagcatagctcgtcctcgaggcggctgccgtcggcggggaggtcgaggaagcggcagagtgagaaggcgagccagcgccaggggacggacgcggccggcgtgggctcctgcagggcgaagcgcaggtcgacgacggcgtgggcgtcggcgccgctgccggcaggagggtggatgccgaggcggacgacgatttgcttggccaccgcctccgcgtcgtcgccatcgtcctctcgcgccacgccgaccgtgccgatggtgaccgtggcgttgttgtagtgcacgtgcaccacgcgggtcgccgccggcgacgatgccatcgccgtgttccgccgtgtgcggtcgcttattagggatacataataataataataattgtagttgatattaatttgtcgaaagagacgtattgtgttggagtcggttttacaatttacatcagatcgattgaacatagtactacagtaatttctcctgatccgtttagactttagagatggttttcgtggatatcattatcatctattccttccgcccagtaatataaaaaattgttatgccatttttagcaaatattaaggaagtgctgtaggaacaaagcatggagaaacatccaggggtattccggctagctctataaaatgataggctagatgatctaggttcgaagcttcacctcttctaattatttgacattagatcattccctgctatttacatcttttttaaaggaacacagcatgatataaaatatgatggttgggagaataaagtagtaaaaaaagatgtgggtcatctatatggaaccggatcctctgattctacgtcagagggacatccacgtccgatcaccgttcactacgcatccaacggcagcatcatttttaagctcataagcattggattcacaaaatgataaaatagcaagaaatcttagccattgaaatgatcggaatcttctagaagttgtaaaatacagagagaaggaagagtttgagccactcattgcgtctcattggttatctcatgttggcctcccaaagaagcctagggctggcttggcgtagccaatcaacccaaacgattcttagaatatactccatcagtccagaatataagaagttttagagttgaacacagttattaagaaagtaggtagaagtgagtagtggaggatcgtgattggatgagtagtggaggtagatggaaaaagtgaatggtggagggttgtgattggttgggaagagattattggcgaagaagttgttatattttgggataaatcctgatggctaaaaagttgttatattttgggacaaaggaagtatgaccaattaaataattttagaagagggaaaattattctacatataacactttatcagtcagcaacaatcaaaacaaatatgtagaaaaaaagttaacatctcaaagcttataacataattacaattatgatgtgcaattttactagacccaggatatttggaaccaaggtagtagtgaaatttaattttgattcttacaataatatcacaagtttagcataattatagtaaattatttatttccattacaatatgtatttattacatatcaaaacagtatagtatttgtattgatcctacacttccgaccaaatactttcttcgaatattaatcaagtatgtaaaacaaaaatatattttctaatagtgggggataaacatatttataatataatatgatgataattgggttacacagcaatagagataacatgattgcaaggtggtggcccaagcagtagcaaaaaaagacacttacagtcgtgcgaataaaaacaggaaacaccaaggaaaagataaatacaaaccctaagtctatacattaattattggtttagctgaatggtgaaaaaattattgttaattgtaataacagctaatagataggttatagtcgcgcgaacgtgcatcattcactagttgctttgaaacactaacagaaagggataaattgattgcgcgacgaaaaaaaaatatactgttatataaaaaagaatactagcttggaaattgttcacgcttagaaaaaatgatacaggccctcggcaggttttttctttctttctttcttcaaatgcaacacaaaaactctcttatgaacgcgcatggatctttcttcaaaatacaacacaaacacatacgcccatataaacgcgtacatccgtgcatatcatagtcaaaaatgaaccacgcaggcaaattaacgttgttatctatacgctctgtttcaattgacgcactagtgatcaatatcgatacatacattgttcaccaatcctcgatatataggatggtgacgcgcctcgctaaaggacgttggcctctctgcagcaaagacgtggcaaacaacgaattgaatgtgaggttgggaatttgtttgtgccggccggttacaatggaagagaacagcggtggtggaacagtctgatggattttaaacactgcaaaccagacacagatgcatagaattcctagagtcattttagtgcatcgtatcttgaaatcagtaacgtgctaagcatcatccactgtaggaaaaaaaatcatggccagaagtatccgaaaacaaaagggagtatacatttctcgcctacaaacatttcatgcgtacaatgcaaatgtttcacatcgtttgtacccatagagcatttcagattcagcattcctgttagatgggcaaacccaaattcctgaagctgctgaacagtctatgtctagtagcgtccaggttgacccattgatgtaccttgcttcattctacattgcatctcccagataggcgttgcaggcttgcagcacagggtgtcctctaggttagatctattgactgagtctgtagctccttcctctgaaggcgcctgatccggtgttggcggccgcgggtcggaccggagcgttcgcctgcacacctattctgaatcgagcaacaatcttatgtctgtacagcagttaaggaaccatggagcgtgtaccatcgaaaatatagtagtagtagctattgaacatggattgaaatgctttggccatgaacccatataaaaaaggatacacccacattggtgtcttcaggtagttctttccggtggctagcgggtgcaacactgagaggaagtagtacgtgtgtccaacgagaattcccagaaggccagggagtatctctgagccaaatatcacatccaacccaagcattgcccatggtagataaaaggactgcagaaatggagtatattaaccacaatcaaacataatttgctccacaagacttgaaaccaatattgatgacctataaagggcatcgagttctatatatggtagtagtgaagcttaccctcagttggacaaggccatacatgctgatctgagaattcggatattctctgctccagacataaagaagcatgctgaccatgggtactcccaagaaataaatatccaggaagggaatagctgacaatgcctgatccaagcaagaaagatttatatgtagtatgtgagtccaatgaattgaatttttaaggtctgattaagctgctaaaaatacagtacaagctagcactgaccagcagtgatatggcaccaaatatcatcatccacaagaaatcagctgtgcgcttttcaaatgcacccttttctaactgcacgccgtatcttgctctgcatgcccaaacacacaattgattcaaccaatggctgcaagtttacttattgtaatactctgcatgctttcaaacacacaattgatttcaacaagacttacatcatcagaaggcgaatcccaaagttgatagaaaacttgcccaggaaaaagaagcttgtaaatagcctccatatctgtaaggcccagaaacagctcttatattgaaagtaaaatagcaggagtgcaacaaattacaggtgccaattgccaacataagcataggacaaactgcaatgcttgattacattggccaaatgctaaacaaatttgttcatagggcattgtgtggacatacaacactatgcacggtatagaaggtgcatgtcgcaactaagtatcagttagtgtttgagaggggaatggggtagacaaacaaatcctcagtcctaatgtgtttttaaaaaattcgggtgcaaaaacaaggggcaacaataaactgtactggtagataacagaacagacaatatataaacatatgctgacctgaaatttcttgaacacaaagggatagtataaggcaagaaaaggtggattcagtatctggagctggcacagtacagtggcaaagaaacacaatgttccatatgccttgcttattggtggaagtgagttgtagtacctgaaaagggaaagtaagtaatcgagtatccagaagcagctgtagcaaagagttatgactttgatgtgttcatgttctagctgtaaacctcgattaactagtaaaaaattacatccatcagtgagcaaaaacaagtgcaattatcaaacaaaatgaatagtttatcaaatatgatctcgttcaaaatttctgattacattgtaaaccaatatgctaaagcatgctcaaagagagactgtcacactaacagcagaggatctaggatgaaaattaccggatgtcctgtacctatcacagttctaaaactaacagtctagttatatgctaacatggtctaagctaatggaattccaaactcagcctgtgtcccgtgtaccaggcaggtactatatatatcaaggatatcaactcaggttatatattccatatacattacagacgaacagtacttcccacgtgtacccgacaatagaaacaaactaacacaattgcaaagcctttataacagaagtgtcactcattgtcgattcagaaattagctcaatacttgtagcaatttcaaaacccatagcagagccccaagcagttaagaatttaacataggaaaacaaaattcagcaaagctaaatgcattttagaaagcgaccaaattatttcaataactttcaactcataccaaaacagcgaccgcctttaatgaccacagatcataagagcatacccaatggccaatgtcaacccatgctaccaagcttcaagccagagtttattacaggctgttgtattcaccgtgtgcaaaatttatcaacaaataagcttataactatccaattgtgcatctaggttttgaagacagtgaaatacttcaacaaataagcttatagctatccaactgtgcatctttatgttttgaaggcagtgaaatactataacatactctataatttatgcgcattggagaatgaatattagcagatatgtattggagaacaaagactgcaactatctaatttaggtctttactagtggaacgaaccgagaagtgtgcttctgactccaaaatttacaaatagcatcagatacaaccttcccaaccaaaacatcaatttgttccaggcgcatgattgtgctttagcaaggagtgtaaactctacaacgacaatacaataatatccacttgtaaacagccaattcatatacctcaattttcatcaagtttgtaaacagccaattcatagacctcaattttcatcaagtgaggccatgccaaggaatccgtcagaacactcctacttcacagttcccaccaatgctaaaattacttgtcataaactcgtcaaaatcatcaaaagtagtgtattaactaataagcttatatccatctaaagacacctgcagttacaacagcccaacccaaccaatcaacccaaaatcctacacgcgatctctaattccgaaccctaagagcccaagtttaaaccactaaattcattgcgccaaaaaaaaaactaaatacaccacaacgacccacgcctctctaaccttgaaaaatgaaactaatcagctatactcacgataaatttagcccgggcccctcctgtaatcccccctaacccaggccaacctcgagtgatctgagacgcggcatcagagactaacagaaacagatcggggggagactgagggaggctcactctgccggggaggacatctcgtcggcggcggcggtggcggcggcggcggtggcggcggcggcggattcgaagcctcctcgactccttctcgtcggcgtcgtgttcgggggagttcgaaaaatcgaagtcgaaggaggagaaaaataataatggggaagtcgcgttcgcttcgtcgccggggcggaaggttccagagtcgagagagagtcgagaaggccagatgggagaggcgggatgggccgtggatcctggatcggacggtcgaggatgctcggacacgtcgacgtgggcgatgcggggaaggcgattggtcggagacgtggatggggcgctgaggtggccggggtggcgtggcagcgggcctcttagccgttggatcagagtgggatcgcttgatcctacggcaggaaacaggaaacactgtacgagcatataccgagagtgaacatagaaataagaaaaatataagaatataatagaattgtatgtcgaaaacacagagaaactccatttataggataatgcttaccatcggccgtccggccagaaagaaaaaatcgagcgtcccaattcaaaagaacaacaatgtagatgcatggtgaaccagttcgatagatgtactcacaagccaagggagcgtgcatgcaagcatgtttcaaaatttaaattttttttctcttaaactatttatttgaatttctaactaattatattattagattcattgcaattaaatctttgtaacaagatatcacatgactacattccgatgacttttttttactttttaaatgttgcatacattgttaatgaaatgttccaacaagtatctgttgatgtttcactaatgcatttgcaatatttcatattatcttttttatatgtttcagcgaatacttttttatgtttcatcaataataataattcgatgtttcaagctaaatataaaaaatgtttcactagtcgggacataatgtttcatgtaataatgattattgttgcagtcaatactttttatatgttgcatctcttcgaaacaatttatgaaataggttgaaacatctccacaagtgatgaaacaaatttattaagtatttgtacaaaatattttatgtttcatatgattttttttatgtttcactcattggtatttagtgtttcgtgtagtagttgtgattgcttcatttagtaatttctatatgatgtatttctcttaatctgaaacatttcaccatgtgagttgcaacgtgatgaaacaactttccatgaatggtgaaacaatggttgatttttcgaagcatatgtatatttttattaaaatataactatgtgagattttgttataaatatttaattacgatgaatctaatggtataattgaaacttagataagatatataatttcagagaaaaaaattaggcacatgtaatacgagggagagagagtatgcaagcagcagcagcacaagcaacatgtacagggcaggcaagcaacacggcaagcagcagcatatgcagccaagcaacgcagcaagcagatgtgcggcagtgcgtggttgggcgtccgatatttgtgaaatattggacgtccgacgcgtagcatcctccaaatttataggatgctttgttgtttggaacacaagtttttttttaaagaaaaacacatggatgttatgcctgaatacaagattaaaattctatcctatgataacgagagtgataaaaaacaataacgtcggagagcatatgttttagaatcctttagagatcctatattttcatgggaatgtctaacatgtcagtagtggcagatctgaaagatcatggatcctttaaaaaaaccttgtgaaaacacgctactatgagaaggttttttttttggataaaattttttcgctggtggcacagtctgccgcctgtgacaaataaccaatgaaaatagagccttttcacctgcggacgactagccaccaatgagatcccctcttcacaggtggccatgcttaagacggtaacctatgctaaaaaaatcatcacaagcgatgagattacgctggccgccaaggatgtcgtcatcgttgtcactgagccgcaaccctagccgttgtcaccaccatgggctaacgtcaccgagcctgtgtgcagagtcattgccgaggaccgtcgctgccagatctgatggtcccacacactatcgtcagtcgtcttcttgctccccagccagatcgaccaacggggaggccggggtcaccaaatacccagatccggtggcctcgacctcctcattggttgatgtggtggtggtacttgttgacggcggtttcctcatggcaacatgccacgacagtagcgcgattaggcgttgtgccttaacggcgggtgtagggaaggccaaagatggagtgagaaagatggtaggtatgaggggcaaggcaaccgagggatggagggtgaggcaggaccttttaatatggtgaaattttatcgcgagcgatgctctttacctaccgccagcgaaaacctatttttactagcgatgcttaagaggttcgcctcaaaaaataacatgtccgccaatgaaaatcggctttttctgacggcccatgacccataatcctccaatacatttttataaatgtttgtttcgcttctccgccagaaaagaggcggcatcataaaaagttttttatagtgtaaatcacgtgacaaagagatagaaacgtcggctatttaatagatagataaaataacggtttgtctagttaaatcataaaaataattatttaaaaaaggaaaaagtacgaattaccccctcgaaactaggacgacggcatgaattacccccctaagccacaaaatcagtcattttatacgaactagctataccggacgaataatcccctcgaccgaaaatccaaagcggtatcgtcctacgtggcgtgcgcgtgttaatctagtcagcattttttttaaaaatggtggggcccacctgtcatactctcccatctctctcttcccctcttcctctcaatctctctgtcaccgtctcagatatcgttgggagcgacgagttggtggccgacgatgggcgtggcggtggcggggcgggcggcgagcgcagcggcggggtggtggaggaggaggaggggtggtgttgttgcctccgatgaacgcgatggagatcctgcaggagatggtgcgcgtgctgcgggcggacccgcacgcgttcacgtcggtgctcttcttcctgctctgcccggcatcggtcggggtgcctcctgctgtccaccgccgcgctggagggtgcagccgtgctcccgttcgcgcggaagctactcctcgcggcggtggcgtcggggctcccgctcacgcatttcgtcaggcagctggcgcaccaccttgccgccaccctcatcgcgtccgttgtgtcattctcggcgacattcacgctcctcctcgccacccgcgccgccgttgcgtacgcggtcatggcgtctacgcgggcaagccgctcctcgccggcgccaagcctgcctctcctccttcctcgccctcctcgtcaccgcgtgttccacgctcaagtcgatgctttacccgcccgacattgtcgtctgtgccggcctcctcaccgttctcgccttctccgtggtgggggcagggcaagcggcaggcgtggcgggggcgcggagggcgtggtggagaggtgggcggtggcctgtggccagcgggagtgacggtgcccgtgtccccctgctgtcgcgccgccccgctgcccccgtgttgccgtgccccccccccctgtcgcgacggagggcggtgaagtggcgagggtggaggcggaggtcgttttcgcccttccgctccgagcccccggtggccaccgccaccgcgcccgagctcgtcgtcatcgtcttcaacctgggttcgtcagtctctctgtctctctcaccctctctctcgggctgtcgggaggtcggcgcgcacggcggcgggtcgacatggccgtggccgctgcccattcccgtgctctaccgcagccccccgcacgccgaccgcctgtccgcgcgctgctgccgctgcccactgcccgtcgacgcacgcctgagagagaaaaggggggaggggttgagaggtaatgacatgtgggccctatattttcttttatttctttttgttgattggatttccacatcaacgccacgtgtatgccacgtaggagaaaaacagctcaggattgagtcgggggagtaattcatccggtatcaatagttcgaggtgtaatatgtctggttttgtggttcggtggggggaggggtaattcgtgctttttccttttaaattaataggtatgtactcttcaccgattgcagtagcaccactatgaagagtatgctttaaagagcttaatttacttatagataccaacctcatgcattgcagtgggattttatgagaaacattaatctaacagctgatggctcatagacaatttgatccaatgatagaagcaccagtttgatgatgcattaagctcccttatactccctctgtccctacatatataagggattttaggtgatatgacgattcgtagtcttaggatacgtctcatccattcaaaatcttttatattttgggacgagagaagtaccaattaatgcacctaagtggtggttacatagaaatagaggattagttttcatgtacaatattatatctctgactacttcttctctataattcttcatcatttcagaccctgtttagatcaggggtgaaaaaatttggcgtgtgacatcggatatacggacacacatttaaagtatcaaacgtagactaataacaaaacaaattacagatttccgcctgtaaactgcgagacaaatttattaagcctaattaatctatcattagcaaatgtttactgtagcaccacattatcaaatcatgtaacaattaagcttgaaagattcgtctcgtaatttacacgcaatctatataattagtttttttttagggtttagggttaatactgtatgcatgtgtcgaacagggtgaaaagtttttgcatggcaactaaacagggccttagtcaagtgacaagttactctcatggcacatcattgtgtataggactgaaggaaaccctgctgttggcaagttgtcaatgtctttttctaaaatgggctgcatgttatcaaggtcttttgtcgcattgttgacaaacttgtatatcgccacctacgactccacgggttttcgatgtgactttgtttggcctccattatttacttcttcttgtaccacccttgcctcatagttcattccacatagaatttttacacctttagtgaacttccaagttcgaaggcctccatcactaatatcattaacacagatagtgaaatttagagaattatgggaccgagatgcaagggaaaggagaaagggtatcatgagagcagaaaggctcacaagtgggccaacctcattggcatgtaaaatacatgcatatataaatgtattttcttgaaaatgttacattgaatgacgatattttaagggcttattgggctaaaggtttactctctccgtctcaaaatgaacaaacgggatgtgaaacatcctaatactacgtatgtggacaagcctacaagaaatttcatctcttacattatatgagtaattccatatatttacactatatattgcaaatcttactaggaaagaacgattggttgcctatttgatttcttaaaactgtactagataaattaacacataaataaaataaaaatgaaaaacataagtcacagagaagagatagcatacaaaggagagagatagcaatcaaatgttgaaaaaaaatgttacggcatttcgtgaaaaaacttttaattatataaagattttaaaaaagtcaaataaaactctttttcaagttataataactaatagtgtgctactccctccggactgataatacttatcgttttagacaatgatgaggttaaactttacaatctttgattataaattatttttaaaatatttgtctttcaaatatggtaactacatttatagattagttttaaaaagtcatatatttcttaacacttttatacatattataatgaaaaataatagtcaaagttgtttttttagaccgtgcccttgtccaaaacgataagtattatcaacccagagggagtaatagcttgctctggtttccgtgctcagttgtttgataggaatgagtgcagcctcaggctgtgttcagtggtgggtgttggaaacacattacccacgcacggaaaacggaccgcattagcacgtgattaattaagtattagctatttttttcaaaaatagatcaatacgattttttaagcaactttcgtatataaacttttttaaaaaaacaccgtttagtagtttgaaaaacgtgcgtacagaaaacgagaggggagagttgggaactcatgtaccgaacacaagcctcaggctagattcgattgataagggtaggggtgaaaacagtaacggtaattaccggccgaccggcgttcgttttcgactttctaccggccgagccatatggaaatggtaatcgaccgaaacaaaaatggaaatggtaaaaaatatggaaatgaaaacggaaatggttttgctgttataccgatcgtgtccgtatttaccgtattctcgcggaaattaccgtttcttataatatggtaattaccgtattctaaatatgtcgatattataggacatgtctatacttaacccacagcttatagattgaatgactcttcaataaaatctctaacttttgtacatggctaaaatgaagttaatttataatttatatagtataagcttgaatttatgtatatatatataacatacttatgtaaagttaaatatatgtttttatagtttaatgtttccgtatttgttaccggtttccgatctgtaccgacatgtttccgtccgtattgttccgtttccggttttccgatatttccgatatcgtttttgtttccgactttaccgtttccaatttcgtttccgagaaaaatatggttacggaaatggttgaggctattttccgatcgtttccgaccgttttcatccctagataagggcatcaccaatgtatatttaccaactagtaaataaggtgggacctagtaaaagtaggtatttattgttaaaagtttcacaatgtataactagcagggttcactttctcgccggtaaccgcgcggtaaccgcggttaccgggcttaccgtggggggtcggtaacgaaaaccggcggtagggtttgggcaaattttgctcaaattcaaaaatttgaaaaataatcgaaaaaaatcaaaaaaaaatcatggatgtaaagcttgttttgtatgttgttatggtgaaaaaatttcatcaaaaagatgcaggtaaattcaaatttgagcgcaaaacctattgtgaattataaaaaagaaaaaagattaaatggaatgggccaagtatgcactgttcacgaggcccaataaggcccacaatgggaggaaaatatctttggaagcctctgcttcgtttctctggcgaatcctaccgtttttcccctctctcgcgtagctgcgctcaggaccgaaggggcgacggcgtgcgcccgcgccagatccgccgcctccgcgccggcgaggccggttcccgcgcggtaagcggcggtaaccgcgcggtacgcgacggtaaccgcctgggtcgacgggcaagaggtaatccctccgttttgaaggttttcgcgcggttaggagcggtaaccgtgcggttttgtatggttaccgtcggcttcgtaatctatgagacgatatacgtatgtgcggtaatcgtgtgaaaaccgtggtaaccgtccaccctaccatggttaccgtggcttgaaccgtggtatggtattttttactgtgatatgcatggacatatttggggatttaggtcaatagaacatatttttaccaatatgcatgtgaaatacattgggaatatgagtttatttcggcatttggttgcccgtgcttggctaaaaccatgcatgtgaagtatatttgattgctttggtctatgtacatataggttaaattaaatacgtcatagtatggaagaatttggatgcatgcttaccagtgtacatataattacgtcgtattattgcataatgggaggtatgtttataattagcagtgataatttctcatgcatttgatacagggtggagatgtcagatagtagggaccctgtgtgggagcacggggagaatatcccacctggatggcgctgtaagtattgccatacaaagaggggcggtggtggggcaacaagactaaagcaacacttggctgcaagagggaagggggttacatattgcaattcagtgcctccggatgtccgtgagttcttctgccgtgagttggacaggataaaagatgcaggtgaccagcgtaagagtgatagcggaagaagggttgaagcagcaagggtcaactattatgacctaacaggtgatgccgacgaggaggaacaaatggaagcagccattgcagcctcacgacaagacgaaaactttaggagggatgttgaggagcgtggtggcacttatgagcatggcggtgggagtggatccgctcagccggaggcacggaaaggtagaagtaacccaatcaccaatatgctacgaagggctacgtctcatagggagtcacctgctgtgagagattacaacctagcatctgccaaggcccctgtgcagccacgcattgacacaggattcttcacaaagaaggggaagcaagctaggcaagccattggtgagtcatgggcaaggttcttctttaccgccggcattcctggtagaaacgccgataatccatactttgtgagcgccgttcgggagacacaaaagtggggtacgtatgcatctattaaggaacttctttttttctaactcattgtgcactacttatttcatacgtcaattgtaggtgaaagtgtaccttctccaactggtaacgagatagatggaaaatatcttgattctacagagaaggatgtgaagaagcaatttgataggttcaagaaggattgggatgagtacggtgttactataatgtgtgattcttggacaggtccgacgagtatgtcggtcatcaattttctgatatactgcaatggaataatgtttttccacaagtccattgatgcgaccgggcaaagccaggatgctaactttgtgctgaaggtatgtatggttcatgcaacaaattacttcatcacctgttatcgtcagtgttaggggcatggactaatttttattatgttatctaccaatgcaggagataaggaaggtggtacgcgaaataggctcggagcatgttgttcaaattatcactgacaatggctctaactacaagaaggcgtgcagactactacggcaagaatacaagacaattgtgtggcaaccttgtgtggcacacacagttaacttgatgcttaaggaggttggaaaaatgccagaccacgaaatggtgattgagagtgctaggaaaatttgcagatggctatacaatcataacaagttgcatgctatgatggtcttagctataggtggtgaactggttaagtggaatgctacaaggttcggaacaaactacatgtttctccagagtttccttaggaagcgagatcttttcatgcaatggatggcttcctctgtcttcatgcaaagcaaatttagtgggactttggaaggtagatatgcacatgcatgtctatctagtctgtcttggtgggagaacttagaggcagtagtgaattctgtccaacctatgtactcattccttcggtttgctgacgaggacaagaaccccaatttgagtgaggtacttttgagatatcagttgctcaaaatggagtacgacactctttttgcgaatcaaagggacaagtttgaagcatacatggagatcgtgaacagaaggatgcacgacctaaccaatgagactctcatcaatgccggtaaatattggtcataacataatccacatggcatattatgtaactcttacttaacatgtgccatgttttgtagctgccgcattgaaccctaggacgcactacgcgtattctccaagtgctactgtcttccaagacctccgacaggcattcgagtggatgacggatatcgatacggctgccgccgctttgctggaggttgagatgtaccgacgtaagacgggtgaatttgggagggcactagcaagaaggatggccatagatgggaaaacttcacctggtatgtttctaatcatggaactatgatatatctaattgatcttgatgtattcagaattatgaaatgacatgttacttggcttttgcagcacaatggtggtctatgttcgcctcagacacgccgaatttgaagaagcttgcgttgcgtttggttggtcaatgttgctcctccagtggatgtgaaaggaattggagcacattcgcattcgtacatacgaaggtccgtaatagacttacccacaagaagctcaacaagctagtgtacgtgaactacaaccttcgccttcgaattcagcaagcaaatgcccaaattagggtggaggacgatgatccccttcaaagattagcggacctctcattctatgaaactaacaatcatatcagtgcctggatggacaatgctcgctctaatgcttgccccgaactagatgaagattcagctgagagtgacgctcccctgcctagtcaacttgtgtctgacctagtcaacttggatgacctgcgaaggaccacgggagcttctagtattgctgagtgggctgatacgaatgtaggtgacactcatattgggaaaaggaagactcgaaagccgccaaaagcacgtccatctaaaaaggtaaagggcaagggtccacgatcgactagtgttgatagcgatgaagagacccaaggaagcccagagtaccaagagtccaatgatagtagctcaagaactgaaacagatgacggcgacgatgatggtcaaggaggccaaggcactactaatgtgcctcctaggggtcacacccaacaatcagatcaccacagccccgttcaattcactggtgtgatataattcagttgcaatttcaaccttcatcttccaattcagtactggataattttcttgcaattttttgatttgcaggtgagggcgacttcactcatgctactcaggaccaggatcatggtgctccaagctctcaacgaactaccattgcaccgggagtccgacaacagcaacaattcagtgacatacaacaggatagctctagctcattcagtgcctctagctttgaaagtggctatccaacgtatgtgtacaaccgtccccaagcttctgattatcctgctactacatgggtgtatgaatggcaagagcctcagtggtatgctcaattgtacactcagtggcaaacaacatcatcatggacaggtcaaagttgggaggaatacaaggcggggttgctacattcacatggcttgatgctcatgtccacagaggagtacaatatggcatataatcagtagaatgcgtagctatgcatgtccttgtttatttcctttcattcgaactagaattgtaatcgtggacattatactgtggactctacaatatagagtaggtcatgccgaatttttctgttgtataaccacatcttaattaactaaaatactcacattttagtttttttctattatttttttcatttttcttatttcagttccaacataaactaaaatactcacattttagtttttttctattatttttttcatttttcttatttcagttccaacatatcgcggttaccgtcctcttaccgcggttaccgtaccaaaccgtgcggttaccgtgtccataccgtggatttttaattcaaaaatttgaaaacgaaatttgtgcgatttttcgcggtaaccgcacggttaccgcggtaaccaccataccgcggggggtcggtaaccccccccccccccaaaacggtaaggtgaaccctgataactagtcataaggatcaatacatgaagggagagggatgaggatcaatacatgccaaaagaatcaatgtttttttctccttactagtcccttcttcccaaattgatcatcatgtaatagaatccaaaatttctcaaattgatcatcatataactgtatggacacggatttcatcagagtacaattaatgcagtgtgggagaatgtgtacatgctatggtgtaattggcatggagttttaattgatgtatgcattgtgggagaatgtgtgcatagtgtcttgattgatgtgatttaaattattcttcgtcttggtgcctaaacttatatgatgatcaatttaggaaggagggagtactaggttgcagtgctcttgtttggtaatagctatttactggttccacaatacttaggctccgttcgttccagggttcccaacctccctccctcgttttccacacgcacgcttttcaaactgctaaacggtgcgttttttgcaaaaaaaaatattctatatgaaagttgcttaaaaaatcatattaatccatttttgaaaaaaaaaatagtaaatacttaattaatcatataataataggtgctttgttttgtgttccggggaacccctcctcccgaacacagcattactagtacttggtatgaagattaaaatattgcctattatctggtttgggagcacattgtggatgccctaaaccacaaagaaaggtccaacaaaaatataattccagtaggatttttatatttctactttcagtagtttaaaaaccaagtaaacaaataggaaacaataaaaaagttggcattaaataagtatggaaatttaaatttcagctacgagttataagccagtaagcaaataatagggacgaaagtttggaaggccaattagaagtgccttgtaacccagattgagttttttttagcagctcaatcgcttgcaggaaaactctactactttcatgtactctctgtgtaaaaaatcaacttctatctacaattctactatggtccccatcgtttggcatattcatatgcttatcagccaaaatttgaattttcaacgttaaatttggagctgattttggggtttttatcgaagtttattttttagctttgtttttagatcgctaagaacacatatataaaaattttattcacaaattacttttcgtttgtaaatatgccgtttggcttattccactaatatgccaaacgatggctccagtccagatttttttggggggattttaataaaggaggctgtacgctgtaaaaaaaaatatctcccgtactccgtccgtctacaaaataatctaatatagaatgtgaactatcttttttttaaaaaaagaatgtgaactatcttaaaacaatgaaacaatgaatttagataagtgtttgtctaaatccatggttctattttgtgttaattttttttggaaaacgaggcagtacgtggcaatcacatgatgggagtagatgagaatattttcagtttggatccggtcgtccgtccacggcgcgtttggcaggtcaggtgcatgtgccggaccagcgggcgttcgtacaggcagttgcgatccgattctctgcacccccgatcttatccagacgccacgccccaaccaatcgacatcacacggtacgaaccacggcagtctcgtagtacagcgtacagcctccggtttccgcttctttctttccagcctctttcgtggttagagagaggcagttcctgtattttgggttttgtttatgcagagcatcaccgacgcattgccaaaacatttttaatcccctaaatcttttttaaatctttaatagtatgatttaagggataaaaatatcttttccttcgagacagcttgatttaacttattaaaaaaaaacaggctatgtaacttccaaacaaaactggtctctttgagagacattcctgatacgtggaaaggtggaaagcgagatttaaagagaaggaatgttttctttatataatgagtttaggaatattgttggtcgttaattatatgggattgtgagtggtatataggacaattgttagccatgctcttatcactaattaaaaacatagctttagacctaatttaagggtagattaccgagtactttcttcggtctcaaaataattttattttttacatcttattgtcccagataacttcatcttttaataatttaaaatcgttgtactagagtttgtgaaagtgggaggtttattaaagtgagaaattaactatattaagatttattaaagtggaaggtattctaaattctcttacctttgtattggtgtgtataggatgtgtggaaaataagttatgttagacaaagggagtgcattattaccgtggattaaatattttaataagctaactgcacctgttttttaagttagaatattgtggcatagatatgataaacacgtgacgcgtgctaaaataggagcattgcaaagtttgtgaaaatgtatatgtactatgttcatggtcaattgctcgtatttttgcatgtccgcgtcatgaattagccgacacaaagcttgttccttgctcgctacttaaatctgccttgttgactcgttttcttctgtccagcatccgtgggctccaagaaagccatctagtggatcttcatatcgtcctacccaacgatctgatcgctgctggagaaaaagactttaatcccggttcgcaactgttttagttctggttgtgtaacagggacgtataatccggcatatttattccgggactaaagatacattaaaaaaatgtgtggtatgtgggattcaaacttaagatctctcatctcagcccttacgtgcgctaccatcgcacccactacacatatttgatttggatagagacgttttctttttaaactaaccatggaatcatctttagtccgggctggtaacacgattcaaaattaagatctctcacctcagccctcacgtgcgctaccatcccacccactacacacatttgacttggatagagatgctttctttttaagctagtcatgtagacatctttagtccgggttggtaatagtaggcgggactaaagatggatgattttagtccaaccgggactaaagatcgttgggggcctgacatggcctgacagttattgaaccgttgctaaaataatctttagtcctggttcctatttgaaccaggacaaatatgattttcggcatcggaataaagatcagttctccagtagtagatagatttttagacgaaactcgacgttttggatatagagaaagaagatggaggaagcataaataccggtaataaagtggaaattaatgtgatgaatcactaatacagaaaccgacataggtgtctgctgggaaccagctataggtgccggttttctaaccggcacctattggtcggcaccaatacaaacagccgacacctatgcggaaaatagaaccggcacctttagctttgctcgagccaaaaaaaaaatagagagagccagctcgaattgagccgaactcaccatccacactccatcgtcgttcctcccccgagcccatccctactccccttcatcaccgcctcttggatcaagatcaactccaacaacaaactagtcatcaagaactagcgagtagtacaaagcattaagaactcaacaagaaatcaaaaagagaaactcaagaacacatgtcacaggggtttcaaaaaagaacacatgccactggtagccacctcacccacgccaccgccgtccttttacacactcaccgtcgtcgttgcatggggagggcacggccgctgccgccgtcgaggtgtgccaccgctgcctccgccaagcgggagcccgccgccttctcgctggctctcctcccgctggatctagaggaggggagggtgcggccaccgccaccacctttgccaggcaaccactggccatgagagcccgctgcctctccaccggctcccctgtcgccgaatctagtggaggggagctcgccgtctcccctcccaccggatctagcggaggagagggtacagccaccgctgacacctctgccaggcagccgccggccgcgggagcctgccgtctctcgcctcctccccccactgcctcccctcccgagtgctcgccgccttcgctaggcagccatcagccgcaggagcccgccgccttgaccgggcagccaccgcaagagagagaggggagggagagcgacgtgagagagatgggaggggagggagagagagacgagagagattgagaaggataaggcaaagacgagtagataaggacgcggtgggtgtggtgcgctgatggctcggcttaaagttataggtgctcttttttaaaaaaaagtacctataatatattataagtaccggattttgaatgatacattttaagttgctgtgtactatatatacacgagaaaactcatttatataggatttgttacccataagttaaccgcacatattacataacgctattttttttgagtcggaaatagtacctacaactcctccttcaagatccttaggaattacaaagtcaggtaaagttcatacccattattactacacagttacataacctttaccctttttaagacataaaacaggagataaaaatgctcaaactatttttatcacctgacagtgacacgtggcacgccagaccatcaaacccaatccatctctaatctccatatgatatcccatctataaatttcacccaaaaacctctcctcctccaaaaacaagcagcgatcccaaaaatccaagcagtttcctcctctccaaaccaggctcatctccatctccttccccgcgcgagagagagacccctcaccttcgccatggacggcggcggcggcgcgaagaagagccggaacccgcacaaggcgccggcggactaccgcagcgaccgcaagtcggcctccgggatgagcggcgagcccaagaagggcggccgcggcggcaagttcacctgggagggcgccgacggctacgccgacgaggacctcgacctcatctcccccaagaactccacctcccactccaagtccgccgcttccgccgccgccgccgacagcagcagcaacaagaagtccggcgacgacgagtagtaggcaggcggccgccgcctcccccggtgtcgctcggtcggtgttcatcccctcgcaatcctagctgttcttggaataagtgtgtcgtgttcatcggtagtggttggatcgacgggccatggggatttgtagatatatcatcattatctatcttttaactcttgctaatgttggagtcttcggttcggttctttggcctaaaccgatttatcttttatctcagccgtattagcaattgaaaatcctgcactttggttgaatttgctgctctttgttttcctgatgaatctatcgtcttcagtactcatctgaagatatttgcagctctagttgacgatatttactgaagattgcaggttataaatttaccagatactctaggatcaattaatcctagtgctaccaactctgaattatctgaacagaagatggaagtttcatgaatcggtgatctgatctaatcagtatctgcagtgtgatactgtgaatctgtgatacacaaactgacagtaatgacaagtcgctctcgtgattgcggcatcgcggtccattcattgtccaaggccgataataaaaagaatgattatccgtcatcatccagaaccgataaataaagggaaatgattatccaaaaaaaaatcatctatggtctattgcggtattgcctattggtctctcaagtcaactattcttaaccttttttttctgggcagactgattgcactgcactattgcactactggttttgcgactatcttcagtggacagtggcctgcagcaatgagctgagagaggtaggatctaaccaaaaaaaaaaaacacaccattgtgtttctgtgccagaattttgttggatttttttaataaaaaagttcaattcttgtaagaagtggaattttttttggacgtttcaactaatacaacatattaactactacccttgaaccacacttgacacttcccttcctttttcttctttccagatttatttatttatttattgattcaatagcaacattgaagcatgactgcatgagcagtagacactagactgtggtcgccaatttgtcgccattgacgggttaaagctgtgtatatggccgattttaacttgaaaatatagcagaattcagttcaattcagtttttggttgagctgatcgatctcgatttctggcattcgctgacatgctgttaccattgcacatctgtgaagttatcattgagatgttctaatgtattgaaacaaaagtgtgaccgctttgcacaagttttaaactcgtgtcaataccagagtttacaaaaccgcgcggttactgcggttatcatacatggtaaccttttcagtttttaaaatcatggtatgtctcgcggttaccacgcggttttcgcggtagccaccttaccgcgggggtgcggtaaccgcgccaaaaacaacaaggggaatcctcgtcaatactcaatagttgtgagttctgattaatcaattcatgaattttcagttgaagagatgaaaacttgtactgtaccttttagaacaggggccaactgaaggatccaaataaaagagagttccagctagctttgattctaccccttttcaatgagaaaattcgacctatagcacaggaaaaaaagcggtaccaaaaaatagcataaaaagttcccactttcgatctatagcataggccaccattttttttcgcccggtagcacttccgtcgcattttgaagtaacggcgttagatcggagtggagaaaatttttgtcggactcatttacccttcgttccccacgtgtttggccgcgtgttcggtgacgccggcggcggcggaggtcacggaggagtagaggccgctgcttaggaggctgttcctcgaggaggggcggaactcgtccgtcgggtcgtcatcgtcgtcgtcggacatcgccgagctggacggcatgtcgccggacagctactgcatctgggtgtcctcgccgtcgccagcatcctcgccgtcgcgccccccacggaagagcgggtcgacggggtccatcacgcggtggcgccgcatcagcgagctcgtcatcggccgcagccatagcgacggcaaggagaagttccgcttcatctccgcgctgtcgtccctggccagggagcaccccaaaccgaagcccacgacgaagggcgccaccgccaccaaaccgcattcttcactgacggcggcaaagaggccgctcgaggacgaggacgacgatgatgacttgggcggccctagtgtcaatgtggatggatgtgggccgttgtatgccctcgggctcatcagctccgtcatcgccgacggcgctggcaaacaccgccgtggtggtcgtactcggcgtcgcagcccacacctccgccgtcctatccctgctgctgctcgccgtcgaggttgccgcctacctccaggggtggaacctcgaggaggtggcgtcactccccgccgtcgacggcctcttcgccgcgcctccattgccctcttgctcgggaagaagggcaaatgagtcatttttcatgtcgactcacatgtttggatggcaaatgtgacgggagtgctataaatcgcaagaaaattggtgtcctgtgtttctggtcgaagtagaaaatttgtcgtgctattttttggtaccgggttttttcctttgctatggatcgaatttactccttttcaattgtaattggaaaatgtgtagctagatcatgtcaaggtgctacacccttttccaattgtgcttttaaaaaaaagaaaaggaaaattgtgtagatagatcatgtgaaattacgttgagataatttgaaattataccttttcgacgaaaaccaaaatattttgaggtttcggcacgggatgaaagcaatttctgagtaaaattctacacttgaccaaaacttaaattcacaatagtaaatctaaacgaaattcatcgaaacttaggtgaactctaatactagggtaaaaaagaaagttcatcccacggtctgcacagtgcatcgcaggctccccatcaggaaaaagaaatagaggggggcctcatttcacgctcgcagaaggcaggagaaactcacccttgtcaagatagcatggggcaattctatttcttcatgttggacatccacatagcacacaaatctaagtaaacaacgataaattattaaaaactagtggtaggtgagaaactggaagagaaattaaacttctaagaaatcttttatatcaaagttagtgataggggagcatagaaagactaatgacttatgttgactttggagcctaatggtagaggcgtgtgtaaccatgagtccaccatcatagtagaaaataatgattttgcaggtatttactgtagcaatgttgtaaacacaggaactatgctaaacggtagtatatcgtattattatttatttggtactgtagcatactgtaacgatcaatctcgttcgtttgctattcacctttaactttaacaagtcaggggatctcaatccattaacgtagaggcagggtttatgattccgatgaaatccgaccagatttcacgaaatttcgacgtttcaacgaggcttggaagtagaaaccgtctgagatttcgagaagtttcatccaaattcaaatttgaattaataaaaaaagaaaaaaaagaaaaaaaaacttataaatactatgatatttataaaacctattgggatataattttttgaaaaaaattatgtattgtgtgtatttactgaaacttacatcaggaaagaaagaaaagaataaaaaattaagaaaaagaaaaacttacatgggccaaaaccaaccggaattaaaaaaaaggaaaacacttactaattgaaatttcgatcggaatttcggtaaaaccgaccggttttcgagaacttgtcggcaaactcgaggaatttgtattcaaattttagtttatgaaatttgttcggaatttaccggttttctaccagatttcatgaaattctgaataccgcaagtgtctggaacggaagggcatgtcagaattgtaaaccctgtgtggaggggtttttggatttccgatttaattaaagaaaaagaaaaacagagagaaaaagaaaaggaaaatcgtcggcgatccatctcgcttctgccatcccatccccgcccgagatccatgccggcagtccactcgcggccccccccaagatccacccgcgcaagtcacagatcgcgccggccatggccatcggcggcgacgcggcgagcatggtggccgtcggcctcgtgtggggcaccaccaacgccctgatgcgccggggcgcgcttgtctgggaccaccgcctgcgctcccttcccgccacctcctcctccgtcaccggcgtgctgcggcggtgggcggagctcctcctgacgtggcagtactcggcgccgttcgccgtcaacctcgcggcatccgccgccttcttcagcctccttggcgccgccccgatctccgttgccgtgcccgtcacgaacgccaccaccttcgccgccaccgctgtcgccgccgccctcctcggcgagggcacgcgcgcagcgcccgcagcgctcggcacggcgctcatcgtcctcggcgtctgggtctgcatctcctagcacttcaggttgtgaaaagggaccctttcttgggaatttctgtactttctttttgtttctcttaaaatgatggaatagtatgtactcatgtttgatgaaattttctgtgcaaagcttttggaaatgatgaatgaattatggtcgaatttattcagcacagttgctgtgcttggaattctggagattgagcaaacaaaatgtgagcctgtctcagcaagcgattcttggaattccatgatcagtgtagatgaatcctctgaagaagatccgagtaagtgacaggttattgacattctgcagttcacaactctgtttgcccccctgactcgagctagctaacattgatgccaacttgccaagtgtgcattcatgtattttcacaaacatttgatgatcttctcaatggcattcatgtattttcagaagttttcaaactacacaaaatgcaaaatccaaagagagtgtagcttaactcaggagaggaaaatttctactctatgatagaatcttatcagccatttatgctagtctaatcaatagttcattactgaggctaactagttgtaagttgtaacttgcaaacactggttttgtgcacacaattaattgtcatgattaaactctaatgagtgatcttgtgacttgtgagcatgcccattctactgtctgatgtgaatccctatcaaaggagcatggcccatcaccatgagatttttttcagcactttgacaaggatagccatagaccagtacaagtgtacaactgaaatgtaagaacaagtagtacttgtctgtaagagattttttcacaatgattgacagcgattcacttgtaatatttatcctatcctttgttgactcatcctcattgtgtccatgaatctacaccaactaccatggattacgctgtcaaattgattctaattatgtgatcatgtgaatacagatgcagtatataaatgcaatatgtattgcaatcttgaaaaggctggcaataattttgatatgcaacaggtaataagctggagggctcacatgcatctcctgcctccatcctggacacaccttgcaggatggatggctaggattgatgatcagcaagcacctcctccaatggattatggatgtctcataatcagagtcaaagcagaggagaaatcacaaattcacaattcacaactaccagcaggcatggggagacagcatgcatggttgatggtccttggcagctatcacccaaaaattcagagtgagatgtttgctgctgcatctgcaaattcaagtacatgggctgatgggcacatggctgcatgatctgtatatctgcaagtactttgtggagtttgtagcaccacggttcatagctttgaccacatcaaggtgctagttgcagtgaaagttgtgaagtggatgttgcagttgatttgtggatgttttgctaccagggcagaggaagagtagatacagaaaataaaattactccctccagataaaaaataattacgtttgactttcttctttcatgttccttatagtgtgactttgcgcacggtttaataaaaaaatgtacaaaatcttttttatacagcataggcttgtcacggagcttggtgttactgtatgggcttgtcgacaagcagctgatatgataatatacttacctacatggcacttgccatgtcattcgcgttggtcttcaaaaggtttgggtttgaaaataaaattttatagcatctatgaataaaatattattttctaaatgtttaaataatagaaacactagtagaggcctggtcactcaataaattatattttatctagaattaagtagctagtcgtgtaataacataaaggactagaaatattaacttattgcttaaaatgaactttacatgtacaatggagatgctcttggacccctctaactgtcgaatgcaaacaaaccattgatccatcgaagtttttggggctttcatattacgcaaatgtatcgggtttgctctttagagcgagtactgtatgcatccaagtacttacccctaagtgtcatgaagctcacataatgaggtggagaagagaaggaaggaaagaggggagtcatcccttacataaggagcaacctctatacaaactccaagagggatgaaatgaagggatcagtgaattaagactaaataaataaaataaaattatcatggtacattgggacaagttcgccaaaggcaatatattgtatatattacttcttaattaagatgactattacctctattataaaacttgatattaagcatacatccatgctgcaactcatttgcaacatatgggagccaacattttggctccttggctgctccgactgatacaacagatactacttttgtgtagttgctgtgtttatttttttcgagcattgtgtctcctcctctcccccctcctctacagctctaggctataacccgaattccctccaaattcactgtattagtgcatcgctttcttatttttgtatgttgtatccattaagcttgagacatttgaaacattaaactgaatctctcataacaactctcttgttagtttaagatatgcctaacccttcacttcaattgcagaaagtatcaggggctattcaaaaggctattctatgactgcggctattgcaacaagggtttacctttttattttcaaagtgaaaattgctccttatcggtttaccgaataccaataaaaaacaataaaattttgtcaatgttgcattaaaactagctaatactaggcaatattggttgaaagcatttgggaatttcctaactgtgccgataccgttttcataaaactaatataatagtaatatctttaccgatttaaccatttctaaaatttagtctctctaatttctatgagcaccgcattaaaattgacactaaataattaaattcatacatataaaaatttcctaaccgtttccctaaaaaatgataaaaaaaataatgtttcagatcattttcaacttttttcatcactaccgggtgaaaaccgatcggttttgtgaaccctgattgcagcttgctattgaattcttggttgcaacaatattcctgttggttgcgacacagtgataacccaagctacccaaaaacccctaataccttgtgaaattccgataatataatttagttgataactatagtgctaaatttaaaatactcgatatgccgtgtgttttattatggaccaaaatataggcacacattttttttgtcaaaccgctaaaatgcagtagtacctatataccatggaaagccatataatgtgtgcaaatcaatgcttttttcatgtgatcattggtgaaaatactttgcttaagacatccgatgccaaagaaaatatcggatgccctttgcatgaggccccaccgcccctccccacatctctcttgccatttgcataggacatgttaggccgtcttgtctctccccatctctctcaccattttcatcaacccgaaatacgacgctcgggcgtcaagatgtccaccactgcggctataatctccggcgagagctctgtccccgtccttgtaggaccttggctcccatccacctcctctttttcctccttgttgccggtcccctccatggatcttcctccctccgttctcaatcctctccatggaggaaagtttgacggcttgacacaggcaggcggcggtgaccatatatgaaggaattggcaaggtggtggctgggctccgatgacggagaatcaatagatgtaagcaagagagacatatctggtggttggactagatgaagaaggaaggaggtaagcttttttccttttcgggagttttttttaagaatgttgcaacatattatttcgctctatttttattgtatgttgcatcttggtgtatatttgaatgttgcgtcttggtgtatatttgaatatttcactctatttttattgtatgttgcacactttgattctagggtgttgcaaccaaattcttcgagtgttgtatctcgttgcaacattttcctttaagcagtgaaacatttgtttaccgaatgttgagacatctgaaacattttttatcgattggtgaaacatgtgaaacaattttttacataggatgaaacattgtccgtgctgtggccctctccgatcattggcacagattaatttggcttcaccatgacaaaatgagtaggtagaccgtgagaagaattagggtgcgattgagacgtttttaattattacaagaacatctttcgaatatagaaatatactaagaaatcaggagaaaaaatattttggtacctatctaatacgatcatctaccattccttcccccaaaaaatagccagaaaaatacattgcctaattcaaaaaaaaaaaatcggtgcacacagcacaggcaccgcacagctatctcggcaaaatggcctttcctcttttctcctctcttcgggccttccctttcccttccctcccgcgactgactttttttcttttttatttttcacctccctcccaagtcccaactccccactccagcagcacacgcgcgttcccccccaaattccaaaatctcgctagggtttccccctcctccgctctcacactgcctcgcctccccggatggacgagaccctagcctccctgcgccgcccggtaaccctagcccctccgccgagctctcacccccctcgaccgctggattcgccatttttttctgattttttttttggatgaattgcacaagcgcgggcggccgccgcggccgcgggaggaccacttggccgccgaggacttcgaggaggagggggaggatgaggaggccaggcggaggcgctcgcgcggccccagacgaagcgcaagcgcgcggccagcgccgcggccgcggccgcgctggaggaccaaaccctcatcggttcgccttctacccgttcttcccattctcctttgcgcgttggtcgccgtggtctcgctggagtgtgggggttggttgtgcttggggatgcactgcttagtgtgtagctgctgagttgacgagagtgagagctagttcgcagtgacgcgggataaattagtctatgtggctctctgggtggtgaattggtgattcctaaggttgaactgaggttgggctagtttagttcatcaagcagtgtgattttctgcttttgtagttggtctagagaattttgttaggattgtttcttttttcaatcaggaaattctaggttagctgaacaaaagaccattgatttcgattggactgttagttaccttggtactccctctgtcccagtttagagggcgcgcgtaaatttttttgacggtttaccagtttagagggcgtggttcgtttttcactgcttttcttcctggagtaccctccgcatgcatgcacatgacgcttggatatgcccgctcaataactgatcaagcgacgcaaccggccggcgcgtggagctgcacatgtgtgggaccacaaggttacatgcatgcagctgttactaatctgcatgtgtttggatcaaacccattttattaggggcagtttaggaaaaaataactctgcatgtgagctggtctcggtgaatttatttgtgcgccctctaaattgggacggagggagtactatcacctgttactggttcagtaccctatcaattcattggtagtgccaaaacctagccaaattttggctctaccaattatttggtagggtagagttcagattatatatgtttgattagctaccaatttgtttgatatagtgaagaaagttctagagtgttgccaaattaaatatgggcattaccgctttggctctaatccaaacaaatcacactactatttaagctgccaaatatttggtaaggcacattttggcatcaatccaaaatgacccatagtatcacaagccgatcttgaaactgcatggagagtcatgatttataaagatatgtgctgacctcagctggggttgccctaaccatagtcctgccagtactgtagtgcctgcccagaatgatgccagaggcttgtagattatgcatcgagatttaaaagatcctatcataacatgctgctcaaaatctatgacttagacacttactcggcaagttattttatcttcaatttgtgtcttattcctaaaaacttggaacttgcagatattattaaacataatggcaggcttatcagccatgctgtcaaaaaattggtcgaggattatgaatcagatccaaaatctgtgatgtttcagatattagcgatgctatttgaggtaatagatgttaacttcttaatgcagtttcttttggttgcttatttcataaaccagtgaatcttataatgacaggcttgtggagctaggcataacttttatgcagactacctgtatgaggcagatgtggatggtgttgtgttttcccttgtcgagctagcaaaaaaggtatcctgctgcgattttccctagaagagtgaatggagaataattttttgcagccttgtgattatccaatgtgcatgctatgtttatcctacatgttactaatcttgaaatgatatgcaatgctctcttttggatgatttcttttaaccttaacttgaaaatagggaatggttgaagataattacaacaccaaacagaaggatctcaagaacttcaaagaaaatcttgtttccttttgggataccttggtccatgagtgtcagaatggccctttatttgatggtagcttattccaaaaaatcaaagactatgtggttgctttgtcatggtaatttatctaagctataccttttattttctttgtgttagacacttggatgcatgtatctaatgtgctgtggtgtatttcagtactcctccaagggtttatcgccaagtagcttcattggttgggctccagcttgtgacgtccttaatatctgttgctaagactctcagtggacagcgtgagaccactcaaagacagttgaatgcagagaagaagaagcagactgatggaccgattgttgaatctctaaacaaaaagctagctcatactcacaaaagcattacttacttggaggaactaatgcggaaaatattcagtgggtgaggacctgaacttgcattttaatgtacactgtttactttcatatttctcaaatttgccattctgatgtggttcacttactggtatctggacaaaaatatttgcatgtggctgttttctgtacatatctcagtctactatgtccacttaatatattattttaccacttgcaggttattcatgcaccgctatcgtgatgttgaccctgagatccggatgtcgtgcataaaatcacttggtatttgggttgtctcgtacccatcacttttcttacaagatatatacctgaagtatctaggatggacacttaatgacaaggtacatattttagttctatgatttttggttgaaccttgtctgaccaatgagatgtgcaagttttgttatgtcattttgtgcaatctttgtttttgtagaatgctggggttagaagaacttctattcttgccttgcaaagcctgtatgaagtggatgaaaacataccttctcttggtctctttactgagagattttacagcaggatgatccagcttgcagatgatgttgatatttcagtagctgtgtcagctatcggactcatcaagcagttactgaggtgagttttgggcaaaatcttttgcctgtgaagagatcatttggtcactgctgggcaaccttacttttttttaccagagctttcctaagatatggtagtgagtttggggtgtataactttcgattgtacagtttgctattagggtttttgtagattggccatgccgctatgttttgagaactaaattttcaagcaataaattgtattttttagcattttccagcataatggaatcatggattttagccaggaaccggtgaattagcttcctttcatcaaataccatagagaaataggggatagttcatcactagtgttatcattagctttaggatgcaatagcgcagttcaataaatattctcagtattcacaattcaaaaatatttttgacctgcaccattgtagaaatacattcaacatgcatttacacaagcttttgatttggaaccaccataaatactcgcttgttgaatgaaaattggtccaaagaaatttgcagaaacacaggcttaaatgtgcactcttaattcacaataaaatacataagagttgcatattcaaaacaatgtgctatggacgaatggatcagtacgagtggtatatggtatttgacttggcattaatctactcatgtggtaattgattgacttgttgggcaccatgtgtgccttgtctatcctgaactttacctagcaatcacccttgttattatttactaatatcagtatttgtcttaccaaagtgtgctaggggaccatgcatttttttcagctttaattttttacatgcattactgcagcaaaacaaataacttttctgtttattccttttgcaggcatcaacttttgagcgatgatgatttaggtccactatatgatttgcttattgatgagcctccgctgatcaggcgtgcaattggggaattggtttatgatcatctgatagcacaaaacatcaaaacctcccagtctggagcaagaggtacttgtctctggaatgtttctgcttttatgccaccttatcttgctatcaaataactttcttagttcatctactgattgtactatctaattccagatggaaacaatgattcatcagaggttcatattggtcgaatgctgcaaatcctgagggaattttcagatgacccagtcctgagctcttatgtcattgatgatatttgggatgacatgaaggctatgaaagtatactcagttttgtttcaacttatattatcagtatgacttaaccgctataactgcaatgtcctattctgtaggattggaagtgtataatctccatgcttctggatgaaaatccattaaccgagcttactgacatggatggaaccaatctagttcggatgctgcgagcctctgcaaagaaggctgttggggaaaggatagttcctgcaacagacaatagaaagatgtactacaataaaggccagaaggtgtcaatgtcatttctgtcgtatcatatgttgctgctgcaagttgattgtttatttcttgatcgtatcatttgttgtattgcttgtttagtgttgctgccttagtggttatttaggacttgtaagtactatgcgtagaatgtaggtttattttgttggatattggcaatgtcctacacctttgaaagttagtctgacaagttaatctcttaaaagacctgtttgctagatacatccatttttaaatattacactgttagactttatttggtcaaacttttgaaacattgaccatcaatatctctcaaaatattttgtttgggaacataaaaatcatattggtagtttttttctttaattgtacttttacaatattaatttttttagatattattgttatattctaatagaaaatagtggtcaaagttgcacacccaagaccaaagaaaatcaacagtgtcatctatttaaatacggaggtagtaattgctagtcatgtagattgtagttctgaatctgttgcctgcttgttgaatctggtttgtttgtcgtaccattgttcatgtatttgttgaattgttactgaagcattattattctgcaggaaatattggaaaacagcaagcatgaaataactactgctttgctgaagaaatatccacagcttttaagaaaatacatatctgacaaagctaagatatcacctctaattgatatgatgatgcttatgaaacttgagctgtactcactaaaaaggcaagatcaggtcagttgaatagctatttattcttctgcacaaactttctgcttgacttgttgacagtttcgtgtacattttggttcagcatttcaaggctgccatagatctcattgcggatgccttctttaaacatggtgacaaggagaccttgaggtcttgcatcaaggcaattactttctgttgcactaactgtcaggcagatcttcaaaattatgctgaaaacaaactgaaggatcttgaagacgagttggttttgaaagtcaaaactgcaatcaaggaagtagaggtatgcatgtcttattcacagtctctttgttttaaagccatgaaggtaaatatgttacaatctacattgcaggcaggtgatgatgaatactccctcatggttaatttgaagcgattttatgagcttcagttgtcaaaacctgtcaaaaatgatggtttatttgaggacatgtacagaatcctgagtcatctaaaagatatggataatgaggtatgaactattaccttgattagctattactactccagtctccctttgcagagttcactgtcggtactgtattagctaatatgttcatgttttaaataattaggtgaagagctttctcctccttaacatgtaccttcaattagcatggtgcctgaatgctattgatggtgaaaacccatctgaagcttccattgacgaacttttatccaggcaaagctctctttttgaaaaactctattattacttggtggttctgcctacttatcagaaagagggaaggagcaccactatactttcctgcagagtaagtcttctgagttaaacattgaagaaaagaacacatttttttgtattatgttgtatgctgatctgcaggctgtatgtcttggctatgtttagcccactgacttgatattgccttgtttttttgtaggtctgtgtcattactgctgagatgtggtgcctgtttaagaagccaaaatattcttcaacaaggctcgagagtttgggatatctcccgcaactagatgttgtccagaatttctggaaactatgtgaacaacagctcaacataccaggttttgatgttacacagattctatacttcattcgttgtatagcttataaaaataaatttctaaataaaacctcatcatcatgttggtgctactcttttaattgaagttgatcatgttcatcaacagatgaaatagaagatgaagatgcaaatgaagaatatattgaagacacaaacaaggatgttgtcatgattgcagctgcaaagctagtgctagctgatacagtttcaaaggtctctgctacgttttctaactgtaatgaactgttaggtcctcaagcaatgttttcctactacatcttctgttgtaccataatttggtcaccttggcagcttcctattgtcagacaaactaagttttcaattttatttctgtgtgcaggattacctgggcccagagcttgtttctcactatgcatcccatggaacaagtactacagagataatcaaacatctaatcacctcgcttcggaaaaatgctgacaacaacatgggtgccttatttttcgaggcactgaaaagggtaggtattttgtcccaccttcaaatgcacacaattattatttattatagtaactattgagtaattatattatgttactgattgtcgattaggaatttacttgttccagcttttacaatgtttaacaaactttaaaggaacttctgactttgtcaaccatatcttgtattttggaagtattttgactaaagacacttatactaaactcacttttgtattagaaacttttgctttatctgcttttaactgattttatgtgtgtgactttcttttgtaaacttttctttattttcatctaactagggatatgagcggtatatggcccatgtaagtgatggggaaaatcaaaccctcattggcaagtcttattcagaatgccaagatcttgctggtcggctcgcggggtcctatgttggtgcctcgcgcaataaaaacaagtctgagatcttgaagataatccaagacggtgtttcttttgcatttgtggaccttccaaagcaattgtctttcctcgaggctgctctactgccatttgtttctaaacttccatcgtcagatataccagacatgtatggcatttactcttgtcatttatgatgcttccatttattttatttatgcacaattttcatttatttcattgtatgtagcctgatagatgtacagaagaggactcaagatactaatactaatgaagatccaagtgcttggcgcccgtactttacgtttgtagagcatctacgcgataagcatgcaaagaatgaggttttgcagggtatgttgaactcttcctgaattttcccttttttatgttacataactgcaaatctttcttattgaaagtatggccgattctattgtttcctatccagaggaaaaggaggaaaaacctgtaaagcgcaggggtcggccaaggaaggttagagatgtacctgcaaggaatctttttgatggacacaagtctagcgatgaagagtctgttagtgactctgatcagcaagggcatggtgaagacaatgacgacgatgacgcagatcagcctctgatcaacacgtttaggtcttccgcatccaagctaagatcactgaaggtttctcagcaaggaacaagcggtcagaaaggaccttcgagggcatcaggtaaatggtcaaggattttgctctttccacatcagtcggatgcactgacgaatctacagcagcaaccatggtttctttctctgtttccattctatttttgtgtggtgttcccattttctaattacagtgtgtattttcaggaagcaatagctgagggcacgcactgacgtcgttacgcatgactgaacttggcacaaatgaatgcagcagatttgtggcgttgtagatgatttgtacctaggtgctcacccttttggtaaacaacgtgacatagacatttgttaggtttttaccccttcgccatgtatattatgttcagtaataatatatgtagaaaatcgcatgttgcattgtaccaatttgatcgatgtatttctcctgggttccgagactaaagaacacttgcatgcgagagatagggagagcagcaaccattttttatttattcaatggagaatccgaaccttggattggtttgcatgggaaccaatgagcccggcaatccttgcataccaaaccctccattctaaattgatctacatatatatattttttgaggttatttctaaatgatctacatatttgtgttcattcattaagtctatttgttatttgtgtattggagtaaatagacattgatgcatgtatcacaggtatttataacccacatgcaatatcttgatctgctattggctaggaaatagtgaggatggtgcatgcatcgagtttgctgctagagtaaatatagtacgagagagttattagcttttcttgattttggtatacctatgaaatatgtagatcaatttggaatggagggagtaatgattactctttcgctgtcgctcctcttcgtcgagccgctgccatccctcccatgccgctgttgctgttgtagccactccacctcgtcgagccaccgctgaccgtccttttcatctagccaccgttgcgcggcagccgttgcacaaggagggcggcgggaggaagttcctctcaggccgccgccgtcgctcccttcctccacaagccagcgtgccgctccctccctccgtgagccagcgtcgagcgaatcttctccctctgtgcctcgcggccgctccctccctccacgcaccgccgtgaacactcggcgagagagagagagagaggggatacgggggagagaagggaatagatatggatagggtttggtcgatgatattttagtcattaaaaagtaattatattgctttctttttgttgaatgaaaagttaacggtactatagtactatagaaacagggccaaacggagcactcatttttaaaaagtatggttaaataagcaaactataaaaggtaaggtcatattgatagttaagcttcaaaacagggtcaaataagtaattgtccctattgtgtttttgaatagcaagaaaatagcgctaagtcaaacatttttaactttattactaaaaaaaagataaaaaagataaatcatatgagaatggatattactggatttatcattaaacaaactaccgtaagatgcaattttttgaaacattataattttttaaatattattggtcattatagtatcttgaagattctatcaaagtttaaaaatgattatattttgatacggatggagtactagttttgggttatcgcctggtaataatcactttagttagtaccggtttgtttaataacattcacaatttgttgtgaaagcatttgattgaatttaattgagttgatgctgatgttggatgcggcattaacagaacagaaactgtcaaatggattagctgaaattaggtgcataatttctttcatagttattattataccctaccacgaaaaggcgagtgggtttgctgaaagaatatagaacatgttcttttgcgaattctaggcaggcaaaaacggaaattgcaaatggataagcaaaataaaaaaagccatttaggctgcttccgtttgggagtgttgggaatccttctcttcttgcaagtaaaatgtagcgatggattagtcaatattagctaaaaaatcttaaagaaatatattaatataattttaaagtaatttttgtaacaattcttttacaaaacacatatcgttttaactgtttggaaagtgtgtgcatgaaaaacgagagtgaaagttaagaaagtgtctaaaggatcatacatcacccaagaatcttgggaccattgaacaacacgcatgtaaaacttgtgtttcgaaagaaccaatacccttttaaccaataatgttattaacaatcatgtggtgtgcattttaaaatgttcatgtgttaagcatgtgttgtaacctactaaacttgcatatacttaatcgtactttctttctttgtcgtgccttaaaaataaaaaacacaatataagatcaactttgccccttatcattcttttctaccatcattgtctttaactaatactctgtctacaccactgttgcattccacctatcttttgcttaattcctttgatttgtcatcgttttccttacttgttttcagccataatatttagcggccctcttttcttcgaggctacctaccttctgaagatgttggaaggcattaattcaaatagcaacttgataaagccgtataatcaatggctggatgcagatagcctatacccgcaactttcaatgacactaacttctttaggattggaggcattaagcataaaaagatcaataacatgacaagtctgaaattcgacggtttgagtggataaccttggaaactacgaccattgaacatcgaagttggaaccagtatgcgtgtggctgacgaccctatagtagtattcgtctaatgttgattcaagtctatatgtgaagtggatatcgctgtgtttgacgagttctagcatgagtaattttctttgttgatgattaccaatcttctgcaatgcaatgctattttcatctcgtttggcctgtcgaacgtgtgccaaacaaagtctatcattcaccgatattttcttctatgctaatcgaaacacttacgtctatgctgactcctcttatgttcaagtggataaactcatctttctagacatagagtgaagatggcaccatataacactatgacttttaacttcactagtgaggtcataatgttataatgcaatagaaggaattgtaacgtaccacgtaggcgataatgtgaaacgtagaatgtattctttacaacgggttgggacttgggagcccttccttttcaaaacacaaaacagagcaacatattagcacacgagtaattaaatatcaacttaaaaacttattaaatggattagtataattttttaaattaactttcttatagaatattttttcttttgcaaaaacacgaagtttagtagttcgggaagcgtacgcgcgggaaatgagagattagaagttggaaaaggcaagaaaataacacacctttacataaaatttaatagtacaaccaattgttggctccaaaattattcacaccaagaatagctattgtcgacggataatacccgtagaccgtattccgagggtattggggtacactggagcaaggatctacacgatatgacatcaatcacatagaagacaaagattatactggttcagacccatcataaggtaatagtcctaatccagattttatggaccgtgaagaaaactacaaagattacaatagagaacaacaaaactgtagagtaccaaatagattgttgtcgagatcaactcgacgagatcgatcggcgactaggtcttctagtcttgcggattgcttctactatggttagtggtgaaattatgattcaatgaccccgtaccctctagaggtcttttatttatacccctaagtgccttgacctctaagtaaaactcggagagaactttatctgtacgagatcttaaagtcctcatcccccccgaataagattctaacacctattcagaggaacaatttccatatatctcagcaaattccttatgattaagaaaacctttccgtatacttgacggtataccgtatttgtacacaatgtaactccgaggataggaggcatcccttatccttaaccctgacagctatagctaatatggacaatagccaagtattagattacacacgttttcccataagctatcttttaagttttttaactaattttttttctgtctcatttcaattcacactcaatcaattctcttgcatggcatgggaagcatgggagaagagtggttgcaactagatttggacgacaaataagccgtaaggtttcgattcatgtgctgtagctggtgacggaagatatttcctactttatatctctttccatctagaatgatgcatacacggacaatattatcgcccgcctactgactacgctctacttttctttgtccttggagaatttggtgtcgtagtttttaggtaggattcttctgtaatatagaagacgccgccgtattacggagaactattttggtgtaaagaaaaaataaattaattacaaataagttcctggacaaaggaccaaactgaaaaaaggacacactctactgttcgccaaccgcacctctatactctccctctcttacggcggccggggcggaggaacggccggccatcttccgccgcctcgcctcgcctcgcctcgcccccccgcgcgcgccgccggcgaacaaacccgggaggcgcggcgccgacggccacctctcctccacaaccccccaccctagcctcctccttcccaccccgttcccccgcggtctgctgcccccgtcgcgcgcacgtcggaaaggcggcggcgtggagcccggcctcatcccaccgccagccctccatcgcggctcgaatcgagccgaaggtattgttactccgtcgctgctcttcacctggcgcgggcgtagattggagatccgtcccggtttgggttgctctctctccctctctccctccctgcgagttatgcatccggattcttattctgggatttggcctttgttttgatgcgtggaggaggagttgaatcctcctagatccattgctagtcgagtgattcgagtccgctctgctgttcggtgcactgtagcatcaatcatggccgacgattctgggaaggagcagaaggggaagtgggatacaaggatttttttaggttttccgttccatggctgcatgcttgcgttcctaacacgagttgcgttgcattgaactgatccaacatgtttgctgtatgaactcgttttgggcggcttcactgcacacgcagagcccgctcaggcgctcattagtagttaaccgatttaagaacataatagaagggaaatatataagatgttgcgttatgttcaaggccaggagaaatgaggttcaacttttggctgtttcacggtgacctttgctgcattctgattgtctgacacaattctaggctgaatccagaccagtcaaatataggtttggcagataaaggttggcccatttttgcactagatgttattcaactctgctttaggccttcaactgtacacacacacacacgcggcaaatgtgtctcgaaatagtcgttacacggggaatctgttcatttcgttagaaaatctttaaatgccatggcttgcatattggttaaatgattacttctatcatttccctgagcccacaatgctctttttcactcctgtgcaaactagtgtggatacttctctaactaaaaaattctcattttgtttcttaggttcagatgatagacatggtgtcagttattgaggagctcagtgggctaacttctagagaacttggagagatgctgaaggagtcagagaactttgtcttgcaggagaagacagaagatggtggtacaaagcaggtgtgtatgtataatatttgttgtcatttgagtttcttttccctgacatacatttctcttcgtaggtggacatggaaaagcttgtgtcctcgcttcctcttcaccttcttgctgtatgtttggaacttgaaagaggttcagatttagcgtatgtcctccgtggtatgcgcttcttgcatagtttgtctgagctatcagctcgccacactaggctggagcaggtttacttctttcaatatttcactcaagcctccccattttatccacaaataattcattttttttcttttgaatcacgatacgctttgagcattctttttctttcatctctgtattgttttatatctctgtattgtttttgttccctagtgttgtgaactaaatgcaatgcaactctttttttttgtccatctttagtcattgctaagtttaatcaagtccaatttgtttattgatttcattttactctctgttaaaattgaactggctgatgagtgttgagaaacacatgtttatttattgcaggttcttctcgatgatgtgaaattatctgaacaagtcatggacctgatattttttgtgctatctattctttcccactggaagaaggttcggcaagtgccaccaaattatatattgagttctatgtactgttttttttaagattatcatttcatactaatttatggtggcagctattgttttaaattaggaaaatcatcttggtgtttctccttttatacactcatcacttgtagcagccagtcttcatctgttgacaagttacttttcatctcagtggcatgaacttgttcatattctgcttgcacatccaaaggtaacacatgttaatttagaatatgtttaacttagttgtcttttcatgcctaaacgaaagcatgataagtaacctccagaattttgtgatgactttaaaattaaccttgaaatatcattgatttttaatgctgttttaccttgctttaattgtacctgaatcctttattattttctatttttatcctccttaccggcttgtctataatagtctctctgtggtgcaagatgattttgtacatgataatgccctgttatttttggttttatcgttatgagttatgacaaaatagagccggcaacatgatttgggatgtgagcccttattgttttaaggtcaaatcaaaattcatctgaacattttaccctgtcctgacatggcattttgtggtttaaatcatctatcagcgataaatctccatgtaattttgtgtacagcctactgtatcagaaagccatgctctgtcaaatgcaacttttgctgtgtttactttaaagtttctgttctaacatataattagcacaccaatatattttttcctttgagcattaccactgttcaaacttgtatatttctttgtttggggcatttgattgcagggatacatcttttgcatcattatatcatttcataagatagtgtattacttcagctatcctattgttttccttgaagcaaaaatacaaagtccatactaaagttttagtgacttgtgcccattgcatatttttcttgtactgtaataatatttgactgaattatgtcactcttgtgtttatagatgacaattagaaagattacttaaaaagaaaaaaaaaagagcactgggttactattgcaaattctttgatcatgattcacgaatgtttgccagattgccagcaatacatggatttgacagttaggcaattattcttcgttgtttttatctctttatctatcttaatgtttgatgtttcatggtcaggttgatatctttatggatgttgcctttgatagcctgcatgatgatgtgaggtcactgagtcacaggttgtcaacattgagcaccaatacctttcctgttggcccttttgactcacgactcacacacttcatctgccaacagtgtgaagcatcattgcagtttcttttgttactgtgccagcagaagttgttccgagatcgtattttaaaaaacaaggtctcagatatgcttacaaatcctgtttccttttatctttggtatcactgttgattaaaaaatatttaattggatattctcttcccttcatgacatatcaacatatacatgttatatcatactgatttgatgagaaaaatgtgtgtaccttgaggactgtttatttgttcctcgaatgcagtgttccattagtttacatgctttgctcttgttccacaaaacagatcagtctagactagcctcgttcaagagacatgttttatgtttttttttgagcccacgtgtctgtgtattcctataaattatgagtactagcgtcaaatctgcaatttgttactatatattattacatttgatgtgttggaacttggaagctagatctgaagtaacctctttcttaacgcaggaactctctaggaatggaggtattctgtcactctctcgatctatattgaagttaggtgttccagagtgtctgaagggatcaattgatattgctgcttccatgtccagattgaaggctaagattctttctattgtaagttggtcatgagccatgactcaagattgcacttcgtataaataattaaatagagtgctactatatttactgtttgcacagtaccgagttactaactaaatccttggtgcaaaacaaatgctagttgctccaactttgtgaagctgaaactgtttcttaccttgatgaagtcgccacttcaccaaagagtatgcaactagggcaaaccttggcactagaggttagttctaccagggatgatcgcaaactttgaaatgttaccgactctgctacccgtggatttttttttcagttactgacaaaattcttatgtcacatgcaggttcttgatttgctgaagactgcgtttggaagaaaacaaaaacttaccttggattctcacgataagagttaccctatgggttctgtgcttatcagtgcgttgcgtctagttgatgtcttttctgatgattcaaacttcagatcttcatttataactaatactgtaagagtaactatttctaccttgatctatttttagtttttaccattgagcaactgaaaatttccagcaaatataatgttttattcaagtcccttttgttcatctcctttgcagattccatttctgacccaaattttggctattcctcatgatgagtttgtctcaaactggtgctctgttaatctgccagtgatagaagaagacgctaatcttgattatgatccatttggtgcagctgagctggcactggcagctgctggtaataagttaactgaagctaaagcaaactattcttgccctttcgccctatcagtatgccttctatagcatatgcgcagacaagaacatcatgtgtggtgaaaataatagcatatttgcatgtttttgtcccaaacatatgcgaaggtcagagctttttctctcctgctacaaattgctaagttgctatgttgatttgttgttaaaagcaagttccactgtcatgttagcagagcaagaaagagacctttttcttcagaaatttcagaagtacttggtatcagggaatcctagatcatcagttgatcatccagcatcagctgatctcaaggccactacagtttgcagaaacttgggtaaagtggcttatacttttatccaattttgtggttatgtttatgactttattcattatacttcatgtgtaaacctcttttttgtgggttttgcaggatctttgtctgagtatgctagatcgttaattcctaataacttgttaaacgaggaagatgtgcaattgttaaggtagttaagcgtttttgacttgtcatgtttcttagtgtacaaactgtgttacaaattttttgtttaatgcctaattttgtgggtcaacatttggttttaatttgttgcgcgctgcatatagttttgaaacacttttactgatatttctgcaaaatgtgtttttttcctatttgcagtgaatttgcttataagttacaaacttggtgtaaatcacatgttggacagagtacatcccaggtttgtttgcttttcacagtaattatagaatcatagtagccacctacatatccaagcattttgcttagggtgcttggttccctgctcctccttgagggataactacaaatttcatttccaacaaaataatggttcaactgttcaagtacatcacttgcactctgtctctgtgcaagcttttttaatgaacaatattcaatactatagccaatttttttgtatggtaggtgataggtgcaacttgtgtataaattagaaaaatagctttgacccttgcatcagatggtcaattcatacttctagcaatctagttgaaatcgaaatgttggacgtgacctcattctgggatgttttaggcagtaaagattgatccgtcatcagaaagcaaggaagactttaagccactgcagcatcccttgataccaagtactgttgttccagattccagtataaataaccttccgaaggtaggtttgttcagttgttcactatgttgagtataatatattagccattgacttggtaattcatctgatcccaacaaaaatgatgtgcagaacatggaagagcctacaccaacaaacatggaagagcctgcaccaacaccctcaacaaagcaagagggaaatgccagggatgagactcctagaagcactgtcgctttaaatggtgggttcctgcagaattcagtcggccaggacttagtccatcttggtgtggcgagaactagttcaggctttctagggggaggtaccagtacaagtacaggatccctgcgctgcaaaatggatcttgatcctgcatccagcagtatggaccatttcaaaacaccagatagaaaagaaagtggtcttcaggatgatgagaaaggagacactcacatgtatgatgagagacaacctaagagaaggaagcgaaccattatgaatgataggcaaataaacgaaatcgagaaggctcttattgatgagcctgagatgcataagaatgctgctttactgcaggcatggtcagagaagttaagtgggcaggtatagtccttcacctggccattcttctgttagatcaaaatattttatatacttctcattcatgaaaatgtgttttcagggctcggagattacgtcatctcagctaaagaattggtaacactgaagctatctttgttattctttttccttagcaatttagcattacttgtatgggaacatatcctgtgcacacaagccttctcatctacacagcgtgcagaccaactaacaaatttcacaaaaatatctagaaaaaattgtacaagtatttccaatagtattacacttatgtataaagtcttaacttcaaattcattatatcttagctgtaaccaaaaaaaaaaaaaatctaacagttttgagagtataaatctgttagaaatttgtcttttttgttgctacctatatataatgaatttgaagatgagactttacacatagatgcaatactactagaagtacatgtgcaatgttttgtagaatttttggtgatatgttttagttggtgtgcacggtgtgtatacgagaggacttgtgtgcagagcataagtttcctgcttgtataccataactgacgttttgttcatcaagttcatacttcacttctgtactgtttttacttctcagtccatagcttacttatgacaaaccttctttaaattctaggctgaacaacagaaaagctaagcttgctcgtattgcgaaagaaagaggagtactatctgagggtgagaacgcagataagccatctacgccagctactccccaccactgtgactcctcagaaagtgctggcgaggagagctacttgccacctgcgagggtcatgagtgctctaggcatatccaagggcagcagatttgtgagcccagatggcaatgagacaacatcacaggcagaattcaatcaaaatatcatgcttagccgccctttcacaagatcattctcatttgaacctggccgtcttgtttcgctcattgataatgatgggaaggaggttggcaggggaaagatcttccaagttgaggggagactgcaagggaaggccctgacagatactcgcgtttgcatcgttgatgttattgagctcaagattgagaaatggcgggagctacctcatccctcggaagcatcaggaagaacattccaagaggcagaatcaaggaacggtggtgtgatgagggtcgcgtgggatgtcatcagactatctccagtggttcagtaagtcgaacttttctttgcaatgcgtagaaagacgctgtgacacccaagaaagtacaagaagtaaaaagaagtttaatttaggatcagaaaatcgtgaatcttccggagcagtttgtactaagtcgccgccctgactgatgactgttgtatccatcgatcgaatgctggacttgtttaggatgaagtacatcctaatttacaaaattatgttattctgcttatgctaggtgcaacaaattcaagtagctggtgttgaccatgagattttttttttcagtattcatagacctcacttgttagctgtcgctatatgctaaggacaaaggtttcttaagatggacaaaggttcatatgctaaggacaaaggtttcttaaggacaaatgtttcttgccaaggacctcacttgttatgtgttggtggttgctcaggagcggcaacatgtacaccacagaatatttcagatcctttgtccattgagatattagaaaacattaagatggaattcttcatcagggattgcaacctcgcatgatcaggaaaccgctcttcctactcctgccacgcccttaatttagcacacgtcacttcagtatgccaaatctctgttaggtagatcttagatttttctcggttagtccaaagtttttctgtttcagataattgcattagtgcatgatgcagctacaatgcatgcattgtccctgttcgccccagatgcagtggcagcgtgctagctcctctggcttgataaaaactggtgacaataaggtcttgaacatcctttgtctgggcgtacaactcactcgttggactgcgccacatccaggacacacttctgaccatacagctactgtcacgtgttttttttatttcagcccctacttattttttgtccgcctctataagattttttattataaaatcaagtgtaacttttatattgtaaaccttgagaaagagatagaactacacatataccctcaacatctcagtggacccacttgtcagcctacatatatctttccccaccctccatccgaatcctcgagctcaaatccgcacaccgccgcctctgaccgcatccacgctccggtgtccacctctaatcgtttatacttcgatactgctataggcatcaagctggtagtatggcactcggtgcccactaggggagttgccaaatttagcgataagctggccattatcgccatcgatgtgatcgcacacacttagtagatcgctactttcctctccggtggtttcttaacgttccatctttcctcgtctccggtggttgtcgtgctcatcctcccctccctaatcccggtagatctcggcgtttcacttgacaaggctattgcccaacaaagacaacgtcagtcgtcacagcatagctgagctgctgaacactgcgctttgacgtggtacggcaaaggcacttgccatgttgtggcgttgtgcacatccttagtattactagaagttgctctttctgtaatgaaagatttaggtatgcaaaacgatatgaactcttaaactattataaattgaacttaaaaaatcatgtccaaaccaaagtgttcatgacactaaagaaagctgaaaacaacaaaactccaagttagagcacccgcaatggtaaagtaagatgctctctataaaacatgtacatctcagtaatagactagattaatagtaaaccaactcaatagtatgtctacatgggtatctatagctttctaatccattgccttgtttttctctatagactatctctagattagtagataactttgttctctctcttcatttaatctctttcaagtaagaaaatatgctgacatggatctcttatagggagcctatagataaccattgcgggtgtccttacaattacacagcctagtttcacgcttcacacacttccatgggtaacgaagtacagaagccctacagcagagagcgcccggacatggagccccagttccagttgtcgctgatgagagcacaagaaatcaatcaatcaaagcatgcaaagcaacacagtcactctgtcctctctccatcaatcaatgctcacccagctcacctcacctcactctcctgctcctcctcttcactcgcttcgcctccgtctcgtcgcgatcccacctgaaaactctcgccatgaccaccgacctcctcctcctcctgctgcttctgtcgtcatcccgcctcgccctcgccgccgcgttcggcgtctggatcaatggcgccgcctcctcgtcgccgcagagccaggagtacgaggcgctgcaggcgctgaaggcggcggtggtggaggacccgcgcggcgcgctggcgtcgtggcaggggcccaacgtgtgcgcgtacaggggggtgtactgctcggcgccgcccgacgacgccgccgcgtcgggcgcggtggtcgccggcatcgacctcaaccgcgccaacctgagggggacgctcccggcggcggtgtccctcctcgcccacctcacgttcctccacctcaacagcaaccgcctcgccggccagccccccgactcgctccgcgacctccagtacctcaccgagctcgacctcagcaacaacctcttctccggcccgttcccggcggcggcgctgctcatcccgtcgctcgtctacctcgacctccgcttcaacgccttctccggcgggatccccgccgaggccttcgccaagagcagcctcgacgcgctcttcctcaacaacaaccagttcgacggcgagatcccggagacgctctggtcgtctccggcgacggtgatcacgctcgcgaacaaccgcctcaccggccccgtcccgtcggcgtacggctacggcggccgcgtccgggaggtgctgttcctcaacaacaagctcaccggctgcattccggaggagctcgggttcttgcccaccatcgaggtgctcgacctgagctacaactcgctctccggccacctcccgcccacgctgtcctgcctcgccggcatcgaggtgctcaacatcgcgcacaaccagttcaccggcgagctcccggacctcgtctgcgacctcaagcggatcaccaacctgtccgtctccttcaacttcttctccggcatcagccagcactgcaaccgcctcgccggccgcagcgtgttcgacttcgtcggcaactgcgtccccggccgcggcctgcagcgcccgccgccggagtgcgacggcggcccgggcgacggcggcctcagctgcctgcgcagcatccccgtcacccgccccgtcccctgcgcccaggcctccgtctccgtcggcgtcggcgtcatcgtcggcggcgcgatgccatcgttcggcgccggcggcgtggtcacggtcaccgtgccatgaacgaacgatcaaccgattaaactgtattttttgttctccctctttttttttgtccacgaaatttaatcccatggaccattagcccattgccatctcatcactaattactaatcaatcgattggctgcttaagaattcgagtggctaattaagaacatttttggcttttgagctggagggagagaggtgttaatggcgccatgaatacgaggggtggcgccaactgctaacgacttcctcctcaccccgtgcagccgcggccatgtgatgtgctgctgcagctgcacagcttgcagaaatgcagtgtactgctgtactgtttacctgcttactactcctgccctggtatggtctctggagtttggatcgatccgccattttcaccttggagaaaattggtccctgcacctgtgaattttcgtgttcaaacgagtgattatttgtcttattttaatttttttatgattaatattttttattgtcattagatgataaaacataaataatattttatacgtcatttattttttaattttttttcataaactttttaaataagacggacaatcaaaagctgtatacggaaaccggtaactgcacttaaaatgggacagaggtagtactactatcctgtctcaaaatatatatataaaaaatgatcggatatgatatattatagtatcatgaatctgaatagacgcattcaaattcgtcgtagtgtcacatatatcacattcgacttgtattttgggttggaaagagtacaagatcagaagttactcttgtgtgaaccaaaaatatggaatccaatatttgttgctccggttaatatttaatactcccttcgtcctaaattacacggcgtccttattttgttttagaaaaaaataaactcgttaacttttgattaatgattatactaaaattatttatgttaagtattatatatggagtatgctatatcactgtattcgtgtcttaaaaattttcatgtgatattaattttatagttgttgataatataatgtgaaataaaataatagttcattgaaaactatatgaaaaattatatgccttataatttggaacaaatggagtactcccttggtatttagaaactacttagtttgtccataaatataaggatttagggtataaatataagaggttttgatgtactactttctcaatacacctgaccattatatttattaccattatttactctaataaatagtaacacttcaataaatatcactcaagattgtaattgctcttatctccttgaccaaggttttttttattgtttcgctaataatttgtagtacacaaattaataaggtaataataaacgtttcttgagtgacaaatactacaggttttacaacatcgggccaatacattttaagtgtcatttcaaattatctttttactgcactaaattttctagatgtgtttgctacagctagctcgctccgcccggtgccgtgtggcgagaaggagaaagagaagagatgaaggagaggagaaaatgagaatgagaatgacatgtggatctacatgagctccactattcttttattatttttagtgtaactgacctatgggtctactatttttatatatttttggactgaattgccacgtaggtgtcatgtcaatgccatatggaacaaagaactagtcaaaatagcaacgtagatgtcacatcagttaaaactgagaaaaatgccgccgagagacctaattttcactagttttgtaagctgggaaatacattatatctagttttataattcaaggacgaatttgaaattcggtgacaagatgaggtgcctccggtgtactttttacctcggatcgcaaaagtgacccatgtttttggtgggcctttgtgggctttccaaaagcctgtctcaagcgagcccaactttggtgggccgaattgtgtttagggaagttgtgcggcccatcacggattggcccattatactgcaactaggccattcagagcttcggatccatggccggcgagcccagctctacgccggcggcggcgacggcgaggaccacgtgacgtgcggatcagctcggaggcaacggcgatccatctcttctctcccccctcacgattcagaggctcaaccgagcggcgaacgggagcgctcgacggcgaggtgcgcgcacgcgaatccagttcccctagaggtcgcaactacgcctccacagtgttcctaattttcttgatttttctgtcacctactagtttgttgatctgcttaatttgtttgtcacatgctagtttttttgcaactatcggtgcttatcgatttagcgattcttggagacttggtatctttttgtgttgactcgctggtgttaggagtgatgctctctagctgctcgatgaaatgcctgataaaagcatcctgtcatgccatgccaatacatctatcaacatttattctcacgatttgttcttctttgctaatgtacctatcaccatcgatttgcatgcagtaggaccatcggatatattagattaatggtgaatggcgtaatgattttattttacaaagtattgaacaagattgcgagtggcttgatgagttcattattctttccgatttcttctgggtttctagagtcatgcagggggcgcgcgttaatctgaaggggtggcaacaggcagcggttgcatttggttctgcatttggggcattgcttgaccctagaagagctgatctgatagctactcttggggagactactgggaagccagcatttcaccgtgtgcttcagcggatgaggaacagtgctgaaggcagggtaaactcatgctaccctctatttcctaaagggtgacgttatgccgatgcatccatttgttgtgcttgaccatctctttatagccttttttactagcatattctgtaaataatatacatatatactcagcttctgaaacagcaacagtttctcggtcaacaaatgctaaggactgtatgatgtagattttttgtgtgaagtagcattatcctttttacttggttgtttcagggagcaaatgttatcctgaaaaatggaatttaaggtgtaggtcttctagcgaattatttttcgtatgttgtccatctttttgttgtttgtttgttctgttatgcattttactctccagaatatgttccttatttggctgcagtataagtttacccatttagtgaacaataaatttaaacctgctattgctatacttgatgcaattttccttcttattacatcactgccatgcaatttgcaagtacatagcaacacatgccaactgaaaatgtgtacccaactctgtggactttttttcccaactgacttaactaagataatattcctgcaggatgttctcctggagcgtcctcgagttatatccacgcaggtttctcatgcctgggacatgcctcagaacacatttggtgcagcatatgctcagttcatgggatcaaggaacttctcaccagatgaccgcccacctgtccgtttcattgacacagatgagcttgcgtatgttgcgacccgtgcccgtgaagtccatgacttttggcatgtgctgttcggccttcctacgaacctgattggagagactgcccttaaggtcattgagtttgaacagatgttccttcctatgtgcatgctttcagtcgttgggggctctgcaaggttcaatgagaaacaaaggacactgtttttccagcattatttcccatgggcttcaaaagctggtcttaagtgcacagatcttatgtctgtgtactatgagaagcattttcatgaagatttggaggaagtgaggaggaactggggaattataccgtgccctaatcccaaaaggagcagtgtttagacttttagatcggtacattttgcatgaaagatgtatgaacttggtatttagctttgtctatgttagtattagctctttcctttgaagaataatagaaagagttatgctactgatacctaaaaaaaactagtaattctctgtaatttagcatagcaactaagcttgcaatgtcaatgttccctttaacaatagtgtagatgagttacttacgtgtttatgtgtaatactagttgttttgctatggatagaagaaaatgtattataataatatctaaaataaaattatactagcaaaagtgcccgtatgttgcaccgggtgattacggagtgtgtatattgaccaaaagtgttgtttggtttagaaaaagtgcccgtgcgttgcaacgagaaacatacagatcagaaaaatatgcaattaattaaaatacaaacacattcaataactataattataaatgcttctggaaaaaatgaagtactaaaaatgaacttcttttctttttcttcggcctgagggaccaaaaatagacttctttctggcccttgccagtcagcccaggcctttttcgctcacgcgggcgcacttcccctccctaggccgcaacctgggcttgggctagaaaagtggcctcgctctcgatccctcttgggccgatttcggcccggccgacgccggccgtctgatctctagggttttgatcggacggccgagcgtcgagatcggggaaacaaaaccccctctgggtttggtgtgaacttctgtgatgtatgttggtattgttgttgttcttggatgattttgttattgttgttgttcttggatgtggtgtatgtcgtcgttgttcttggatgattgtggttgattttggaggcaaagagtgattgattttttttgggcgacggacgaaaccggactgaaaaaggcagagttgttgattttttttgggggcgatggacgaaatcggactgaaaacggatggaccaatcggactgtgacgataggaaaaatacaaatatttatattattagttatatatatagatatagatttactatatggaatattcacctcaatttgattttaagggtatgttcagattggtgctaaaataaatcttattaaaatttggcaactttaaaattttgataaattagcaatatcgccaaattttcataggattgtcgtacatatgctgaggaagagacctagacatgaccgaaccgtgtcatgcctgaccgagccaaatctccgtgccattaggctatgggccattaggcaagcggttcgtcgtgaagtcgtgatggcgagggatggagatgggcagatggcctgtaccccacatgttgtagctgcagccgcatgcacttgcccgacactaccatggctgccgcacggcaccggccatgtactccttgctttgctcacaaaacgtacgtattcccggccgcaacagcatggtcaaattggtgccgacgcgacggtaaggccatgtacagtgcgtatcctcaaactatagcctcgctcacgccgcccgccgcccgttcacgagccatgcccttggagggaggcacgaccctcacgagggaaacacgcgcctctacctcctccaattcccttttcttgaggccgaggcgaataaaaggaggggcgacgaagaaaaagagaatagagagagggggagaagagaagagaggggaacacctagtgtagacttttgggttgggacacccactatgagcttgagtacttttattcaattgcttcagattttgagaagcctatttagaatatcctccattggaagatgagtgccccagagtgtcctcagttagtgagagcactctaagaatggctttgattgtacatgccctaattaactcccgtctgttggtggtggtggtggggttcgtagatgatcttgtatggggcacgtatgaggcaccggagcaacacgtacgtggcctcgttgggggcgatctcaacagggggatagccgtgttgttgtatgtatgcgtacgttagctgtcgacggcttgcaacaccctgactacatgtacacatatatagctaaagaaagttcgcttcttcttcagtggcgcccgcgttgagctgctactgcatctcatcaccagctagctctgtctcttcaatagtgaaggcttgtaggcaggagcgcgcacggtacagtctcatgcgtggcgaatggctcgccaccttgcacaagctccaaccaccaccgccgtcgatggcacccccgtcgcatgccagttagcgccatctttaccccgtcaggtgctctccctactccctcacctcgcctcctcctgctgcattaattcccgggaaagaggggagagacagagagagacggggaagaaaggaaagagaggggaggaaggagaaggtcaacctcactggctcctttgcgtccctcctcttcttctctgtcatggaccaccggagtccaccttgtctccgacctaccatattttagtacttttttttaactatgatgtcacattagcaaaaccaatcatctatactgtcatgggaactgacttaaatgattttgctggtgaagatttctggcaccgtgctttagggatatcgattaaagacaacataaagacgagggaagataactggacttattccagctaccaatagtgtaggcctgcctgccgattcttccctacgtgctctgcatgtacacaggcccttgctggcccatatataaaaggtgcgatgtggctgccatatgtagcactataccaggctcgatggagacgggaatagattttaaggatcccttaattaggtcagttttctttaaatataatgtaaatgattacgaacaatttcaaaaaaataatgatgtagtgtacaagtgacatcaatcacttaaaaattcaagttaaaaaaatctataaaatcgtcacacatttgagcatgaatagtaccggtactgttaatatattggatttgtctttttgatgtgcgagttaagtttagatttgattaattggtactttatataagtttgaaccttttcctgtagtttttaatttttttatatgaattctaagtttatttcacgtaattttataaattttatatgttggcataattgattattcaaccattgaagagtgataagtaatagctaataggaacgtgatgaaaccattaaaatattctgtagggatgagaaaagtaactgaaaattttgaaaatttaatttagacgcctaacactactaaaaataaatccaatcaacttggaacaagttcaatggaacaaaacccatcaattccattattactcgaaataaatacaacaagcttgcgatcaacagtacattgatcatcaactaatgaccaactgcatgccacacaagcgttattacaaacagttcatggccttaagcaaagtacgatgaaacacacgccaattacaacgtacggattcatggatagacagctagttaattactacctccgtcccaaaataagtgcagccgtggatatccgtgcccaacgtttgatcatccgtcttatttaaaaaatttgtgaaaaatttgaaaatatttagtcacacataaaatactattcatgttttatcatctaatagcaataaaatatactaataaaaaaattacaaataaaacaaacggtcaaacgttgaacgtgaatagtgtaaaactgcacttattttgagacggaggaagtagctagccagccagcaatggcgtctcctccggccggtgagcaatgcaagcttgttgacgtagtacacatcggattggaaagcttgaaggtgcgggctcccgccgccgggccgaggaggtcgctccactggtcaccgatgttaccgacaatggcatagccatcgctcaccagcttatgccgctcaccgctcttgaacgcctcgatggagagaccccccgtcggctgaagcaccagcttctcccacccggagtagccctgttgggaaaggttgcggatggtgacggccctctggttctcggtgcggactgtcaggaacaccggtttaatgccgagctcgagcagccgtcggtaaagtcgtagcgtccctgctagcgccggtgcggtcccctgctccacgtattggaggaagctcctattgtcgtacggctgggctctgtaaaatggataatatatataccggccgtttcaaaaatgtgtaagcatgtagtattagcaaaaaatatattacacatgttcaacttttttgttttatgcaaaatattttaagcaactaaaattgtgcctattttactacataatgtctaaaaaaacttttatatttttttactaccggaaagagtattttagtcatcactacctcttatgatgaacgggcatcaaacaattgcaagaggtattcattcattactagaaatatgagcgcggcgccacgccgcgcacgttaatatcgacgtggttagaaccacacataatcaatgttaatttgacaacgtggagtggaatattatatacatgtaaatttggtttaacatcagtttattatatgggcccccttttttaagaattgttagtttttttgccatctaaaagtggataaaaaatggtataattttggaaaacaagcggtaacacgcaagaacagcagagattggtttgaaaactataatttagtcgtatatgggtttataaatgataaacaacaggtttactatgcagaccaagtactaaacgaatttacagcgagttgttaatacttgtataagggtctgcacatttatccattactttttccattacataatgtaagttattctagcatattacttttttcattacataatgtaagttattctagcattttacatatcattgtgaatgttactgaatttagacgcatatatatatctatattcactaatatccatatggatgtagaaaatgctagaatgacttagggtgcgttcgtttctgggggattgggtgagaaagcccatcgtatgccgcacgcacgctttccaaactactaaacggtgcattttttgcaaaaattttctataggaaagttgctttaaaaatcatattaatctatttttaaaatttaaaatagttgatactcaattaatcatgcgctaatgactcacatcgttttgcgtatcttcccaatcttattaatccccttctgctcaaactcacccttacattacgaaagggagcaagtatatggttattggtaaggatttatagggaggctaaggtctagttcaatctgtgaagagtataagtcagcagcctatatacgtgttggaaagttactttatcagtatggtattatcgtgccttaattctgggctttggaacatatggtactgcgtggggccggtagagttaatattagggtgtgtttcgtgtactctcatggtaccaaaacacaacagagcatttacggcaagagtagtcaggaccaccatagtaagatcgaccagaatacgcagctaaagaaaaaagaataaaaataaataaatagccatcagaaaaaaaggtagaaggaggaagacggaaacaaatacgataaatggagtataagggaaaaaagcacgagaggaaacaaacctttcaaatggcatatataatcggtggaaaaaacaacatatccaacagggaaagaaggattagaagtaggaactgtaaacgaggaagaaaaaaaaaagttttcacaccgagcacgggaggaagaaactaagaataaacaaagagcagcagagaaaacaaggctcaacatgggagcaaataatcaaagaaacgataaaaaagataagataatgagaaagaaccaatctggtgaagcaaacaaccgccgacgtaagatcgccaatttccttttccttcgattcaccaaagactggtacgaaggaccagacttgaacgatgcagcttaaaaaaaagtagcatgatcaaactatctaaaaagtagagggtaaacacaaatttaaatctaatgagtatcgaaaagcatagcgcgctaatcgtacagtaaaaaatgcaacggaagaagtcatgtttaaatttgggtcaaaaggagaataaaaatgaatatggtaaccaatgaaactgaaattaccagtttgtcgtgtcagttcacatgctgagcgcgaggaaaaactcctaccacgaaggattgcagcacggcgagctctagcagctgatgcagacggcataaaccaatacggccaagcaagtatacccagtgcttaatacgatttggcaagtaaaaacaataaacacataagtttacagaaacaaggaggcgtacaatcatcagaaaattagcacagtataattgaaagaacagagcaagcgtcgggaacgggaggagaaaataacaaagaaaagacaaacaacaaagacaagcaccttgaacgaacggatcgcagagagaacagaggagctatcactaatgcagagaggaacaatataaggggaggagcaagaagagacaacaagcaagagcatggacacgcataaaacaaacagcaggcatgcaagctgacacctaggccattaaacagtgaatcaaatcgccagcaacctctgttaacagtaaataccaaaagaggtcgggacacatccggaagaatacaacgcatgggacaacaaagtcaacttacagaaagaacaaacggacagcaaggtcgacaagaaacaccagctgtttttttaccactaataacatattaaagactaatcgagcaatcaacttgaaaaattacaaggcatcacagcaacctacatcacccaaagggcgaaaaataccgcttacaaacggaagttaggcaggttaaaataaatatgcccatgtgtgtacgtagttagtacacattttttttacccctacaaacagcattttacattttaccaactacgtaaatctgtaacactgaaaccatatttggaaaatagattaacataccgcacacaacagcaaagagggcaactcgtcatacactgacacctgatgaaaaagggagatttttacaagcggtaatacatatcatcaatcaaggttaagcaaggggatttgggaaatttaacaagcacaaagtaaatctaggtgttataaaaccggccccgaaatcacatcggaaaccaaatacggaagaaaacgccataggagatccaaacatgatgacaacaccgagacacgatatttgataacggagttcagccgaggcctacatctccggggcactgattacgggcgcttctccccgatccagcatattacagcgtatgagagttacaatgactcacggtcggtcgctgccggtagctgctccctctcgctatgctaagtcaccatgcggttacaacaggcacgctcctctatttatgagagaacctaggatagagtccgactcttaccctagtcctaatacctattacaacttcaagtccaaaactgtaaccgactacgtacacatattcgatataaactctaacaaactccaccttggcgaatatgccatgccaacctgaatttgttacttgctcgaacctccgtgtacccggacttgagttggtcatttttcgctgctcaggccgagctgccccgacaaacctccatcaggctcaccgtaaacaagagactcccgctatcccggtaacttcttcctctcgactccacctgcagcagtgctacaccttctctcatatcaccatagttgtcttgccaagcgaaattgaattcctttctagctgtcacatcatagactccccgaagaccatgttcacctccatcttccgtcttaaatttgacttgatctaatccatggccagataaccgatgtcatcaccaaatagataaattgaacttactagacatgaagagaacctttcttgcttgttgtcttatgaactgagctaaaaaatccaatatccacgcttctccgtatctgtagactgagtatccgataatttgagaaaatcaccgttgcgttgaatcatctgaagaacttattatcatagagcttgctctttctcttcagtgatgcagattccatatatccccatcatgcaaacccgcagattctggatataccctgtattgccaaacagaccgttgacaccctcaacgattttcccccgctgttacccgggatcttcttcacgcacctttgccacacccctgcaccaccgcagccttgccttcgaatcataatgcagaagccctgatgcacagttatttgctgtcaattccagccacctagcctccgtgctgatctccacgtccattgcgactccgagttgataaacaactctgcaaccgtgtcgatctccaccagctacgcaaactgcacatcctctgcaacctgattccaataccaatttgctgctccgtgcatggacctacacacaatatgcccatggacttccctgccgcatgcatgcacatatccagagccaccacgaaaacgagcctgcatgcacatgcatccaattaactactccatgcatgtaaccatgcaattaattaattgatgtcttcatgcttgacttgttcttcgtgtctgattatgatccatggcaaaaaatccaaacggctcctattgcttggtccaattttattgtgttgctcctgtgtgcaccgccaccgcctcctctgaccggagccggcccgacgaactacgccagcacctgcacgacgactacaccaagccgtggtcctaccgctcataattcgttgcccaaaccaccgccgccaagaaatcgggaccgatctcttcatcgctttggttgtttgattcgattgcaatctctgcaatcccgtggattcctcttgctgctttacagggacaaattgagcccgattctatttccaaatcgaattctcctccgatcccctttcgtgtctgacgcggtatccttcttgatctctttttgttgtgtgtattgaagccgagctcgtgctcaactccttttctaccacggcccccttcgagtcgagtcctgcatgaacccaaatcgggtctgctaccaccagcaccgcttctgtctccgtcgtcggcttggcctcgcacgtcgctacgaccctgacgtccaagcttcacgtacccccagcgatatcctcgctccaagagcaagcacacacaggacatagcatgaccaccgacatcgtcaatgacttccgctgccaatctgcgtcgaccctatcctgtcctctgtaatccattgcatgtacgtctctaagtagcaatcctccatgcagtaccttgccgtcaacacctccaaaacagcctctaggaaccatccgctccgacttccgattgaacgccatcaatctagtcaagagccgaagccgacaagtcacatgccgtcttcccagccgccgaacgacctgagcgctacgtctagccgtctccctgtcgaacgcagctcatcgaaaggcccaggtcacctcgcccagagtgttcgattccaccaaccgagaacgccaatcgcctccagcttcaatcaaccccgagcgtgtggccacacgtctccctgttgagagtagctcaccggaaagttcgagccacccacccgaagtgtccgacccatcgattggatcgccaatcgcttccgccgccatcaacccgagcaccacgtttagtcatctccctgttgattgcagccatcgaatggttcagacagccacctgaagtgtccgattccaccgatcaaaattcctttgatcgccgccgtgctccaccttgcgtccatgtccgtccctggacaccctgtgtagccgtcgcggcgtggagcacctccctcgtacctctactatggatctcccacaggctttggtaccacttgttataaaaccggccccgaaatcacatcggaaaccaaacgcggaagaaaacgctataggagatccaaacatgatgacgacaccgaggcacgatatttgataacggagttcagccgaggcctacatctccagggcactgattacgggcactcctccccgatccagcatattacagcgcatcagagttacaacgactcacggtcggtcgctgccggcagccgctccctctcgctatgctaagtcaccatgcggttacaacaggtacgcttctctatttatgagagaaactaggatagagtccgactcttagcctagtcctaatacctattacaactctaagtccaaaactgtaactgactacgtacacatattcgacacaaactctaatactaggtaggaaaaagtaaacagcaaataaattgaaaagagggccaaaacctgcgtaccgtagtgcttggtaccatgaaatacaaaaaaaaaaaacaaagaattcggcaagtaacgatgtacagagcgtatagccgtgctgctccttcttctccatacacccccacagtaaaatttccaccatctctctccatcgtggagccattggaaccggcatattgggggcatccccccgatcaaaatctgtccggcgagcaggaactccccgacggcatcgggatagagcggctgacgtggacgcggttcaacacctccgacagagcggggacggcggcgtccgtgcagcacaacacccacgcagatcccacagagctacccctcatcctaatcgcaatccccggccaggaacgggcaaatcccatcccccatcgtcggcacctcctccggtcagcaaacacaacggaagggaacacatccaagatcgaaggaaaaaaaagcagtcacaacagaggggaaaagagactgaaccgagtgatgaacaaatacagcaagaaagaacaaagaacaacacaaccccaatgtggactaacctcgaccgattcaggaagggaagatgggaagcagcaaggggcgccgacaaaagcaacaggacaggcgagctcgtacgaggaaaccaccggcgacggggagacgaccaatccgaagggcacaagaaagaagaaagggtcaacgagggccccatacagagacggccggcaggggaaaatcgcacctccatacccaacacaagaacaaaccacaaacacaccccaaaaacagaattttgccttcttcacattcaatttacataaaagctaagggcctaaacagaaaatcacaaagacacagagtacagaatagatagaccgatgtgaaataatagaacacacaagtggaccaaaacaagaaatggcaacatgccacgcgccattcaacgcgccagccaaccggaaatagccgtcactgtgaccggcatccaaaccccaaatgcatgaactaattacctgatcaaccggcgtaattaagcaggcaaccggcgcaccggcaaatcataaacgcgcaggttaggccgaggagcagagaacagtaaacggagacgtgtaaaaacaatcagatagccagaaaaaaaccaaaatcacgagaaaaacggtggggttaggggagctattgattgatgatttatgccccctaatgtataaacgttgttatatacatttgtcccatgaatatggtatacatgatgaggccccctctttgtactcttctgtaacagtttcaagttactatatggtatactccgtacattatgtcggttatcatgttggctttggcgtttttcccgtctcacgacatatgagtaccagatgtgttatactcgtgatagaaatagactgatgcacataactaataacactggccgttaacccgtgtgttatttgggctattacgattggtataaaataaatactgaattttaaccatacattgaacgcattggttattttctgagttacaactggtttttcccatgccctaattagatcgatgaaacatgcaagtactaattccaaaatttcagaataataaattgagctatgatatccacctgtatgttttggtttgacacatactatcataataatcgacctaatcgacagacggtcaaatcttcctatatcgtattcctaatggactctacactcttattttcatatttcttatattttaattccgaacttaagttatttcctgtatagactctagactcttctcctaatcttcattattttttaatttcgaatttcagtgttttctaaattgtaattctatgtgaaccctaaaccataaaatctattttttgcaggcggacctattaagaggccacacacaaaaataagcatatttttttttgcagacaggcctctttagaagccgtatgtaaaaatgaatgttgatttttgcagacgtgaccaactacggtctgtcttgtcttgtagtaaagttctaaaaggacaatgagttgtatggcctctcttttcgtatgcgggttcttaagtggcctacacgcaaaaatattcattatattctgcctttttttctccccttctctctcttcacccacttcaaatttttttcacctcctctcttctctctcttccactcccttttattttcactcctatcatgtctctctttctcttctctcccctctctctcttcctttcctctcctctcctctgagcgtctggcgcacgggtggcggctggctcggcaccgaccatgagcaagcggtggctaggagcgggcgggcggtggccggctcgggagcggcgctaaccccatccccgctcggcaccactgccaacgaggaggaggaggaggaggcggcctagagcaccgccgcatggccggattccggcgctggcgccgccaccaccactgcatgccagagttttgatttttgtttttgagatttttattttttcggatttatattttttgcatgaggaagacataagcacccgcaagtgaaaattgaattttcgcgtgcgtgtgtcacccgcacgcaagaatcctgttttttgcagacacttccgggcagactggccagagtttcacatgcaaaaatcccttttttgccttctggaaagattgtttctgtacttgtggaagatttgacaaatctaatagcgttttctattcttcatgaaaaattaagttcaattaacttcgaaaatgctcaattctagaaaccatcttgacccatcattaataattccactattaattactgtaaaagatacaacaagcttgctcaacacagtacattattgatcgatcaatggccaattaccaaacaaaccattttttatagcaaacaaacgttattacaaacttaaatcccatcccaccgacaactaacaagcagaaaccctctccctctaaaaagaaaaggagaaataaagcatatgagtcgaagattaattatgagacgcaattaatgagaaaacgagtagatgaaacggacacgaagcatggatatatagttagctatatagcgggctagctagctagtcgatgtagtacatgggttagggaacttaaaggtgcggcaagccggcaaccctccgcgatgagcgacgaaatatagttccactggtcatcgatgttgcctacgatgatgtatccgtcattcaccagcttctgccgctcgcatgtcttgaacgctagcgtcgaggtctctagcccttctggttggagcacaagctttcccaaattgcagtagccctgctggagaaggttgttggtggtgagctccctctggtcgtcgtcagtacggtcactcaggaacagtggcttgatgccgagctgtagcggctgttggtacagcctcagcgtctcctcactggagaatgccttttctctcccaattagaaactctttttgtagtcccggattataaattaggagaagaaattcgggattaaagatagcggtttaaatacccgggaataaagatgcatctctactctcggttggtgttaccaaccaggactagagatattttatctttttttatatactcgtgaatcattgtttttagctatttgcacttgtttttcaaccaaactcatccacagatcatctcccgacatcccaaatcattcgtaacaacaaaatcatcatccacaatttcaaatcatccacaacaacatatatagtcaacaaaaatatcatccacaaattaagagggaaaaaaggaaaaaaaaacatccggcgtgcgcccggccgcctgccgcccggtggccgtcgctcgccacgcgcccatctgcgccgccgcccacctccgcgcgcccctccgtgccgtccgccacccgttgcgcggtccttcatgccgctgcccgcggcgcctccctcagccgctcgctcacctctaccgcaagcaggcagaagaacacgacttagtaggaataaggataagaaaatagagagaaaagagagaggatacgaaaagaaaggaggaggacaaggaaagagtggttgctagaggataagtgcgagggattatatactatgcgctgatttttagtcccggttggtgtttccaaccgggaataaaaagagtagaggagcagacacttttcaaccgggactaaagatcataaaaaggctatggacttttcaaccggggctaaagatgatttttagtctcggttctttttggaaccggggatggttttcggctgacctagcaaaaatcagttctctagtagtgcctgcagagcgggcacacctcttgcacgtattggaggtatagttagccgaaaggctcgaggctcaatggtctggtccatggcacgaagttttggtccgtcctaggcatggcacaacccgaccgttgggccgtgcttgggcctctgcatcggcatggcgggccggcccggcacggtctaaagatttaggaggcaaaatcgataagggagccaaaatagacttattccagtcattcaaggcaccgccaaagagttgtgggatgcaaaatagacttagtatagctttatatataagacacaacccaatgagttgagggacgcaaaataaaaatttttctaagaaggagcacggtggctttcgtgccttcgggctagcgggacacggctcgaatcttattgggccgtgcctgggttgttggtgcagcaagtaggcgggcatgtaggtcggttgttcgactaatctcggatccggcttgatcatggccgggccgtgctgggctaggcggctcgtttggtcatctataactggaggcagtttacattgttgaatggttaagtcctgcaaatcaagggagttagattttaaagaatcatagtagccaatccatattgtatattgtattattattgatattagagattaaaattttaggtatatatcaccaactatgttggtcatatttggaattatagcgcttaagattaaggaaagtacacgttgtgatttttgccttactaggcccccgtgtcgccccgctccagggcaacacgggcggcgacgccacaaaccccgccgccaccccttccccctctcctcctccgcctcaccaccaccgacaaagctaagcgacatcaaggacaacaaatgtggggcctctcccttcgctccagccacagcggttggggcaacaccaagatctcagctggaggggggtggcgaccgtcggcgctagttctggcaccgacgaggccggtcgcagtggattcggcccacccgtacccagatcgggcaacggaggcgccgacggcgccgcttctggcttgaggaagaggccacggcggatctggggaggcaagtccgaccccctgcggccaaacgggaacgagattgatagcacggtggcaaagtcggtggcgtgcgtggccctagagtcacgtgctcgcgcgggaggcgctaggcggcgtagacgcggccggcgggcctgggcggctggaggaggagggcaattttcttatattattaacatgtatatattatagatgttatagtgcaatttttgaacaccctcccttaaaatcgtgggcccgccacacctcaggccaaccaccatggatgcatatgcaccaaggaatggatgcaagcaatgccctacctagagtgtcaagttagttcattttacgtactgataccatcaagaacatatggaccaactataaggtgtagtgtcccatgcatacagaaaacaaatttactactccctccgtttcgaaatgtttgacaccgttaactttttagcacatgtttgactgttcgtcttattcaaaaacttttgtgagatatgtaaaattatatgcctacataaaaatatatttaacaacgaatcaaatgataggaaaagaattaataattaattaaattttttaaataagacgaatgatcaaacatatgataaaaagtcaacggcgtcaatcatttcgaaacggaggagtattcaacaataatctgtgcaagctcatggttgcttgtgaacagcgaaaataggacgcttcgtaggatcgatctgaggtgtttgttttcaatattaactagcgtatatagtcacacgttcgcctgactttaacctccctctatactgaatgtgtttttacatattatttgtggtttataaacatataatgaggattcatttgaatttattttaaaattatttatatgtaaataaagatcacggatagtactgcgaggatatgactagggtttatatttatcttctccattatattttctctctccctatccgctcaaccataaccatatctgcgaagatatctttttctcatgtacttgagccaccgcacgcgcttcttcaccaaattaccaatcagcatctccatggttgcatgacccctttatcttcatattatattctattcattctcattttcggcaaattatgtttttacatacttgaataggtgttaagaaaatgtactatttggcaggaaatctaagtataacacaaattgattgtcctgatatgtaataaataaatattatcacggaaataaatattttacaatgattatgctaaacttgtgaaactaccctaagaaacagactataaaattttaggtgatcttatcatttattttttaaaaaatgataaacaagaaaccaggagacatcctgttgagagataaaaatccatctcccttattatttctcttataatgatatattcagtcacataatggatgtcttctagcggaactattgaactccctcgggggtacgaccctcctttgttgcatgcagtccaagtgattacaaaacatttttgaagatggaaaacatagatggctgtgttacatattcgtggaaaattttaaaaaatacatcacatcaggcaagaaagtaaagttcagttaaactcgtagttggattgttacttttatttgtcgatgtatagtttaaatttgttgattaatttttatccttcatttttatggaggaatgtacgtaagtggcaatactatatatatcctcacatgtttgtgaatggacatatatatcatgaacgattattttatcttcttttgttcttaattttttataattcctgcaacaacataatcgtagtctttaaggtcttgaaatcgactttctatctccaaaatgtgatcaaatcccaaaaagagtggattttaaattaccattttaatatctggctaattactaacccaatctggaatttcctttgggccttgttcggtttggagggggttgaagggaattggaagggtttgagggggaataatttcacactataatagatgtggaataaatcccctttaatccccctcttgggattaaccgagcatggccctggtgaaaacttttcttgtgggctagcaaaactgccgaggaaattgctgtttccttaacggtgctaagcaaactggcaataaattgtactgtatatttattgaggagtgactgcaagtatatggtagttttctcgggtgtttcactgaatcagcaaattaagaaattgccttttattgcgctttattcgaaaccaccaacaatccttttctagatggtgctaagtaaagtggcaataaattgtactgtatatttatagaggagtgactgcaagtacatggtagttttctcgggtgtttcactgaatcggcaaattaagaaattgcgccttttattgcgctttattctaaaccaccaacaatccttttctagacggttttggtacttccttggtggttttgtagcactcaagaaatttcctgatgctggtaattcagtcaggccatctcgaataaaactaaaaattctagagagagagataagttaatttgttactatttttgaagatttgacaactccaatcacttttctgtttatgtataaaaaactaaactcaaagaacctcgaatatgttgaatgcaactctattagaaaaaccattttttccgacgatgacattttttttttagccaggtagatctctcggagctaaatggccgcctacgaaaatgacaaccggggtccgagatcgccgtccgcctgcgaaaatatattttcccatgcaggcggtaccttaagaggtctgcatgcaaaaatattgagcaccataaaaatagtcacctacgtagccaaaaatcgttaagtcccgcccctcccacgagtcttttacccctataccattaaaaaagttgctgcttatctgtgtgccacaaaaaagtttggagtcacctgtatgccatgagaaaaactttcactgacccgtgtgccattccgtccaccttctgttagaacttaacggttccatagctctgacatgtgggacccatgtatgaaaatgactaatttgcccctaaaggattttcagctctattctcctcttctgctatctcccgtgagtgcctgctctctccctgttgcgccgcacgccgccgcaccctaaccctagccgcacgccgccgcctcgccggagccgtcaccgccggaagaagatggcccggtcgtgcgatgccatggagagggcgcgtgcggtggctggggagagcggcaagtggtgggcgctgctgctggggtggtcggggaaggccgactacatcgaggcgccaacgccggcgaaggagaaggcgcgggagctgcgtgcgaggatggcggagacggagagcttccacgacgccatgtaccactccgccatcgcctcccgcctcgcctactccgcctaggcgcgccgccgcctccgccggaggaggaggaggagggagatgagtccaactcgccgccgccgccgggggtggcatcgccgcgacggcgtgtatataaaacccgggtgggattcgtctcgttgctctagctgctgttgttgcggaggaaatttagaagggatctggtttttttagaattgatcccttgcatccatccatctactttgccttttcattttcttccgagatgtaatctggatctgagatcgagatctacccgcttgtggtggactatgatgcatcagatccattaggtttgatatgaacttgttgctatggatgcaatggtcatgtatggtttgatatgaacttgtcgctatgggtgcaatggtcatgcccttgttttttccttgtgatatgtcgttatttgttggtatgcaatggtcatgcacctgttttttccttttcaaaaaaatcatttccgatttttccttattttttccaccattttctaatttttcccacattttcctaattttccccggaattttaatcatttttaaaatttattctcactttttctgattttttgccttttttaatattattttccattttttctgattttttaacgccttttccaaattatttttaatttttctgattttttaaacccattattgtacacaagggcaaaactgtctttatatagcccctaacacctctgttatgtatccatccatccaaaatggcacacgggtcaacgaaagttgggctcatggcatacaggtaactccaaacttttttgtggcacacaggtaagcaacaactttcctaatggcacaggggtaaaagactcccccttccacctctccctcactctcctcagcatgtatcctcttctcctttccccagcggcagcggcgggtgacgtcggctcctcccctttggatctggccggaggtaggttgtagcactcggcggtagagaggaggggcggcgcggtgccggcggcgggtggcgtcggctcttccccaccggtccgggggtaggtcggcagcgcccagtggtagggaggtggaggggcagcgcaacggttgcgggcggcatcggctcatcccctccggatcttgcggcaggtggcttccggctccacctctccggatcttgcggtgggcaaggtccagttcctctcctccggatcttctccctctccttggccagaggtttggttggtagagcgacggcatcctggagcatccgccaggcggtagggggaaggaggggcggtggcggaagctcacgtggcggctcccctctcctccctttcctagatcctcgctccggtggcttggcgcggtagcggtgactgcttgctccaccgacaacggccatctgcgatgatggtgtgatggatttgttttgtttgtgaatttatgatgcttccgtgtggattcgatttgattttggagatgggggattggattagattggatgggaattgggaattgggaaatgggaaataggaagctgcggctggccaaaacggcatcagctgcaattttttttagcataacaaaatctcttcgcaggcggatcagttgcccgcctaggaaaatcatggtttttacgggcgttgaggtacagacgtcattgctgtccgcttgtgaaatacgttttgtccgcctgcaaaatacctttttttttaagtagtgcaagacatcatattggcccatcagttccattattaattctgtaaaaatacaacaagcttgctcaacacagtacattgaccaatcaatggccaactgccaaacaagcgttattacaaattcaattttcatctcacgaaaaattaacaaacatatcaaacatatgcacgcgtcaaagattaattactagatgcaaattcatgacaaaaaacgagtagatgaaacagacacaaacaaggtatatatccatggatagctagctagctagtcgacatagtacatggggttggggaacttaaaggtgcggcaaccatccggcgagcggcggatgtcgttccactggtcgccaatgttgccgacgatgatgtagccatcattcaccagcttctgtcgttcgcaggtcttgaacgccaacgtcgaggtctgaagcctaaccggctgcagca

SEQ ID NO: 8696 - DNA, 86082 bp, Oryza sativa
accctaacgacgatggtatttttgggacaaaatcatttgtacgatggcatttcttggaaatcacacttgtcgatgatatttctgggacttagacgcttgtcaatggcattttatggattatctattatatttatggatgaaaagagtagtgtgatgaagaaggatgagagtgaatccgaatcttccgccattcatcaaaccatgtggtcaaactggtggccaacgccttccttcccatacgctgaactgctacatatggcactactctgctcgtgttgccgcatgcacatgtagcgtcgctgcctgtatgtgcttgtcgatcgctcacctagtccagataaccaacaggagatagatggcgagagatgtggctacttaaaaggccttgtttggttaatgagccacagaaattattttccacatattcaaagacacctttaaaattctaaccattcgctctctctcttctatttaatattaatccttgatttttcttttcaggaatacgcaaaaggattgtgcacctttgtgttaagactttaagagaaataaaatttacgcaaacggcaaaacaaagaaatgaagagggatttgggaagaaaaggaggaaaaggaggaaaaagaggacttaagcctattctcgcgattacaatgggacgaccaaacgacctagcacgctaagaaggtagcgttggcgacaggggatgggcgagatgccaaagggcagcctcttgcgccatgcctactaccacctcggaccagggccaagaacagttgttgaacacgcggttgttccgttccttccaaatggaccacgccccaagggtcacgaccgtgtcgaatccacaacgatgctccctcggaactttgagtcggcgggagcagtgccactcgtggaaggaaacatcgctagagaggaagcaatgtgggagcccgaggctcgagaggacggtccaccacagctgtagggacttggggcacctaattagaatgtgatcaattggctcatcctgttggtcacagaagacacaacaggtaggatgcggcaagccacgtttctccaagcggtcagccatccagcagtggcgatgagcaaccaaccatagaaagtagcgatatcgaggaggggcgaaagaacgccagataggtagatgccgggatggaatccttcctcagaagaggacaagataggccgagtgggtggaatacgaccccaagtctcatctcattcatttttcaattccaatcctatctctcatttttctattatctaaacatactgtaggggtgatttgtacttcctccgtttaatattataagactttctaacattaccaacatttatatatatgttaatgaatctagacatatatgtgtgactagattcattaacatctatattaatatgagaaatgctagaaagtcttataacctgaaacggggtagtagatattatagatacttcaatttgttttttaatggatatagctaaaggaagaggtgtgggcattaccaatgttcggtaacaacctactagtaaatacatctatatatttattaattttacaaaaaaaattatggttaaaatgatcctacgtcttacgtttttttaaaccaaacggttaaaatcttgtttgcaagaattttcgaagaaaatttagtaaagcacccctgctcttttagaaactaagctcagcgcaaaattgctcagaaatataaattcctctctttctctcttcaaattcctctctttctctcttccacaagctgtgcgacggcgtggtggcgagaatgcgaggcgccgcccacctcgcgcgttccgccgacgagcgcgtggacggcctccccgcgccctagccttctcccctgtgcggccgcggcggcctggccttaccctcctcgcgcgaacggcggcaggtgagcaggttctggagggtgccacgcggccggacgacctccttcctttcccttcccttttgcccgcctgaatccctcacgtttcgaatcgaatagaaatatagaatagcagctcgtgttctttctccccgcaaaataaaataaaatagaataaattattttgtggggttcggccgctgaatgatccccattccccgtgttaggtcctttactgttgattggatggatgccttcttgccatgataaatcgcgtctcgtttatgtcatatatgtggcctgttttcattttgttgttaatgaaatttggaatgccgcttcaggaaaattagtaagattagtgttaatgctattgtgttatccctgtcagccagtaagcaaaatctagaatggtatgatgttcttgaaggtagtaacttttttttttcttttcaaagaatgttcttgaaggttacttgatcttactatgcagagaaatatagtagtaccgtgttcttgattacagatggtgtgtctttgcttcaaatttgtaaatattctagttttgtttggacctgagactgtagttgagctgattctgcctatgcccatttctgaaagaagctatctggagtaatctgttcgttagtataaaagcagcatgggttgcatttttctgtgtgaagctgtctatggttagtgcaatagcataactggttgccttttttgttttcgtgaaggatgagttgattcttcttatgtcatttttgtgtcaagtttgtatggttactataaaagcacaattggtttccatttttgttttcgtggagaaggatgagttgattcttcttatgtcatttgtgcgtgatgctgtccatggttagtacaagggcatcattggctgaatggctgtcatttttcttcccaggtgaaaggatttgcgtccacctgcaaaggcagcaactggagataccgagaaatgggaggggcacttaacaagttcacaagcactctggaaactgctgcgttatcactactctgggaaccgtatgatattcatgattaacctctgcggcaaatggatttgaagcattttccacgcaggtcagcaaactgaatttcgaccatcgcactattcattttattgaagaattgaaagttgttgggcacttagactaactaagtgaagtgcttaattgctgattatcgggtgtgtgaatctgcagcaacgagttgaattgattaaattcataaaagataaaggctgcaattgatcattgtaattaagatcttgtgtgcatcttgtctcctttaataattcactaggtgaggtctctaccttttcagagataacataagatatgacatattgcacatgttctaccattggcccatagataaccatatcgtatggcatactacaacttcaaaaccctttttcacaacactaaagtagggaatagggtagagaagaaatatgttatagctacacatttgatttcctgaatggaggaccatggtgaaacaacacaacaacagaaatggataaacattgcaaaaaggagacctgtttgtgctcataaactagtatctcatgctatacgcacatgaaaacaggagtgaagaacacagcacccaccctgacgtggaaacatgcttttttgacttaggatggaagacatttagtacatcaataaaaggcactttgctatagcaatattagactgtctggattgattctatttatctacaaggatgatcttaccaatgtcacgtaccaattgttactgctaattttctatgctgttggaaaggaaaacaaggttcatgtaggcatcgtatagtgactatatttaagtctctgttaaactgtaagcaattcaacatagtactatttgcttatcaaattagtggactgtgctagtttttctaatgtcacccaagcacagtagcaacgattttggtctactttgtagatttatatcaccaaaggaattgaaaattcagaatttggggatccaaaacccagactcttgaaatgtgaacaggtgcatatgtcatgactttatggagccaaggacccatatgcatttcttgtggttatccatgctcagaagaatatatcagtcagagaaacattaagacaaagtaagacagaagagtcagttaattttgtttaacgtggcttcaaagttcaaaaatattgtggtattcctacttcaactgctctgcattagtggtgttctgcagcttgtttctatagcatgtaaggtggatacctgctgctagttatcaagaagcagcctatgtttgaacagttctcctagtgcatgcacaacttcaaatcaacccctaagattacttatttgagaataccaggatctaacttcactaaagaggcatcaactttacatatagtgcagcatgaggaatccgatttcaggaagccttagtaacatatgttcgacattagggataaatacacatatattcttcaagagcaccactgctcgacagtgctaacattctatccttcaaatgctgtaaacaggaaggaaacagcctcagccttgtagcttaaatcccaatgatttgatggcagcggtcttcacagtaggtatcttggtgaaacagtgctctctggtctccaatagtctattcataaaacagtgctggcttgaaattgacacatctgctctctctctctctctctctctctctctctctctccactttcttcaggttattggtaaaacaattagcatgttgtatgaaccaaccttgcaatgatgaggtttgtcttgaggaatagcagcagtactgcaagtaattcaatatagacaagcatgcaatagccatatttccagctcaaactttatggatgtatataattatatagattggtgtgctccagcattttgtcatcagcttctgggcatcctcttgctctaaacactaaagatgatcatgtgccttgtttatgttctttgtccaaaaaggcatgtacgcgaactgtcaactacaatatattttattattttacctgtcaacagtctaggaatatgcgtttctgtagaatatgcattggaccttgatcttcctatattatttcatatctcctatgtagcaaaataaatgattttagactatggcaaataaattccaaaattacctttgatatttggaaattatgtgttgttatcctatcttttgctaactacaaaggtacaagtaaaatgagctcacaaagtgccaattttagtgttgctgtgctctggaatataattatctaagagaatctttaccagttctagtagtattttttttggtggctccagataagtggttattaattatttaacatttttataactagtaaaattgcagattaaatactatcgcaatgccaaattaaacctaattttactgtgtaaaaacacttgcagatgtatagttcttcatttcctcaaaacatcaaatgatgcatagaaggatatggacataattggttggtctattaggtgatataagcgattttgatctagggcaaatttttttcccatagataatttcctaaggtgttgatatgattatatgaatatggctaaaactagggcacgatgcatgacatacagtttcccttctattttcctaacaaatatgaacaataatatgactataaccgagatcattacaaagtgttacaatgagcatagtgcataattgatattagcgtgaagtgatttgatattatctctttcctgtgtttcaaatacagtaattacaatataattacaaactagcaagagttcatgttgcatgtttacttgctgtaaaatcttagtaatgtgaagcacacatgtacttcactacgtaacgatggaaaatagtggtaagaaatcccaatgtgtagtatatttgtattctgatcagtgtgtaagttggttgccctgttgaatgtatatggagtaagtactactttcctgttgaaattccttcatccaaattcattctaataatggtctagtggctctaaatcactgagtaatggatttgcgagatccaaaatctccaaaattttcaaggaagaatctgtctctcttagcttgctccactgccataagcagatgtgctgcaaaaaatcccatctttataaatgctctttggtcacttttttttatgttgttcttcttaactgaattgtatggtgcaggatccagtcctgtaaatataaacatgaaatatcatcccacacaaattcttactttccatggaaacactttgcttagtctgtagtttctgatagctgttgtttctccttatttgtttcattatttatgttactagcaatatgcatttaggaatatgcataagaaggaacatgcaaaaaagctgaaacagtgcaaccattcttgcaactatgagaatagtgaggtgatgattttgccacctcactttgttatcagatttgtgctctgtggctattatttgttttgcatcttgttgtcatgattcgccaagataagaactttactgacactaaccatttaaacaagtatctatcatttttttttgagaaagtacaattggatgcacacacccacacacgccacactaacaccaccagacgtgtgcatttcctctgcacacgcttcacacgccacctagagcgcaggcccacgcatgctcactaaaagcacaagtgcgtgtgtacttctgacattagtgggtaccaacgtcaaatttaggatttgaaccttggtggcctaggtgcacagcttcaccacctagccatttagccatatgcaagcttccagtatgtcattttaatatactgttccaggttaggattctcttatcactatccagctgagataccaataagtcattatctttgctccaattatacattttattcctcttttcagcatctactgaaagtagtggatgggaccagctaataaaatatacaactataactgaaaaaccacgggaagtagctactagaaagatttatccatccttttctgcatgaagtggaataaaggtagaatttcctgcccaccatgcatcttcctttttatcatccagttttcatttggtttcagtgtgaaagcatagggatgccactgtttctcttctttctttttagtaggatgcctccttcggccatttgatggttatgtcttatttccaatctttgctgttagctttttttctgacaatctttcaggatatgtgagatgtggcgaaaaggagcagatagtagagctcctttggttcatcagatgatagatctgcctgagcggtccaggccttgtggtcttgcatgttagatacccctagatgtttttatccatctgattgtctttgagaaatttattggtctgatttagctagaggaagggcacagctctaactgattgaacagtggtgttgctaataatagatattacacatatgaatttgattattgaaaatacatacattgttgttggtagatgtacttttatttaatttacttaccattgttctgagttcgtaacttcctgttgttcctatatttttgtgaagtggctttttaacagttggcttattggctagtgactttgtaagtcactttcattacctctctcttttctttgaacgaaccagcagagtgctaattcatacattcaaaaaaaaaggagaatgaaagtgacttacgaaatcactagccaactcactttcattctcaaatacatagaaaataaatgattctccagtcgttatctgattctgttatgtgttttgtgcacaaggttgtggccaagggctgctacacccttgtttttgttttgtcaagtatccgtttctgttcaaccagtgcaagtccaagcataacaccggaatgacatagctgtaaactcgttgaaaatggaaaattattatactgcaaggaagttcaactatgttagttgtgatagttggtgaccctgagtggacaagtactggctgattgtataattttttgttcccctgagaaatggaattccggggtacccattgtaaggaagaaaaaaaaggttcatttgtatttgggattactctgtcctggcgcagtgttatcctatgaaaaacaaatatcattgttgggcgaacaatttttgggtgcttgttcatatttcatgtccatggtaattttcattatttattttacaggatgttagtcctatcatctttgattttttttcatggttgattgtataaatcctaattgaaatatgccaattttgtcatctgcatagcatgcaacctcaattttgttcaatgaaatcaactgagttgtacggaggcagagtttggtggaaggttgccaatggtttgtactctgattatctatataattcaggaaataggataattactttctgttaaatactcaatgcagaatttcaacggttgatgtcattctagggaggcatgaaaatctctcccgaaactcatgtttagtataagatatcttgtaaagtttaaatttgctagatttagtgaatctgtcctccttaaaacattaagtggtcatcagtcactaacgaactttgtcggcttgcgttgtgtgacattcagataggctgtttcccaactctgttacagttacttgcacacactctggagtatttgaattgtagaaataacttctttgtctataaataatgtaatttcataaaatatatattagcaatataatactgttaaaatatttatttattacatctatacagttgcttcttcgggaacaaaccttgttctaggtgctactgttctacaaacctctgctgtgcagtgtcacaaatattcttaaatatctcttgctgtctaggatataaaccacagaaaccaaatgaaatacagagctcagcaacttgtagcattggtactcgagttattgttcaacagtttcatgaaagaaaagtactctgtccttttgttatgctttattcacaggagggcattatcaatgtagaataaaggttttgcatgttataagaaaaatccttttttcctctatatatacaccccccctcttgtgcatggctcattgtgtctcagctctctccacctgcttgaactgatctctaaagcttagccatatatggagtattcaaatttgcgtcgccaaatcatctttatgaagaaaaatcttttcgatcaggtttcatgccttcacttttgttcctttgagaaatgagatcgtaattaattagtgtattgcactagacactagttgatgttttattgcttctcagttcctgagctgcaatattagatgagatagttaactaggagagagagttagtttcttcagtttttgtcttacatgtaagtatataacaaagtttgattgcacccttggacatcccctgagggcacactgaacccctggagaaaagcattatcaatcaatggtcagatatgtggtcatgtggagcttatatcattcatgcactctgtttcaattgtgaatttcatttgcaacagcataactcagttttgtagtgtagtctactagtctgggatgatgcaataatgctcacttagcagttggcacccatcttatcttatctaaaagttatacaactttcttttacatcacatatgcatgcattatgataatgagtttaagcagatcgtcaaggatgtaatatgccatagacaatagcaaaccactttcttaatttcctttgtactattccattgagaatatacaaaaagtcaggtctttcaacctttagagagtaatcatagagtagcatcaatttgatgatacattagtatctcctaggcaaatactagatttcctttatacttaactagggtgaagcctactccctccatcccataaaaaaccaacctagtaccggatgcgacacatcctagtactacgaatctagacatatatacgtccagattcatagtactagaaaatatcacatccggttctagattcgttttttatgggacgaagggagtaagtcacttgctggaacctgactttttttttaatctttgactaattatatagatttacccttgtaaattagtacacttatttgtattatatggactgcacaaaagttttttttttggttgtgtatttcatgcttctttcttttgcctataatctacctcgtggttttcctgcagggttaccttgatgaacagtttaatcagctggaagaactgcaggatgaatcaagccccaattttgttgaggaagttgcggctctgttcttcaaagattcatcaagactgttgacaaatatagaacaagcaatgtaagtaatatgtctgcatccacgatatgaatagataattgattttttgtacaatgattacccatgatttgaaagacatgacaattacatttacttccatttcttttgatgcagtgataaataccctcaggatttctacagattagattctcttgtgcaacaactcaaaggcagcggatccaggtataaaactggggcatatgcccagaacacagagtgaacaatattcttttacaggtctcatcagtgtaaaatcatgtcttaggtcttaaataaccaatataaaaacattcaaacttaagaatgcttattgatgtgaaatgaacaaatattatttgttaatatgaatgttctcaccgaaagcttgtcatctttgcctgctttatgtgttcaaaattcgctaaagttggcctgtgtttggcgcagcattggtgcactgaggatgaagaatgagtgctctgtgttcaaagtaaactgcaatgacaggaatctggaagggtatgcatttcattgactcgtccaacttgttcttcacatactatccaatcatcatgcaatttcctcacatgatgtgatgaggccatgttctctttcagatgccgcaggtctcttcagaagatgaagagggagcatgccactctgaagcagaagctggaatcatattttcaggtatgttgtactacatccttgtctctctctctttctgtttaccttattttcagcattgctacatggctaaacaacttggttatctcctgttccttctgctgatgcagttactgaggcaagttggtccccgtgattatgcagtgagctcaaggaagtaagaagaacagtatgagttccaaggaaaataaagaacatatacatagcagctatcagtctcttgaaaattctgtcgctgaaaagtttttgtgccaatcagatactcataatgcttaatggtgcctttttgttgtgtttggattgcatctgtagctccataatccatatatactgtatgaagttatgtaaagccctgcttatgcacactctccttgcctgtctacaaagtgccatgaacttgtgttattagtcagtaattgtagcagaaagtgtcatggtactaatatgagcttttaatgtttgaaactagtaatatgtaaactagttttttgggttaattaattgcccaggtgccatcatggaaaactatttgtttgtactttgtatactcaacaaacgctatagtcacattcccagaaccaaagacacttaaaaacactggtttttcatctcttccactaatattcataacagtgtttgagctttaaccatcaatatcattttgaacgtttcgatttctaaaatcttaaaaacgttatggctagatttgtcttcagaagtcctaaaaatatcataactttgctatattcttcataagttttatactagtagtaataatttaatcataaaaaaatgattatctatagaaaaagaaatgagaggacaaaaaaaaaagaaagagaaacatcagaattgcagagggccaagccaatcatgggcttggtccataggcccaagagacaaagcccaatccatgggcctgggcttccctttccctccgttttatctactccgatgcacgcacagcttatccgattccatccattcctcaagctctcactcctctctcgcttccatggcgctcctcgccgtccacgccatggccgcgtccccggccaccttcccctcctcccaccaccacgccgccgtctcctcctactgcgcgctccccgccgccgccgcattctcccgctcccgctctcgcgtcgccgccgccgccgccgccaccctctcggccccgctcactccagttcttgaaggtaactgacatgcctacctaacctccctgtctctgttttgttcgtcaattcggattagtctggtgtgaaattggctcgatgatcttatatgaaactgcttttcaaatcgtattgcacgaattcaattgatacagcaccaaaacatagattgaaacaaaaacctcgcagtttgaaccaattacgattccaactcaaattactccatttggtgtgaccagtttactgcgggagaggggacaagaagaccaagaggggaaaaaggttcaaccactcgtacggaaatgtgagtctctagcacaaaaataaaattaataaaaaaatcatatgcttattgcttcctgtgctgctgtttgctgcaattcttcagacttgccatctgctgactgctgtttgctcatctcaggcgaggccgcgcaacaagaagaagggaactggccctgcacggctgttcgcgccgcctgcgcctccgaggaaggaccagttcgacgacggcgaggtcaccccgatcgacatcgacgatgacatcctggaataggttgtctgaatttccccccttgaattatggtttaccttgagcttaccttttgtctagtctgtaccaaacactgtttcttgaaattaattacagtacattacatggtctcattctacataatgtagatgcctatgatttctttccttgtaatatatatgaatggtgctgcttagagtcattttttatgcattaccagctgaagcagaacataagtacagatacaatcaccaaactttcatgttcttgctagaaaccagggaagatgcagtatctcttttttttttcttttctagctgtgtccctgaattcaagcaccttttgacatgcttcgaatttgttgtgatgatctgggaagcagttcttaagaatcaactaataaaccagtccatcagatcgggtcagaaatctgccccttttttgttgttttgtctgttgactctgttatgcgcttgagttttgacacaagaaattgttttgatgatctgcaaaacatattcctttaaagctggacaacaaaccagttcaactggtcagcttggtggtaattgtatgttaaaattctgtcattttttgttgtttcgtctgcaagtttgttgtgagctgctccccccgcccacaagggtaagcaactatctcgcccgaaatatactacaattttggcccaaactggaagtgtaaaccctgctacgcaatggctttaagaaccctaaaccctgaagcatgttttgtttgctaccatttcaagccatcacaaattttggtaagataacgaaccaaatatgttcgagtatccctaccttaccaaaatttggtaacgtacgaaacaaacccgccatctgttcaaaaatttggtgaagtaacaaaccaaacattttcccacagtcctaacatttgataagttcacacctctacagcatataaaaaatagagggggataaatagagcagttgtcagttgtcacttttactcaacttctgttactgttatctctccgaacctagaggcaacatcacttgtcttccactggactgaaaccagggtccagtgtgatgccaacctgctgcaaggctgcaacctattacaacaactgaacctcatgaaacaagacattttgcttttcattttgatgcattttgatttgaagaataaggttttaccctgattctgttaatgaaaccatcatttggattacagagtttgcaaccaatgcactagatttttatattaagaaatactagggttcattctcatttttttcaatcaacaggacaacatccatagtggtaacttgacaagatgagacaaacaatgcacaaaacatatattcttgaaaaaggaaaaatagtaacaatacatactcgatgttgccgtgcaagtttctagtactacttatatgtaccttaagcaaacattgcatattaatggaaaacatgtctcagctattttcgcaatgcagaggtggttctgaataattctgatcctccatatacattttggcaatgcggtatcttttttgagacagcagttaaaatttcatcaatctagccaccaaaaaatgtctcctcaaatcaatactcagagaacttaaggaaaaagaacatgaagttttttggataagccagatgcacatctgcactacacaaaagttgagccctaaaaatctcatatttagaccacctcatgagcccaaagctccaaaagcttggggttccgagttgcaattcctactatgagttccgctcaaagcataagttataaaacccaaccaagaaattgtattatggtcagttgctgaattgttcagattgcgtacagcgtacattttggtgtaaaaaggtgctctgctacactgccttttgctaagttgctggagcatccaacagtatagattcacttaactgctctttgttgtgctcattccaacaaaatcatgaaaccatgggttatcgcaagtgcagcaaggcatcgtgtagtggagaaaaggaattcagtgtgatttggttttcacattgctatctatttgctagagttagtggaataattttaattgatgagcatgataccgaggaggatttattaatgctatatttttcagttacaaattggggatttttggcccacggcaatacttgagatctcaatatataatgggtgcaatacatgcatgatattaggactgatggatgataaggttagtcaatggtgttttctcatggacaaaagatgctcaggtttttttaggaattcaatcattgatggatgggatttagatagaacttcatcaattgccatgtaaatctgagcttatgctttggtggaatcaacttgagcagacatatgagttgatggatgggatttagatagaacttcatcaattgccatgtaaatctgagcttatgctttggtggaatcaacttgagcagacatatgagttattattgttaaggagggagaaactattaaaccttgatgtggtcaatttcggtttgaactatctttcagatcatctaattgagctaaggaaggtggtcaacaacagttatcagatggcagctgccctagacttaagtggtgccgaccctgcacggttgaatcaaggactaataagccgtatggtgtattagcaaaacaatgataatttgtgggtagcgattttaaagccaactagaaaggtagcccgcggattcgcgtgggcatgtatcgtgggctgcgttgagaacggatcatattaatcagatagcctctgccatctttcggaagtacgtttcctcgacaaatattcttcatcaacatcactttgataatttctctaagttatatactatataatatttaattcatcagtataaccaaatatctataatctttatcattatataaaaaatagtagacttagtttgtttagaacatgtttaacaaattaagtgcatattaaaatcaaggtggtttttattttcattagttttggggggttggtgaaaatgtaagacctagctaaactcattgttccttttcccctaccatacggttttctcacagctcctagtcattgtgtcctacaactgagatgtggtcgttgcacctatgaaggtttccttgtgattcatcgtgattcatcgtagtggtgatctcatttttgtcaagcttagttagtccactttccatgtttttggtatagcctaaaatctaaatggactccaaagttaatgcttcaagtgtatattcatagacgattaatgctcatatagttgattcaccttttgactggtctatgcacaaagaaaataaatagagttaccgggaaggtgtagaaagccacaaccacacgcttgaatatatatatatatatatatatacatatacatatatatatatatatatatatacatatacatatatatatatatatacatatacatacatacatacatacatatacatacatatacatacatacatacatacatacatatatatacatatacatacatacatacatacatatacatacatacatacatacatacatatacatatacatacatacatacatacatacatacatatacatatacatacatacatacatacatacatacatatacatatacatacatacatacatacatatatatacatatatgcatacatacatgtacatatacatacatatatgcatacatacatgtacatatgtacatacatatatgcatacatacatgtacatatgtacatacatatatgcatacatacatgtacatatacatatatacatatatgtatacatatatgtatatatatatatatatatatgtatatatatgtatatatatatatgtatatatgtgtatatatatatatgtatatatatatatatgtatatatgtgtatatgtatatatgtatatatgtatatgtatatatgtatatatgtatatatgtatatgtatatatgtatatatgtatatgtatatgtgtatatgtatatatgtatatatgtatatgtatatatatatgtatatatgtatatatgtatatgtatatatatatgtatatatgtatatgtatatgtatatatatatatatgtatatatgtatatatatatatatgtatatatgtatatatatatatatgtatatatatgtatatatatatatatatgtatatatatctatgatatactaaatttgcattaagaaccatctaatgttaatttgatggtaacatagtttagagcaaatacacgaaagatcatttagcttgctcgcattatttcagcacatttaaaaaattcacgaaataattggagtttgttttctctaactatgggcattggatttgctatgcattggtagcttggactattcatattttagttagttctatttacttatatagtgtctatctaatttagctatgcaagtttgcaaaaacaacatatgatgatgcaacatgtggtgttggattatttcataattcttttacggcaattccaatgacatgtaaaagggcaggggtgttcaccctaaaaaaatagttttatagttatactattgatttaatttagcttgtttgcagactggtgtataatgacgtaatatatgcaaccaatttgtttaaggtatttcaattttatttgtatgatgtacaaggcatgtgggttgaatatgggcgaatggcatactttgtatataagaaaatataagcatatggatcttaaattcttggtttaattataaatagagaaaaaatcagacgtgcatcttaaatattatggtttttctattatataaattattgattatatatttattgtttaatagctaaaaatagggaggggacaggtagtggtatgtgcatatgagtaggagaggaggtgcatgcgatttatttttctaacttttataaataatggaacttaaaactgatgatgatagctttcattttgttcagaatttataagattatttctgatttttaggacatgacacatggcgagtttagagcgtttgtagaatgtcacgtggtggcttgagaatgtttgtagtatgtttaatgggcttttagtatataatagatagattggttcaatttgtattttatggagatttttctattttctattttattttgtacaaatgtaacactataaaaacttatatagacatgtgataaatagtgatagtgttacaccttatgtgtcattttttagaaataaatccaataatcttttatcttcaagcagtaagattgatatagactatcattgtttattaacagataaattatatgggatataaggctacggatagattgagataggtccaattaatggatttaccgttttgagttatctatatttaaacataaatataatcttcgtgaaccaaaatgatatatttcttctactacttattatttaaatcttattaattaattctctgtgtttcatgttgttctaatataagctacgtgctattaatcaagtgttttaaactctatatgatttccctaaaaaatgtgtctcgagtgtccaatagctagtccaaagtaacatatttctttgacttgttaaatatagttaatttgggtcttgaattatgcaacaaacgtacgtgcagtgcataaaaaatatatgattttagatcgtatagtcatataatatgttttcactctaccacatcatcaaaataggagagataggaacagaagggtcatcaaaaataagagagagagaggaacagaaaggaaggaggggccaatacatctacgtacgtacgtacggtagcatggcgtgcgtactacacgtacaggtcggaaggagaggaacgtgggcctttcaatttttttattttttatggtaaaaaataataggtccaccatatttaaagaaaaaaaaatctaatttattagagtgccatatggcagcttaggagtgtttgtaggaatttttttgtgacggcttgaaagcgtttgtaggatgtttaatggacttttagtatataatagatgttgaaaataaacttagatgatttttttttcaaaattaacttttaaaatccaaattttaggcaaaccacgagggcctccatcgctagctcctctccctccccctggaaagctatcactgtacaggggaagagcaggacatactagtaaggtggatactcaaatatacaaatggtcttaactaatctaggctataaagattgtaaaatacataactttgcacacataaataacttgtcaaagagctgtatgtttgtagctggagtgaagtatgcatagagcaatacatgaacaatacactgaataagtacaagccaaccccaaatgaatagtttgagggctgggattaaaggttagtacactacactactatatactgtattgtacattttacacagaataaagcatgtgtgctttattccagtagcatcttctataagtaatctcccatcaagaactggagaaatatatacatccaggaagatgggcctactgcactctgcagcagattgttcctatgctatttgtttatcagtggtccttccttgatgacctagaacctggtctagatgtcttcagtgcctctgcaaatttgtgaatcttcttggcatcttcaggaaccgtggcttcaccattgccaaggtgagaactatgcccaaaattactcactctcccctccccaaaagacacactcttgaccccaagatggaggtttcttgcatctgcgatttccttgctgagatgtcgagcactttggctgtccatagaatgccaacgggagccgtgattatcatgctgttgattgccagaattaccaggttctgtcatgaatgaagaatagctatcaattgactctcttccattgaactcgtcaaatgaacagctcgaaatcgatatcctcctctccagagtaggaatggttttgttctccttttcttttcccagtaccaatttccgaagcttcgaaaagaactttttcttcttagggttcttgtgcttgttcatcagtgagacatcgatcgacgcgtcgtcgggttcgcctaatgatgatgctcttgaggaagagtactctgaacagaactctatatgatcaaagtttttctcatccggaccagcatttgcgtactccattatcagttgcttggccttctcttcagattgggggcttagtgtcttgctaagatcccttgcaacatttttccctgatggagcatcctggttcctgagctcgtaacgcaggcaagcgttgatccatttcagatataccaattcctcaacatctgaaaacctgtcagtcttgagctgttcaacctcttttgccagcttgtcattttcttgcctcaaatgatcagcttcctgcaatgcttttacctgcaaccaattttacttgttcagttcctgacagagcaacacaagctgaagtaaacactgaaaaatgagtttgaaaaatcagtagcgcttatgagaaacaattgattgctctttcaaaccaaatatcaagaacagcgtttccttctgacgagtaacaacctctatctgaagattaagattgattagtaagtgccagctacaatacagttcaagaacagtaaatattcacctccatgttattgatgggcttgggtacagggggcaggcgtgtgagctccaatcgcctggcaagatgtgcattctcctgctgcagccttgaattgacaaccctaagctctcttgcctcattttccaactcctctagcttactcaatttttcctcaacctcagcactgaatttcccctcagtaataatctccttacactgccaagaatcggccatttcctgaagtgaggcaattctctcctttgcttgttctgcatcctgtctcagcttcttcttcaacagcttgcatttcattctagctgcctcaagctctgaagccagctttgagctttcagttaactgagcctgcagcctctcattttcagactgcaaggattcgatcttcagcgtgtatagcttcgattcgacggtgttgatcttcagctgattctcgagctcccgcaccgcgacatcttgctcctgcaaaccatagctctctagaagctgtagctccagggtcttctccctttcttgaagtgatctgaccatttctctaagctcaaaaatttccggggtcttcgttgcatcttcttcgcttacccttggtgcaggtgaggttgcaatgttgcccatgtctcggccgaattctttgagaactatttcgttgaattctgggaggaggaattcttcatcatcatcaagagttctacattttgggggcagtggtactaacgcggtggtggtcatcgttgtagtggtagtggtagtgtggacagagtttccattgatgattttggccttggtatcctccttcacaatcaaaacaaaagagggtcaacataaggagaagaaaaatggaatacaatggtaacatttgaggacaagttgtattttgtcaaactgctggaatagaaacaagcagtatgagactaaaaaaatagagaagaaaaaaggttgaaattaaaaaacaaaagcaaagtccacaccccaaatgcatgtgatatggacagacttagagaatttataatataatgaggaaaatatagctggattatgaacagttcaagaccatacatccaaaactgaaccattctaaatataaatggaagtatgaaaagtacattaatatatacaatttataataattatgtgcaaacaagattcttacattcttgaggatcctcagctcatccttgagccctccaccacccttcattccatccgaatctgcaaaaaaacatcaagaaacgattcatcaccaaaattttctaactaggagtagcaatcagcaacaaacaacgggttcacaattccggaacgaaattcccaaaaattcagattgaccggtgggtccgaatgttcctccggcccaaaacgaatcaaatttatttgaaattgagccaaaatattgttcatattccaatttttcgttgaaatttcattttgttttccatctgaaaatctggaatttcttcccgaaatgaaaaaaaaacgttgaacaagacgcctctgctgttgatacctgagcgaggaggaggaggaggtaaccggagttgctgccgtggccgccgccgcgagaggagcagcccggcgacggagagcgcgacggcggcgccgaccctgaggaaaacaacgcgcaagtcctcgctcctccggccaccgccgccgccatctccggccaccttgggcatctccctcttcacctcacctcaccaccaccttcttcccaagaatccaccacatgcagactgcagcaaccaaccagcaatggaaggaacacaaataatctctcctaccttgatcaccaaaaaaaaaagataataaaaaaaatccaaacatttgagcaagaaattgagactttctttttgactgcaagaagattatggccaagaacctgaacctgttcttggaggggctgaaacttgcatcaagaaatacgagctcgctccagccccatgaagcttgcaggctatatctccatggcttcgaatcgaccagaccggggaggagattaacccagcctagccaacaaagtctctgaatttggttttgggatttgtactgcctgagacaaaatccccaaattaggctgcctaagcagcagctaaaattgggggtgtcaggcaaggctccggattcagctcacggccatcgaaaacgccaagaaaagcaaaaaagcaagaaagaaagcaccccaaagctagcaagaaccctccaatctctctcaatctctctctcctatttctgtttgagcttgtttcctttctgtcttggcctgttcttgttcagaaggcaggacaactccaaggaatctggctttgttctctagccaagatagtgctctctactcgtgcagcttgtgctgctgcttttcttaactggatggacaattggagtgttggacatggactcctctctctctctctctctctctctctcttccatccctttcttgctgcttcgacaattgattataggttattaactctgaccagtgttgttgtttacttggccatgtccatttcagctcagttttttgaggaattgctgccgttgggaggagggtggaattgatgggtggatgagacgtggattgttgctgtgggcgtttgacgtatctttcatgtgatttcgtcagaccgtgcgagaatttgccagcatgctcgagctggctacggcctacgaattgatgaaggcgtgttttgttattagtggctggttgtgttaatcacgtggttcatcctctttcagagaataattgcgcattttgcgtgtaagtcgtgcctccagcagagtcttttacccctatgccattaagaaagttgaaggttacgtgtatgccataaaaaagttttgagtctcctgtatgccatgacataaactttcgtttacccgtgcgtcactttggatggaatcagcactaacggagactaacggaggtttgaaagatctattttgcccttgctctatttcagccactttggatggaacatttagaagagaaatcggcggcggcggcggcgacgcccggcggcggcggatagacgaggcgaggcggcggcggcggcggctagagaggtggcggcggatagacgaggcgcgtcgccggataggcgaggcgaggcggcggcggctaggctagggtccgaggcacactggagaaattgcacgggagaggattagtagagatgaaaatgcttcaggggcaatttagtcattttcatacgtgggttccacatgtcagagctcattcgctaacagaaggtagatggaatggcacacgggtaaacgaaagtttgtgtcatggcatacagtagactcaaaacttttttgtggcacacgcgtaacctccaactttcttaatggcataggggtaaaagactccctccagcagggttcacaatcgcgaccctgaatcgaaatccgctcatgagcagtatcatcagatactgtgaaatccatcgaaaattgatgatactgtgaaatccatcgaaaagctgaaaaactgatgtaatccgaataaattgtgtcaaaatttaaaattcagtttgaatactttttgtttgaccgaaaaaccaagtgaattgtgtttttttggatcgaactacaagaactaagccaaccagagaggggtgaatggttggtatgctcaaaaaccgaaacttttaacggaaataaaagttaccctcaaattcgacggagatcagtctgaccgaagttgtcctgctggtctgaccgcgcctgtgccgtcggtctgaccggtgtagatcgatcggtccgaccaccctgagatcgcctgccatgcctgtcgacgtcgccggtctgaccgccttgcgcccgcaggtctgaccggtgcttgccgccggtctaaccgccggtatgccgccgaaacccgatgaaacacagatcgaagaactcttaaagtggatgacgactttattgattctctctgtgtttacaaagtgcaccaacagcactccttacaaaaatctcgactaaacacgaaacccttattcaactatcaactcaattgctttcaaaagcgatactgggaagccttacgctccccctctatttatacccgaggcaagcaacctaaagccacgaaccaaaatcatactagaaatcctaatcaccctaggaaaccctctagtagaagaaataaactttacataaccaatcataccaaatttggactccttccaaattcgactccgcatcccatacgcacacaatacctccatcgtataccatatggaatcttcaccaaccacgtgtattgaactctagtcttagtatcccgcatgatctctgaccaccacggacgtcgtcttatccccaagctgactcccggtccatcaccgcaaatactctcccggcatcccgagtcacctacacatagaacaaacaaagaaaccatattccgagaccaaactatccccaacttgactcattagtagctaacgacagtattacatacgcatagtatccatctagaagccataatcatgaaacaatcacggatatccaaacaaataacccgaaaccgaaaccgacatagagtcggccggtcagaccgcgggctgcaccggtctgaccggcagcacatgcccggtctgaccggtccaacaaacagcagtactcacatgtgaaatccaatcatctccaaaaccacttcgcaaataaattccaaataacaaaaccaataatctccaatgccaattgttcatcacagaataacaattaaaaatacctttgattttacatttttgactgatctagaaagtccggatagttgagttgtgatttaaattcatttgcacataataaaggctagcttatgccaaaatgaagcggaggcttgggccggatcattatccttttagggtttcaccttcatatatatctcttgtaagacgccgttcgacgttctaacctcacctcgatatagtgaagatattttgctggctggcgccgtagttttttcttctgttttaggagagttttccaaaatccagtgtcttctgtgattgatctattattttttatcgtttattttcctatcgtttccaaacacggatttcgtgaaactggaattgtgaacactgaccttgagagatcatctaagtttgactgttaggtggtacagatcaccgatcgagtgatgggaacttctggtgccagtaaagtaaactggattttgtttgtggtacaaaactaaaatcgcaaaattacgatgctgtagaatcagtttgcctttactatattatattattgtatgttgcggatggcttagcaatattgatttggaggaaaattttttaaaaaccatccataagtcacttaaagttgatattccatcccataagttattttgttgtaattgcccacctctactcagttccgttgtaaaatccaccttagtgcgtatgtgtttaactgaatcaacatgttttcataaattataagccatcaatgtggtgtttaccaaattaaatacttttaaagtataatctggatactttttcggagattccacaaatagaaatggtgatgagagcttaaatgttatcgcgttgagattcgctattcagctataagggatcgattcaattaagcatgagtgcattaaagtgtttttttacaacaaaactgatagggaggttgatatttgcaacaaaatgatttatgcggtgaaatgttaaatttcaagtgacttctgatgtgtgttttttttgttgtccttttgttttctgcaattttcccttgattttgtggcagctccatcctttgctttttagccacgaccaaagcttaaattttaaaacttattttagagttaattttgattgttatttcgtcataaatagtttttcaacaccagtttttaagctctatagcacacgtataaaatttttactcataaataacaaattattttgagttggcattacgacttatcagttgtagtcaaagcgattggacttacatataatgttctcatattctttaaccgaccaaaatcgcgctttacataagaactgttggaagttctttgtagtttgcttcacatcaacccactaacttaggccctgtttgtttcagctcagcttaagattattgtaatctaaaataaaatattgagttagattactataaactggattataataagccggcatagaataagctataagctgcttgtttctcagtattattagatgtttgttagttgttagccacccaataatctaaaaagcacctttaaagtggattactagattatagaaatctggcttgtagattgtaataatatatcataataagctattatttgtttcagcttactcctaataatcttaagcggaatcaaacagggtctagagcacttgcaacgcgtttggttgggggaattgttatggggaacgagagttattaaatctattgtttggttggagggcatggaagttctaggatagattgggaagaggggtttaagagcaaacgcttaccttttgagataaatcttagtcctatatcatgacttaaaattcaattcccacccattctttacatgatactcatctttattaccgaacaaaagataaaaatgaaactcccataaccaattccttcaccaactctctcttttaggtcctctataaaaaggaacgggaaaaacgtagaaattaaagtagattatagaaattgaaaatatggtaaacagagagaaaaactctttgattacaccacaagagacactcaacaaagaaaagtttcacaagaggtctaaccgcttgcttattttcctatgaaattgacggtagaaatgcaatcctatgaaaaattttctatcctcttcttatgaatcaaagggctttatagaaaataaattctctaaaattcatttgctaatcctcaatttcaaaggggctaaaaaaagccgttgtggattgtgaaattggtttgcatcttggagcatcatcactcacgccgccgcctactccttccgtcccaaagaaaaacaaaccatgggtttccgtgtacaactttgactgtccgtcttatataaaatttttttataatttatattttcattgttgttagatgataaaacatgattaacattttatgtgtgacttttctttttatttttttaaataaaatggacggtcaaacattagaccagagtttgtcttttttttttttcggagggagtacgtaggtactacagtcccagaagaaagtggatcctctcaagaaagaagaaaaaaaaataaataaaagaagacgaaaaaggaaatcgtcgtgcggcgtccgctcgtcgtcgactcgcgagttcggccgccgccaccgccgccgccgccgccgccgatccccatccatcccgcgagcaagcaagggcgcaggcatcctggtgagcgcccagcccatcctctttctcatctctagaaccacgcactttacttcttattcttctcgaatttgcgtaaaccctagcttctgttctagaaatttgccgcaaacaacagtttgtttgttaaaaaatatagtaaaagtttgcggattccccccattttagatccgcccctgggcttggctagcacaacattttttagtgggggaaggaagggaaaggaatcggtgggtggatcgatgcgagcgttcgcgcgaaatctggcggccatcatccctctcgcgcgctgcaatgcgacggcgacgaccgcggcggcgccgtcctccctcgtcctcaaggtcggcgacacgctgcgcgagcggcggcgcttcacggatggggaggtggaagcgtacgccgcggtgagcggcgaccgcaacccggtgcacctcgacgacgccttcgcccgccaggtgggagggttcggccgcggccgcgtcgtgcacggcatgcttgtcgcctcactcttccccgccctcatcgccgcccacttcgtacgccgcccctctcgtctctctctctctcgctcgctctcatgcctgccagatggtgcaccggcatttcgtcgagcactgcatcggcatgacgtgctggcctggcccttctagtatctgatgctgatgctaatgcagcctggagccgtgtatgcgaggcagtcgctcaagtttgcggcaccggtgtatgtcggcgacaaggttcttgtgcaggttcaggcgctgcacatcagggcctccacaaaacacatgtatgctcaattcatcttttcatttcctagtcatcaagactagattgtttggagtgaatcatcttctttctgacagtgtcaaattcggaaccaagtgcttcacgagtgacagtgatgacctcctagctgtcgatggtgaagctatggctgtgctcccctcgctttacctcagacaacaactgaaccaagtgcctcccatcgttgattaaagactggaagcatcgtcaggagtgggacaatatgtgatttatgttcttttgggtctgtagatgctttgacaagataggaaggctatatgttgttttgctgttctcggtagtagctggctcccttgttaagctggaattcccagccttctgtacttcatcaaacctttattccgtttccaatagaacctggggtaaatcccgttataaaaaaaaagggtacatcactgatggtagcactggctagtaactctcagtgcactccattactctaaatagaagtcccatggtttgggtcctttgttgttaaaacatttataatgtctcatgatttagtcagacagcatcttcaaaactgagcttgcagagcaatttgtttggtttgtgttgctcactttagtagaagatgatgtaaaatctgcactcgtgagcgcctgctcaacacacaataaaagttcttgacatattgttcaagtcatatgggttttaactataacatgtcaacctggttattgaacttttgcatcatgcaaagagcaacataataactagaaagagcgagtgtcccagctcctcagcattatgccactcagccgctgccactggccaccatgccttgtgcatcgttcctaggtctttggcattatgcaatgcctaccatgactctgttggtggaaatgttgatatactaggaacaccattttgaagtatcataaattgaaagtgagttagcactcagcactcaggcacatatgggcattggatcaacgccaaccaggaccagaaacaaaagtctagtgcaagtcagctagtaactgaacaggtagtttttcatctttttacaatatttttctttctctgatctctgttttttcttttcctggatgattggtatttgattgaaatgtgaaatatgaaatcaatgagttcaaagatggcctggttttatgatttagattaacttgaatcaatcaaatatgaaggggaacataggcattctgtctgtctttagcaaagtaaatatgtagttgcttgtttgtatgtcagctttgagcccaaccagctttattcttgccatgcttttctcaataagtctcaagtatgagcattatgagacttccaatttcatcttaataacttcactgataacatgtaaattgacgataggttcaagcctgtaaatattattaacttcattgagagaggcaattgcgctgcgatgagctgctctgcctctaaattctgagaacaaaccaatagcaagaacttagcaaaaagggcattgcctgccctcttgtgctaatccattggtaatgttgctactgctactgctaagtactatactgcctcactagaaatagagaaaaaaatactccatgtgacaaagctaaaactagaataatactatcacatggttttctatcattggtattcagttattgcaactgaagaatgcgaaagttggtatcatgttttagtggcatgaaattaactattacgcgtgataaggaggtggtgttaatctcgtatcaggaatatgtcaggatgatgttaagcatttaggggctgtttggtgcgttgccaaaaattatgtcccttatttggtttgtagccacaaatttggcaatgccaattattttggattggttaagtttggtagcaatccaaacaaccaactctaccaaaatttttggcttaccaaatcttgctatagcaaaaaattggcaaggctagcaatggttgagaagaaacaaacacttagatttttagcttatttccatctttcaattgctgatgttctgggtatggatgctgcatctgtggcataaactaaatgaaatcctctttctcgtaggcctcactcgtgtgccactgcccaaactggcagatcttgataggtggctttgcaatctttggccccctgaacctgtccttctccatggctggggccaccaccacctcctctcccctgcggaggatggagtctgtctgccgccacctcctcccagcatcaccgcctatcctttaccaggtacggctaccttaagaggaactactgcaacttatcctctctatagcctgcagtcccatcgagtacctttctaactagtgtttcttgggcttcagttttcttgtgttctaatttttatgttgttttctgcacagaatccgttaggtgccatcaggctggagtcatctccagtgattattggggggatggtgctggacatccatgccaagccatccatgcagccgcatcctggaacgactgtgcctgggatggtaaaccacccatccagctctttattaacttcttagcttgagcaaactgcttatttgctggtatgcaagaaggatggcatatgtgtgtgattgaatggatcagcatgaccaataatactattcaatgtaaactagtgttgaattcattatatgaggaagaaggttctgcaggatgatgtttgggttgtgatatccataagcttggtactgtatgcatcttattcatacagaggtttaggccataaatcttgtgagctttaacttcttccatttcaatcatttatgagaagttgaagtaggatgttttttttaaacctttttaatttttaattgtaaaaataaacccttccaaaacttattttcaagatctgaaccttttggccatgccaaccaggctggcgtggcaaaacaatactgtcacgcctgctacgggtggtgtgttagtgttgttttgtcatgccaggcgggctggcgtggccaaaagcttcagatggaaaaaagttttgggagggtctacttttaaaattaaaaattcaaaaagttaaaaaaattaaaaaatcaagtaataatgcatttgaatttcctaggttaagtacgtcagtgggggagtagcaagaaatattgccgagtgcatttgtaagcttgagactcgaccattcatgattagtgttgttggaaatgatatggcaggtatttcttttatctatttgtgaagatatagtttttttctaaattggtttactcattttgaattactctgtccttttctgctctctgggtagttatttgcttcaatactttccattttttctactgcaggggatttccttttgaaatactggaggtcggctggactatgtacagatggtaagtgtgaagatattcatattgttgtatacatccttgaaattacagtctaatccttgttatgtttgttaggaaaggctgtagtttttcatgtgtagtgagataataggctcattatttattttatttgcattgcgttactggttgaatatctatagatatgggcctacttttgatgcaacaaccaatgctgaaattacaacagcaacatatttaaagggtatttttttgttctctacaaaatatgtactcctttaaaagcctctagtggtggtggcagtgaatctgccaccccactattgcttttgtagttctgtttggtattcaaggggttcagataaaatgaacttatttcttataaatatatactcactttggtcataaatttttatgtttaggttaagattcagtcaaacttttgaaactttgaccatcaataatttctcaaatggcaaaaatggaaaatggtaagcacagcttgtccttgaaaattactatcataatgtcaaaaactttttagaatttataatattttaatataagattgatggtcaaaattttagaagtttggccaaatcttttcctaaatatcaaatattatgaccggagggagtacatagttttccttctgttagctaacactgttgctaataattacataggaatactgcagattgatgacgtaacaaccccaatagtatcaaatgtgtttgatgggagcggtgaattaattgctggcgttgcaagtgttggggcagttgtaagaattttgcagcacattgtgtagtgttcgatctgtatcaacgctaatgttgacaagtaatcactgtacttatctccatttctttttgggcaggaaaaatttctctctcctagctggatatgtcagttccgtcttcatatctccactgcacctctactaatgcttgatgcaaatttatctcctgattcacttgaagccgcctgcaaaagtaggttattccaccttatttctttacttaggcagtgagctcctaagcttatgtgataggctgatatagctgatactagtatgcatttgaaccaggtagaataaataaaggggttacctaatttgcatgcatgcggtgctggatctttgtgtttcctttccaacaagggttgcagccgacaccactttttcaatataatagcatctgtgtggctgcacctaaccttcccttgcctgcaaacaaggatcttttgttgtcttgtgccaaccgatgagaaagtcttctgccagaagaaatgaaaaagtaataatgtatacaagaaacatttttagagatatgctgtttgcaggctttttatttttagctctatgatataatcttacaaaaaaaacaagaaatcacgaccttacgatttgaaatttttcatctcaagaaaatcatgagctttcagcttgattccaaaaccttttagctcaagaaaacatgagctttcgacttcaccttgaaaaactttcaactcgagaaaccagcagctttctatatccatttggaaactttcaactcaatttgagtaatttggaggttttaactcaatatcaggaattctaagcatctttgaaggctagaatgaaaatttgaagtaagaaaatcaggacaatctctgcaacactgtggaaacgtgaaacctaaaaatttcaaactttcaccttaactctgaaacttttacctggaaataaactttcaaactttcaccttaactaatttaattttataactttcgaacctaataatagcagaaatctgtaattctatcaaaaggggaaatgagtgagaagaatgttcttgtcatgcactattggtgttcctaaagagatttgaaaaataggtgcctttatgttgaacctgtcaatggaacaactgccccgcagcgctcgacatcagtgtggctgatcagcagggtacgaatgagtgcctcgcaacaagcttggaatacagcagttttgagtttcttatctgattaggtgtcaatattcttaacatctaccctattatacttcctctagtcaaaactcaaaaatatttgcggttcccagtaccacataaatttaactggacggggtactaatgtatgcaattctaattgtaaacactccctaattttatagaattgtattattattgaactgcattatctctgactctgagtatactggtgcactactcatgtccctcctgaccatcgttttgaggagcttccttgacaaaaatgagaaagacagtcctgtcaattattacaccattatgtttttgtcctaatctctacattgcatcaaaaagttgatgacatgcatgctattttcttcttttttttccccagtagcacatgaatcaggagtgcctgtgttttttgagcctgtctcacttgcgaagggttcaaggattgcaccaattgcaaaatatgtgagtgcaaaggattgaattggtacttattactatgtatcatgttaaggtcttgtcacttaataatttcctggtgattcagattacttacacttccccaaatgagattgagcttgtggcaatggcaaattcattatctcctcctgagaaatatacttttgtcaaaatggagcagtccaagaacaaagccaaagctgtagagtatttgtttgaaatgctcagcccagcaatgtttttcctcctcgaaaagggcataaagtttcttctggtgacgcttggctcaaatggtgtttttgtttgttgcaaagagagcacaagtttgatggaccagcgaaagtctgaaatgatgtctttctcaactccactacttcaaaaattggagcgatgttttccatctaacatgcttgtagatttgcctagagaaggctcttccagaacatgtgtttttcattttcctgcagtatctgcctcagtggttagcctcacaggtgctggtgattgttttgttggtggagtcatttcagctctatgtggaggtttgggtatgatgcaatctgttgcggttgggattgctatagcaaaatcatcagtggaatctgaagctaatatacctgataagttttctgctgcaactatcgcaggtctgctatagtaatttgttttcatcttgtatagtgtacttctgaaatttcagattagatcttagtgctgtcaaatttattttattgcacaggtataactccttgcatttccatttctcatgcagatgatgcaagaagaacattgctatcagctaaaatgatgtggtgcaaataaccattggtgttatctcgtgaaagtcttggtgggcatgtaatttcctaataccgtttgttgattaggctatatatatatatataaggctgagtgtggattcaggtcgtgggctggtgacaacttagcaagtttaatgtagtagattaaggagcacggcaggtttctaaatttgtttgcatgtacctatgcctttatacttcgtcagtttctgtaggctagtgatgatgccacgtttgcatctgtatgataatgtcacatcagcgtcacgtaggatctcgaaaatggtcgtggcaatcttgaaccagaatgatatattttgtggtactaggagttctggtggatatcactatataaaaacaatctctgtgagacaaatcttaaaactaaaaagacaattctcttagggagtagggaaaagatgcattattttcttttctttgcttgtgatgattagttcatcaagttggtaaagtagcttgggaagtcatttgatacgaaaaagctaaatatgaggaaaataaaggattggtgccagaggactcacatgtatgtgtgtgctcatagcaagacacccttagcactttaagcataagcatttcccaaatttgatttaaaatggaacatcatactatatttttaatcttatccttgagctatgttgagatagatgagtttcaaggagttaggagcgggaaggcgaaaatgctaataaacggtcatccgcgtgcccgctcccctgcgtggcacgttggcacgcgcggaggggaggggcggggggacgcgcgcgtgggagtggacatgtgtcccgctggtttctgatatctttttttctttggttttttccttctttttttttggtttttcttttttttatacatataggatacaaagtttgtatacatgtatacaaagtttgtatacgtgatattatttctaggtttttccatatttttttaatacgtacgtatataaagtttgtatacgtatgtatacacactttatgtataaatttttatacataaaaaaaacgtatacacattaaaatatatatttttatatgtatgtatatatacgtataaagagaggagagagaggaaagactagagggaggagggttgtcgtgtagctcgtgcgtcatgcgcggcacatggatgaccgcgtatcagcaccgcctgcgggaaggtggccatcatccacgaagttgtgggtatccctttactctatacgacattttccttagctgaagggtttgatggctttaaattgacttcgccaaaaggcctcatctccaaagcccagctagcgaggtgtccctctcagtgtagagcagagttcatcacctcgctcttgtgagagagaataaggggaagctctagaggagtgttggagttgctgacactctttccactcttgtacctcgatggatgtttctttttataaaagtaagtgttcatgctttcttttggtatttactcttcttgtataagtaaaatatatgcttatcattgcaggttcatcgcttaatatttatgttaagtactctagtactaatactttggataaaaaatgaagttcttggccaaggctagagtagtaattgataatgcaaacgtagtgtttaggttataggttacatttatttgttgtgtgtttcatgggctatagaggtaggcgacaaatggtaacagccttgatcgtcttttgtagtcctccacattccggtacgtcattgggctgtaggctggattcgcttggcagaccaggggaaagtcggtgcctgaagcaagtgatagagttttaccttaacttaattgaagaattttaacccatagaaaccctccctactctccgcctaccattttgttgttgttggatgaacttgatttcttgatgttatacacatgttccttgtgattcgatacccttggaatactctgaggtgaagtgttacagcgttatccgtgcgcttgcggatttatttgtgatcgtaacaaataccaataagcatttctggtgtcgttgcttgggaatagttgttatattatctttgaacctagttctccctggtatcttttctttttatttcttcttttcttttctttcctgccatggagtagctatctattcaaaactcattctcacatttgactggctttataaccatggttcaggggcaaaatccttctcggggtgcgacagtgaaaacccctaccatcatctacgagagttagcaattgtgttcatgcctgacaatctcaggcatgacgcaagaaactttgaagtggaagttgtttccgttctctctcatggagagggcggaacaatgatactctcataccattaggaaaacaaacggtgaatgggaggaactcaaaagtaggttctatcttgcttttgtcttgttaacctatgttgtctccctacggatggaagttctcggttttcaatagtgcaagaaggaatctattgaagtagcttaggctaggatttcattgttaactcaatttgacccagatttgtctatactcgaccatgttacaatatttcggtttgggtctaaacaaggactctgcctcatatcccggaggttcgtttgcacacaaaaccacaacaaatggaaggaaactcttggatcttgtccatggaacatcttgttcgtccacaacgaaacatctcctgctccgggtactccctatgaacctctagaagataattttctcaaggaaattgtgagggaattaactatcatcatgagcgatgaatggttaagagatgtagaggtttcttccgaagtaattcggactagctccctatcgtccctaactatccaatgtctcgtgatggaggttacagtgaatgttctcgataatcccactgccggtgctaacatcatgtccacaacctttgtattaacttgcttaggtgacaagccccaaattcaagttcttgattaatcatttatctacaattgagttgctatctttcgtgttcttgcttgtgttcttcaatacgcacgtagggattagtcttcttggcaagatctatcgggtttcgacatggttgatactagaggagaagtggtgctgcgattgcagagttcggtgttcttcaatacgcacgcagggattagtcttgttagcaaggtctatcgggtttcgacatggttgatactagaggagatgtggtgctacgattgcagagttcagatcaacgaagtcagctcgtgttgccatcacgagccattagtacgaaccgacaaaacctttcggagttcctcaagtcctatcatagaagtttatgggattctacgtggagtgcctatgaggaacgagaatgtcgaagccaccctagacttccacgtgttcaaagtccctgacttcgatcttctgatcgactatcccatagaaaaacttctataatgtgcctaatccagattgtgcctaaggagttatgacggtcgttgaaaatgccaaaaacaaattgatcccacaacgaatcgtcatgggatggaggatgtgcctagattacagaaaacttagcaaggcaactaggaaggatcactccccgtcgccttccatcgacgagatgctagagcggcttacaaataatttcttctgtctccttgatgactattctggctatcaccaaagtcctattcatctcgatgatcaaagcaagaccacatttgcttatcgtcgaatgttgttcgggttgtgcaatacacccatatcattccaaaggtgcatgatgtttatcttctccgaaatgacgaatgaaatcatggacgacttctcagtctatggaaaaatcttcgatcattaactcgagaacttagacaaggccttgcaatggtgtaaagaaaagaacttgatgcttaattggagaaaaaaaatgtcatttcatggtcaagaggggatagtcctaggacagcgaatttctgaaagagggatagaggtggagagagcaaaaatagaagtaatgaagcaactttcatctctcaacaatgtaaagggaatccacagcttcctaggtcacacaaggttctatcgatgcattaaagtttttttctcaaattgctaaacccctaacttatctgctagctagatatgctccctttgaatttaatgatgagtggttaaaatctttcaatttgttaaaagaatctcatcttagcgccaatcattcaacctcctgattggttgttggcttttaaaattatgtgcgagtttagtaattatgttgttggggtcattcgtggttgaactaaaaacaggaagcactatgctattcgatatgctagtcaagcatgatagaaagcaaagtcagcctgctagatgctgaaagagacattagctcaattctactccctcctttaactaagtatataaaaaaatttagcaacatctaaaatattaaattagtttcattaaatctaacattgaatatattttgataatatatttgttttgtgttaaaaatactactatatttttctataaattggtcaaacttaaagaagtttgactagaaaaaaaagtcaaatgacttgtaatatgaaatggagggagtagaaatctgataactcgctcttttccacgtcaacatgaaggcaggagactcggagaagttctgaacaagagacattctttccccaccatctcatctctatgattagctcaggtaagtttataattctatggtgtccagatcctacaaagaatggatcaataaaacctttttatgtacaaggaaaccaaatctgagactgcacaaggttaacaaatggactataagcatgcatctgtaagaagcaatgtactttgtgtacttcgcttcctctgacgggccgaaaaagaatcaactcatcccctagccttcctttttatcaactcccaaaaactcgagttgccaaaacctctgatgatcaattcagtgatacaaatgccatcactgccaaaatatggttgggtcattgctataaactgcacgatcctggatctctaagatagagacatgccaatcgacaagtcttgcttggatgcatttacataacacaagtcctgttgggaacagccaccagctagtatcatccctgccaaaagtaccaatgcttgtgtgaaaagaacagaggcagagtttttgaggtagcaacagttatggtagagcagtagcgaaatgtcatttggttttcagctaaggttacttacccgcccaaattccaaggttgcatgcttggatgccttttggctgaagacttgtaatgcacaagtccacacgcaaaggccacgatctgcaagggatgaaccaagtgtgaatagattaagaagatccataatggaaaggattaaacttgctattaccattagcagaaagaaagatgcattgcagctgttgtaatgtccttaagaaattgaaatatagctactactgcaatgagtaagaacatcaacataattccatgcaactagttcttccaaacatcaggatttgagctcagaaaaaagatatctaaaatgcatgtattttggtacattacaggctcaaacttcgactcaataagacacatggacttcataaatgtatgctcaaaagtatatattaaaagaaccaagcttgatgggacttgagaatgagtcaagggtttgagctcaagatcagctccactgtgctcgagaaccctggataccttgatgagcccaggctttcttgacacatcaagaagtgggaaaatactgcctaactgaatacactatagcaaactgtaccaaataaaccgaaactgtgtgttactgttcttgtgattgtggatgtatgagcaatgataatagccaaccaaattatataatttccccttttttggaacctaaagcatttgaaatgaactggtaatatcaaaatataagtacagtcaaagatgagtactcacaacattaaccaatgatgtaatattccacagcgcatacacacgagcaagacctgctgaccgccgtggtccatgactaaatagagcatttatcccagcaggaaagggtgccagtatcccaagaggaagaacaaacagcactaacaacacatcgatcatagaatatgaatatagctggagaaaagtaagcaatactaagctgaaatctgcaagaagcaatatagagatcaccaaaccaacaagatcctgcaggaaagaaaaagaaccttggtaagttcaagattgtgtagatccatcataaccaaactaggggttgcaatgatgtcaggatagctgtgcaaaatggaagtcacctgatgcccaactggtttggtattgtgcaatataagagaaagagggtaaaataaatctctcttgtccttgagtgtccttaagttgtcaatgtcgagaactctgccagttattcttttaagcataacagcatcattgttccttgagtggtctagttgagaatcaacatctgtgttctgaaatctgcacagcatggtacggatcagtgggataaattttaatatgataagtgcaaaatgtgcagagctaaagcaaatgactcactgcgcatgataatcaaatttcattctagagccaccttgaaggccactactgaatggtcccacagaatgaataactagaccaaattgatagtaacctagtgctgtagcttggaaccatgcaaggtcaacacgcacgcggtatgtgttcaaagcaggatttgcatgagtttcaagccatttgagtacaggaagaaatgtggcttttagatttccacgacgagccaaacgcaactgggcgttcaatccagcaacaaggcggtgccatattgatgaaggtacaccctgtaaaaatatgttcatgttatatgctaataaaatgaattgttcacttagtgatccagtacagcttgaaatgtttcagaataaacctgactaataagacttgtgaccacactgtcactgtgaagtgaaaatggagccatgtaacttccatcgcctccaaagattaatgacattggcaacctttgatgaagacgaggggggaggtcaggccttttttcatccccaccaagaaagaaatctaaataacccagcattaaatctggtgtagcagcaacctatcaaatggaaaaccagaaagcatacctcaatccatgatgtgatgagactgataattgtataaaaattcataatacaagtgcagttctggttcttgtactggtacagttgcagataatgcacacagaatcaacacagcaatatttgtaactcaattacattcagtgttcccagaaaaaaaacaaaaaactccataaggcaacaagggatgggtgcccaacctcgtaccacgtaagcagatgggtaggctgtatgatcgctacaaggtgggttcaataataccacttaccactttttagaacctttgaacagactttttcttaacagtacagtgacaagatctatctggttattttggacgtctaatgatgctgtacaaggtacatactcttatagcaattgaagattaactaaaaagcttgaatcaaatgaagaacacttaacatacactagatgactgagaaagtaaggctaaacaacataatttcaagaaattccaagataattgatgaaattgattgtcgagctcataaaaaaccactaaagctcataccagggatttggcactgaaaagaacataccttcagcccttcataaagagcacgtgaacggcaagaccgtaaacatgaatgatcatattcagatcgaacaaattcacgtaatctttgtaattttcttcttctgcgccactgttgccaagaccatgccaaggggtatgaaagtatacacaggatactataaattgatccttcccaccactgatatgctgcgagagcatttatctcatcgacaaacttgttaaatgcatcctcatacctaacaaaaatacgataaacataatcttaaatgagacaggtaaaatttgtggcaaaaaaagcaaaaccagtaaagataaggaaaaaagaatgacaaaagagcccaaaggctgaatgcatgttgttcaaaaataatcttgatttacttgtggacagatctacgtacacaatctcagaaatctgctcaggtggggtgtgtggtagatgccaaggttcactgaaggtgttgggacccatgaaatacatcctgtgcacatgacagtgagattcttcggccctattggtttccagtacctaccacatgaggagagatttcaacgaaaaaccagaacaatcacaccacagcttaaagaaacaaattaggaatgcagaatgttctgctacctcattgagtgattcgaggaagggaaaagagtgatcaatttgggagctatgttgagttggtgctggtccaggcaactcatcagtgccaacaaacttcatccgagcgatactcaaaacaagggctaataaaaaaagaaggcctgagagaaacagaccaaacaaccaaggtccaccaaaagtgtatattaactcttcaagagcagtaaaacagtgaggcatgcggtatctatcggacacacatttgtatgggcacggggtttcagtaacacctcctgtcaaaaacaatatctaaggttagaacattaaggtaaactggccgaaacatttcatatatcacatgtaaagctaacaaaagttgaagagtttgaaaatgctaaaacatgagagaacagaacttcatactctcattaaaatagtaaacaacaataattatatacagcaacaattccgtctagccattagtttacacaagacaatcagttaaaagcaaggcacttctagcagctaggccgcatggaactttgtggtatgcatacctcgtgtccacagatttattgcaaataatcccattagatataggaccattgacagcctataattctttagaaaatttaaaaccatagacccaacgacatatgtatttgcagattagacgccataattctgtcactaaatttatttgatctgcacttgagacgcatacaaaaagaaacaatagaaatgacctcggatgcttatgtagacagcacgatgagggagctcatttgtagggcatggagaacacaaggacttcaaagacccagtaatgttcttatatgttcctaaaggacaggcctgcatcgtgccataaaaaccgttgcagcaaagtgagaaaataagtagtatggcaggttggactgaaaaaattgaagtgcaactatgacatgcggctatgttgataagaagacatgttatctgatttaaacaaagaaacaataagctacaaatatatcaataattcgaaaatagcaaacacacttttgctacaagttaccttgcaaaatgtgccataaagaccttttgggcaatcttttcctgtcactgttccattttcacccggaaaaccttggccatcaacggttcctcctctgcacaacaaataataggcagtatttttttggtcaaaaaggaagagtcagcatactgtttaccaatcttactgtacatggctgcccacaccacacagaatcaaggctctggaaaatgggaaggtgaggaatgggggttgctcctagtttgcttaacctgctctactaactattactccttgaaatattccagaactacgattaaggaaatgtaaggacatccaccagcaaaaagcatcataaacttagaactttaaatataagaatgcagatgtagcagcactttagcatcatgaacagatctagctagtaaaacagaaggaaaaaaatagaacaaacagagaaaacatcagaattaagatgcaccttgcaagtattgatccattaactgttgcaaagggaatataatcatctccagtgggaatgtcagaccagtggaagtgaatccggccacctccacctccgccactaccattacttccaaccccaccagcgctagaaagtacagagccctcctccaaggacaatgccctcacaaatagaagaattgtgcccccggaaccaccaccaggtccttcatttgcagcatgagtcaccgcaccagcaaaactgccaccattcgcctctattgaaccagcaagggagagtagtggaagagattgctccaaagaacccattactggaaatgtgcagatgaaaggcagtaaaaaccagtactactaagagtaacagtgactgaatagaggatgataattgacaaagatccatatgctcgatctctgttacctattataccaccaccagctgttgaagatgatgtacttacattaccactaccactgccaagttcacatggtaaatcagcactaccatatgcagttccaccccctgcatgactgccactgtagaaagcatcccctcctttaccaccatgcccacccccaccactaaggccactgcttaacattcttcctcgtccaattccacctcggcagcctgcagcagggagaaatcaaatctaaattctacaatagtttacagaaggctgcattcaaaagaaagatatcaaaagaagctatatgttactattaaatgtgtacatagaaatactgaagcttaatgaaatctccattatgaaaaataggtatactgaagcagtaactattcaaacaaaaataattttcaatgctgatgattcaccaattcacgaacaaacagagaattaagacagcttatctcagatcagacagctataaaataagactggtagatgtaagactaaaaaaatgccatatttttctagtctactcagttggagctgtgcacaagatttattcactgctataaacattatagcgtgtcatgtcatttgaaatctcgagtataacagggcaaatggataatggccatcagtgacataagcataccgatttaagcctaggtaggcttaccatatgacaaatttttgaagtgattattgcaacattgcagcaaggactagagaatagttatcatagccataggaagctatcattaaactaaataaggtttcctttcgaatatttagttaatcaatagtttgtgattgcagatcgaaagcagggctgcactgtgcaatgccacaatctggatacgggtatctttaacaactcctgtaagaagttctatctcacagcttaagaaattatgcttccaataaactgttttatccagagtagaaacaataaagtgcttctcgaaaaccaccacaatgctgaacagaatcttaatagcatttatggcaaagaagaaaaagttacctaatcctgttgcactaatggtcccagatgatctcacagtgacatttcttgctctgttgaaattaataacagttccttgcacaaggccagaaacaacaatgtcttcaacacggcatatctgcgtgtcaaaagctaaccatttgttacatgttaaatgaaaaggcaaaatctaagataaagaatatatatagatacacactgcacggaaagccttgggaaattaaagtgtgcacctgtagggtaaaagacaatgaagtgttcaggttgcaatcctcaggaggatgaaagatttccataggacaactctcatcttcacagttcagctttggggccctagtgtagagacaaaagctcagaaaccgttttaaacttcatggtggaatagcaaaaataaaagcaacacaaaaactgaaggtggtagtatttacacatcatcactacttccatttacaagtgggccttgtagaacagctccaggtccaacctaaaatggaattacttatcaattagagtagtctgaatgatcacgaaggatcagaagcatctaatagaaacaatgaaatgattgaactgtaaaaaatcaaaaacaacaaggttgcaacagggttataccagcgtacgatatgcaaggtaaaagagaaaggaaatgcatcaagggctgcactctatacctaacagttggacaaaatactgatcttgtatataatgaacaacactctatatcttaagggcttcgagaaaatattgatcttgtatatcatgaacagcagcataattcatctcaaagataagtttagaacattaaatttagtgtatcgagttagatgagatatgaataagtaaataacagaatggagaacactacagatagatcacgcaaactactgatgtcacacgatggcctcataacatgtcaaatttaaggcaatatcaaaggcatattcatcattccaactctgaaaacaatccgaatccataaaaatgtgcctaagccacaaaaggtatgcagaaagaaataaagcaattcagactcataactgattgtgaataaacaaaccaaaatgaacttattttaccactatgttgtagaaaagtgataaaataagacgttgcgcctgaatcgtatctccatctccagataaattcaggatgccttgaccatgaattccaagattgccaatagaatgtataactgatgattcctgacaagcatgggaacaaaataaatcatacagaagagaaggcagaggaggagaagggccatatcttgcaattttgaacaaataacataccttcaacactatcaaattgctaccctctagtaaagaagtcgcaactcctgactctctgccaccatcaatcaacattctagagttccacataagaagcatctttacagacattcgtaaagcaccaaacacctgaatgtgatttaagaatcgtgaggtgcagatacaccacataatgggttaaaattgagcaaaaggaatacaacatctgcatgaagtaacagcagataaataccttaattgtagaatcactcataagaagttcctcagccaacaattcaaactctgaatatggatagtgtgtcaagccaaaagttaatgtagcgcgagatagaaggctaatttgtccttgagcctgaaaatcagaaaacattgaaaaaagggtaactgaaatatctatagtgactagaatgaaagaaacatttagttaaagaaaatactagtccaatatcagctgcaagctgcagcaaatgtatccctgttgacctatacctgccagtcccaataaggacagaaaaatagctcaacagcagggaacagcaactcatgttatttaccaaggtgacatgcagtaaaaaagaacattttttcccataatggaagtcaccagaataatagcattcctcctcccaatttaagaaagaaaaagaggctcagatcctttttaaagaaaataatttatgtctttgcaatttcatctccacaaaaacgaaacaaatgaagtgtttatggacaagcaatcagaatagactttaaaactaagtgcctcacacctgaatacgactccaacgcaagggaagagaaactttggcatgattcttgataaaaacatttgtccagagtggatcatatgggggttctagaaaaactgtatcagtttgtgtgctcaagttattgttgctaacagtaatactcttaggcacttcttcataaagagtcccagctgcacctgcattgtccagacaacctgagctcctcccacctgttaaggcaacatagttcaaacacaaataagtagtatgttgaattgttgataagcttgtacaaactatgtactttgcataaaccaagtaccaactacacaggtaatactaatactcataacttgtcctcgtcaaacgaaaaccaaataagaaattctgggctagtccaataaatatctatctaacctagatcagataacgccaaagttcactttacactccgccagcatgaaacaaatggagaatatgtagatcatcttttaattttcgagcaggattcaagaagccaaatcagaaaatgaaaactaacaccctgcagggacattagtgtcccttttaaactgttactggaagaaactggttggttctgtatatttaacaagttcttgatgtttaactctaaactaataacttggtcagaaaagttatggtcactaacttggtcactaaagttatggtctctaaaataataatgtagaaggtttaaagaatagttcatatcttacaatttacaacaaactgaactatatgccagtggtttccctgatcagaagtttgaagaaaaagtatattatgctaaaacaagctcttttgacagttgaccaaatcaatgttgaaagtcagaaaagaaaaattcaaagctggcagggaaaaaaatacggataccatgaagatggcaggttataaacgagaacaacctcatataacctcagcaactagaaaatcaatgtgaagatacaaaattggaagcctatcagagcaaaagtagtccatgatacaaatgaaatcaagtgaattaccatgaacaaaaaattgggagtcatcatgcctactgaaaacatcaacagaaacacgcccaccacctcccccagccaaaccatcccctccgcaagcacttattgtgccacctccttgcctgttacaacaaaatatcagagaggaggcaactgttcgaaataacataaattcgaaatttaaacaaaaaagttatatatatatattcatttaatattttaaaatatcaatgagtatggttttcatagaccagctcacttaaaagtccaaaactccaaatatggctggtcaggccaacctgcattataatctaacatgtacataactgatgcttcttggtaattctttgcttccatggttccttctacgttggagacttggaatgtattgtttgatcttcgctagtcatgctcatactagtcactatgacataattgtggaattttagactagagcaactgatctggagtaagtttaagtagcatttagtccaaaatcctttgtttattagttgcctggcaatatgtctttctgaagaatgtgtttgtaacccaaatacgtagatatcaacatacaatcttcgagggctacaaatcctatcatatgatttagcacttaacataattgtaaattaaaacttatctggtccccatcactgcaactgtcagttttaggcatatataaataaaaaaaggatacacaatctctctcaaatccttattaggtcctaaaataccagtaccagatatagttcctcctgatttatttcaattgggaagtactgtttcaatccaatgcactggaatgtgaaatttgtaccattctcaacacagaagaaattttattggctttacatccattccagtgtaaaatttctaatacatctattggacaagctagtgcatgttgagtgcatcctatacaggaatcatgatctattacagaatatgatattggatatataactttttaaatatggtaaaattaaaaataacaaaaatataagtatatatgaattgtgggcaacaggcagagcaatgatttatccaaacttcaaaaaataaattcgtgttgcctttgtgtgaaagtgtgaaaaagagccaagaggcctgaattttgaactttaacagtcataaccatatgaattgcttatacgatttcgaattagccaacaaagttaatatcatattttcaatataaattacaaatactcacatggttttagccttgagatagatgcttcccccagagccacccccacctttggtgccaccatctcctccattagcaagaattgttccattcatcataatatccttggcgaacaaccacactacacccccaccaccaccaccatagtccttctcgacgctggtagaaccgcctttgctcccgtagctattgggggtcttgagttcagcccaagcgtacatatcgccgccccacgaatcctcctgcgcctgcccctccttgacgtagcagctagcaccacggccgccatggccaccgccatcaccatacgacccagtaggcacgccgctggtcttatcaggcgggtcgccagcgagcgcggtggtgtcgattacagcatcactggagagcgtgatgttggtagctgaaagagaaacccacccggccacgacacgggcctcacggccgaagaagatgccgccggacaaattggcggagacgacgcacccaggcctctcgcaggtgagggcgacgccgtcgacgagcaccagcgtcccattcccgctgatgtagacgccggggccacggagcctcacggaggcagggaccacgcagcgggtgtcgaggtcgcccacgccgcggaggtccccggcgcaggtcgccgacggggcgggcggcggcggcggcagcgaggggggcggcggcggggtgtagtcgtggaaggtcaggatcgagtacgcctccgcctccgcgtccccccgatcgaaacccccgaggctagggttccccgatgcgacggcgaggagggcgagggcgaggtgggggaggcggaggcggaggcggaggcgggcgaggggaatgtgggtggccatggggtgggaagcatcagaggacccagcgcccggagggtaggtggggggtactcgacgaggtttcggattggcggcggcggcggcggagatcgccggagacggcgagggggggttggggtttggtggtggttgctcggtttccgcttccgtcgctaatgggaatcgaagcggggcggtggtgcggtgggagataggccgtccgatttgccttgagattcggggaggggttggtggggactgactactatgctggggtttggtggggccggatgggcagtggcgcttttggttgattcatagaggagggtataccatccatctctctctatcacttgattgcagctaatagtgaatagctttgtatgatcttttaaagtgcaatgtgccaagtgacgacagcttatagtagcagattagcaagaggtcagtttgctggtacttttggaaagatcttacagttatttgaaatgtttgtttctctttcactaaagtatcaaagtactccctccgtttcataatgtaagtcattctagcatttctcacatttatattagattcattaacatcaatataaatgtaggaaatacatttagattcattaatatcaatatgaatatgagaaatgctagaatgacttatattatgaaatggaggaagtatctatttgtctatttctcgttttcacatatcactaagttacttgtaagttgaatcgtttgtaggtatcatccttttttaaaaaacccgggcacctctttgcttccacaaattattctaatctttgaaaaaaaagttaatttgatctttgccattgcaaatatgcctattcagataaatatcatcactatttatctattcgtagtctcaaggcgaagaaagataaggttgtgttacttggtaatggctcaaactcactcattatctgtgctggtccttaccaatctcttcttccttcactgccatcgtgcagcgacgggagtttgacgctcaacggacgctttgtgctccatggcagccccacaaagagcatgaatgtctcttaccagtggggcccaatgcatattttatttgattttcactggttgtaatatcaaggtgccaataagagtcacattagtcaaaatcgtcttacaaaccattgaagagtcattttgcatcggtccgaacggtaggagaactcgttatagctagttttctgtcgaggaacgcgaagcagatccaacataaatttgaggaactcgaattagactttatctgatgagtaacagatcgatgctctctttttgggctggtttagtggtcacattttgaactttgagcccattaaactcccatggacaatcattatttttcggattacatttcataccccagcgtggtcttgtagtgcataagcttactttttacttactagtacagtgtaacaatcttctattgcttacatcccttgggtcaaatacagctgacaaccactcttgtgcagaaattgtttggagtagattaaaaagagagagtaacatcaatggtggaatgaacggggtataagcacgatgcttattgattcattaccaaaatattcctgaaaatttataagtagtgaaaagtacgaatatctgtacaagccactaaacacctacccctccgtctaaaaaaacccaatcctaacaacgaatctggacacagattgatctttttttagacggagtagtaaaacttaaccattcaaatatagaaattattaatacttccaaaacttaatatgcaaatacgacacatcaacgcactaagcatttaaaactcaacaacaaaagcatagtaagtacatctataatttattacatgctaaaactcaacaaacgagcacggtaaatcataatatttatcaatatcattttcacaatattttaacccaagtccatccatcttttctacaacattcaacataaatttatccatatattccacggtaaagcacgggacataatctagtatataatataacagcctcatcggatggcctaataagtcaaagaaaaagcctaattttaaattttcaagtttaattttaaaattaattttgacatattttcaacatagtttctttttcaacattagcttttaagtcacaaataacacatttctaaaagttttacccacaaattcatttttatttcctaataagccgttttggcttattaggaaataagccaaccaatggggacctgagtgacggtagaaattatttttttaatgccccacaaataattgagatgaaaaaaaagtgtaagtgggctggtttatttgttgtggcccaagcaaagcaagcaagctagcgtagaatgcagggccttagccggcccatgagagcagcatcaggcaaccagcaaagcaaacagtaagcaactcgtaaagctcctgtagcatcgcaaattagtaaccacgtcggaagtttgcagtgagagggaaaagcttacaagaaggagatcctaatatcctatgttcaaaaaaaaaaaaggaggagatcctggacaataacaacactgaatataaaccttctgcgcaaactggggatggtaatgaaagggcagtttatgagtatatgagctaagctcatttttgtttgttttaatttggtgattttttcgcaggcgaacagcataacttgaccccgcctacgataataacttttgtgccacttgtgaaagtgggtttgccccgtttacaatgatcaatttccgtagtaatgtgactagctagcgagtattttctttgatggccgcaatattatctgtgataattaaggaatttgagctgacatttacaagcactatcactaaaatggtcaccactgtcaattcagcgcgaactggctatgagagtattattgagatgcacttaatagtgcagtggtaagaggtgtatggttttaattaactccaagatcctatgttggggctcataatttttttttaaaaaatatatttggaggaacatctcttcttccaaatctcctttttttaagatggagtatcactgctggttcaccatatagtttcatgcccaaaacgacaagaaccggcagtgttgctctgtcggttcgttcagctgtcggatcacgtattcacgttagccgttattctctcgattcaatggatcggatgcatagatgctcggccctaactaatactattaattaattacattattcatgcatccattttatctctagaaacattccatactgcagcttggatatgtagctagcttttgcaataatgttgatctctatagctatagctacatacattgcttccgggaaagggatataaaagatgataatgacatgatcaaaagattgccaaaggatattagcataattcttcatcactctagaccaagaacaggaagaatatgcatcaaatgcatgcagctaatgcttgagagttgaaacgaaacatgctttacatcgatatggttcgctttggtatgttctccttttgtattgtgcatatcagctactttttgcttgcttaaaatatttttaggtcatttagttatacattgtgggaggagaatatatgttctgtcggctgcactctcttttaattttctgggggatgcaggatgcaggttgcatgagccgttgatagagccaaatacacatatatgcactcatgcatgtatgtacatgacaatgtctggctttgtaattggaatcatatcaaaatttgaacacacgtatttttgtcagatttttttcatcaagaacccagataacgattgcatcctctgtcttaattaattaccgcggctgcagcaacaaatgctactcattatagggatttcaacaaagaacacgcctgttgaccaatctacagttttaatttcttgagagagatcagttaatttgcatgtatatatatcttctggtcaattttaacatgcatgctttcttaattgtgatttgatattttaattaggggtgaaaatggattggctagtttctgaccgattcagaatttccggaaacaaaatgtatcagctcggatagctagtgttggattcggaataaaattcagattcttttttcttcacgtatggaaataaatacagaagttttaatatccaccgggaatgaaaacaatcggaaactatccggataggtgttcagatagttctcagaaacaaagacttagacctgtagcccatattacttttaactttaggctcatatctctagcccaactcattatccaatatttttatcttagaaacatagtatgtggagtagctattcttatatttactagcttcaaaccatatatacgttgtatgggtagtattattgatattgtaaatattaaaaatttaataatgtattttaaataacactatctccttttatatcataagttatttttgacttttttttctagttaacttttttaagtttgattaaatttatagaaaaaatatagcaaacatttctaacacaaaagaaacatattatcaaaatatattaaatgttagctttaatagaactaatttgatgttgtagatgttgttaattttttctataaaatttaaaaaagtttgactaagaaaaaagtcaaaccgacttataatatgaaacggaggtagtattatttttttgaatgtaagaactgattctttttaaataagagtatagatcaattacatcttattaattattaatattagaattaaattaactaatttctaaattgagagtctaacatggatacaacttcatatttatcatttcaagtattttaaattattaaattttaaaaaaacaaaaactaatgtacagaggagtaaaaaacaaagtatgacatattatatttaacaggaatttaatatattctttcgggtgaaataatgagttatatctctttgtttatattgaaagcacagtctaagggatttcatgttccgataaatattcgtgattgtattctttctggttcatatttgctctgtatgtgtagtatttatttttattttcatatctagggtgactatattagttttcattcttagaaaaatatatgaaaccgaatatgatagaactagctggtttccgtccgtattcgagctagctgttttcattcctactattaatgatggtacgataaaagaagaagagaaaacacatgttatccctacttggtgaaaacatataatagataatatttgatagacgttaaatataaaatacaggagccataaactgactggaccaaattaaatcatattacaactaatttgagaaaacaacatgtgtaatatgatgaaatagaaggagcatgcacacataagtttctttaaacaattaaatcaaaggaaaaaaacacatttttttcactaaatttactaaacagatgaaataatatgggacagattaaaatggtgttttgcacaaactacctttttgcattttgtacaccataaaattaggaaccaattttttggtaatcaattttggaagcacttctagtaatttaattttcaaaatggtttaataatttaaaaacaagaaaaaaaaatccatggacaaactgatgcatgggagtaatttttttttttgttttctttgccaaactaacttgacatgccctcatttgattttttgatgatataggagtatcatttatgctgttgaactatatcacttacacgtggaccagtggtggagcccgtatcttcacaatggaggttcagacttacttggctccattctaaaatgtagctatttctagcacagtaacttgttccaaaatgaagctatttcttcacctatcttctcttctccaccaatcacaactctcatccaatcatctctacctactttcttaatatctgtgactacctataaaaatgcttacattatggcaggggtggacccaaggggggtgccgggtatgcactagcatacccaataattccgaaaataagttaacatgtagtaggtattaaacatctctgtattagtatgtctaaatgtttgatgaaagctttctcgtgtggcaatacaccaaggctcaataggcccagctggtggtaggttttcaatttctggcgttatctccatctcgctagcctcgaccgtgccttgtggcggcacagagtgcagacgaaagcgacgagcgaccatcagctaataaccatgtactccctccgtttcataatgtaagactttctagcattacccacatacatataaatgttcatgaatctaaacacatacatatgtctagattcatcaacatctaaatgaatgtggacaatgctagaaagtcttacattgtgaaacggaggaaatagtatttcacttttttacttcctctgaatcattgatatatcctctttctctagatgactacatttgaaattgaaaattgaaatacgaaatcattgaaggcgtgtttcatgatttgtaggattaggtaaattgaatcagtcaattctgattaggaacatgggcatttctttattcagcaagtcaccgaaaacttctgattctaccagttctacattacccatgtcttcactcctgtcacggtgatgaggaaattccgaacagggaggaataataagtaaagaaaataggaattaattggaatttgtgctgtccattcttcttcaattccatctcagggtgcattatcgatccaatgctaataatactatttgtactaatacttttgataacctgatgcctaattgtattagcgtgtagggaggctttaatttggcttgtcacatgggcacaccgacgacaaaaaacctgggtctgccactgcattatgggacggaggaagtagatgacaattgacaaaccaacaaagccagtcgcacattcaaacaaatcaacaagataattcaaatgacatatatattacaaaagttcaactggtttttattgcatgcacttgtgtataaatatgggtattatgtcaaaaagtttgggggtatagatgtacccccatgaatcaccctagttcgccactgatgtgaaccatcccgaaacctaccaaatggtcaaaatgtgagatgaagaaacaagttagtggaaaaacatatatgtccatatttatatatttctcgatgaaaaatgtattgcagcatatattgatccaagcacacatatctataagttctaaaaaaagacgcacgcgcgtgcgcacacacatgtgtgtgtgtcaaagataccagattcaacattcagacaccagctagctggctagctagctagctaacttgtgctagaaagaaaaaagaattgttacggcataattatatattccaagttctaatttaatctgaatagcaagaaaagcaacagtagcgtaatgtctaactaatgaaagaaatgtctataaacacacacacacatatatatatatatatatatatatatttgcgttgtatgcacccatgcgtatatattagggagagagggagggagataatttgctgacagaaagagaagtgagcacatatagcttcaagcacatgaactctctctctctatatatatgtatctcttcagtcaacacacatatgaccacatatgcaaggaaagaactatatatgctcactctcttctgtcggctccctagctcttttgttccttccctgtatacaaatcagcaagacatgtcatcatgcttgaaagttattgattagcaaaaaggaaaaaaaacacatgcccaaaacaaaaggtgtggcctctcattctcttgattgctttccaagaccttaacttgtgactttagtttcatagactactgttttatttgaatgtgtggcttatgggttctgaaggggatggcatggtatttataggaggagattgcgaggggatgcatgtacacaacctactcccttcaatttcctagtttgaacagaataaatgcctcatccattaattaatttgctgatgccacaaagaggtgaacttgtgttttcttgtactccctccatactcgtaaaggaagtcgtttaggacagcgacatggtctccaaaatacaactttgacatcttgtttctataaaaatatttattgaaaagtgatatatgtatacttttatgaaaatatttttcaatataaatctatacatataatttttatattttcaaactcaacaacttaagagttattcatgatttatatttccaaggtttgacttaaatattattctaaacgacttcctttatgggtatggagggagtatacctctaggttcttgctagtttgatcatcttatcctatatatccatgcatgcatggctgagcaacaagcatagaggtaacagaattatagggccttgtttgattaagattactgtggagagtattcggattactctacataatatagaaataaattaaatattttaggaaataaacttaacagatagcttagaataactggtcgaaacaatgcagtgtagaagaatttttgttttgagaaaacatatttttcaaagcataactcaaataattaattttaaataatccagtgaataatctgaaaacaacgaggcctgaggtcagctaatctgtcctaattgcatcggtcgaatttaaaactcctgtaaagagtatctcgagccatttatagttcaaaagtgaagttagttcgtttacaaggtgttcgagctccctttttttttttgagagagaagatagattttgttgctagctcgttggtctacatgcatggaagatatcccatctttcaaaatgttctggttggtcttaactacaatctcacacacgagaacatgattatgcattttaactattgacccccattaatttttgtcaactcttatatatgggttaggagtactgcttcttgttataaaggaaatgaaaaggtccgaattaccccattaaactatcacggtcgtttgagttagcctctaaaaatactagatattttacaccctcaattattcaaactggacaaataaccctctcattcaatccggagtggttttgttcatggcaaaatttgctatagggcataaaaaaagcgtaattagctggtggacaccgcaagaacgcatatatattgtaggacactataaaaaactgataattagctgctggacacttacgatattatttattatttctgatagaattggagagagaaatagtaattaaagacaagtttgcccctgaccgaacttatttcaatccgactggttcctgttcaaaccagccacgaggcttttcgcagtaaatcgatgcctgtcgcaaacccgacgagtactggcggcaagtgcgtggcgcggcggaactcagttgccaaatggagggtacacgttctctgcaccgtcggttaatcaactaatcaagttgtcttttggtgacaaatatttcctagtgccatagaccaactagcatcagagtggattataacagcaggtgcatgtatcgtcgcagtggcagtgcaggatcgaggaggaagaagcagccaaagggcagtaatggcgcaggtggagaagacgggcgcgcgagagattttctcctctgcatgtggaatctcctgctcgctttatcccgtgcgccaggcacagccctattcgcgtccgtgcgtggcgcgcacacgccgtggcatgccaattaccatgctgctcgcgtcgtatatggtgagagaccgtacgtcgtgtgggatgagacgggtattgtcgttaatggtggcactggcatgcgcggcgacgatgcctctggctgcttgggccgcggcgtgcgcgagcacatgtgcgcagcgacgacgacaccgacgacgcggcatgtgtcatttacgtgctcggccactctcctttaatttgtcgggtgatcagccggtgccgcgatcgtgtcactgactcaccggcaccgtccactggggacacaagggatcgtgtcatgaagagcagggttagaatcgtgctctcacacattagtttctctctccaattttcccgaaaataataaaataatatcatgagtgtccaacagttaattatcagttttttacggcctacagcagatacgtcttgcggtgtccatcagctaattacacgtttttcggatgccttgtagcaaattttgccgttgttcatacgtggtatacatgtggcaatccaattagcacttttttattaaacaattcggtggggcccacttgtcataggcaagctcgaccttatctctttcccctctggcctcaatcatgagcttcgtcgacgacatgagggcgaaccaagcgtcagccaccgtccctcttcctcttttccccagcgaggcaaggcatggctaacatcttggaggagagagctatgcccgcggaggcgaggtgctcgccagctgtggctgcccctggtggacgatggacgacggagcttggagagcgggaaagcatccacctcgcatactccggctctgcatagctcacgcggagatgaagctcgagcggaggcaacggtgaggaggctgcagcagcgatgatgaacgactacaaggcagtgaccggtgaaccaagacgcacttgtgactcgacctcctctggtcgacgacttctacttgccgattgacatgcttgtggaggagagaaccacgccacgcgaagaagggattggtgtggagaccaagctgcggcatcggtggggagacgctacagcgaggtagcaggccgacaggctggtcaccggctgcatgccatgcacaacgtgggcacttgtggcccaccagccgcatcttacaatagcggacgtgggcacgcggccccggtgctaacctgcacaacatctccaccaccacctccccaggacaccgccaacgccgttccagttcctccatccgtagcacgagcagggataagcagatgtggccctgggcttctctgtcctaccacgctccgttgtcggcgccgtgggggaccagtatctgccgctgccatggacttcttcgactgcctccaccattgacgcctccttggccccgtcgctctcgcctttcctctggatttgaggccgccgccgctgtcatcctgggattctttggccgaccgtgcaccgccgcttccctgggcttctccggctgatcacgctccaccactagcgccccgggggtctagtctctgtcgttgtcacaccaccgccgctgcctccacctcctctgtgctcggttcaaggtagagagagagagagagattgagggggggggaggaggcagaagagaaggggagaggagtgctggagcactgacaagttggccatgtattttttaaatatttttttagccactttagaaatgtcatttcagccagcctagcccaaaatagtgctcgggtgtaatttgtccggattaaagagttgagggtttaaattgtctgttttttgaatttttttgtgggttgggtaattcgattgacaactatagtgttttttttaggaggggtggggattcggactttttcctagaggaaactatttgtctaaattagttatgccatcgtcatcagttgcatcttgtgtgataaacacatatatactagtccccactctattgtgtcgtgggaaaacagagagctttaacaaccattagctactcctcctaatgaattagcgaataatggtaaattttggaatagttattatgacattattgaagttgtcaactattatgtatgtgttaggaaaatgtccattctatacaacactaaacttttatataaatgtgtgcaaaacaacagtgaacttctaaaccattgtctagataaagagtgttttcagtgaaatgacgaccaagtggcaatgtagggagaagtacagcacatcgagtatttgaattgatgtaagccagcgctaaaacatttcttgaattttttaaattacttcaaatattcttaaaatattatcactatcttttggactatctataacctaaataaatttggcaactgtgaaacaatatgtagcagtttaggactttggtaaaagttgaaggttgtaacgtcaacagtttctcctctatatgataaattttattgttcattattactgctttttaacacccatggttcacaacacacttcacaccgaattcatttttccttagtagttggttgtcaacacattcttgagggaaacgatatatcctcaaaaatttatatgctactagcaacttgagaaaaaaaacaaggtccattttacaactttggattgtcacgcaagtttggttttcaatccaaaactattgaaatcattcagttttttatggtggtgcaaaattcgaatggttttggtacctaaacacttgaagagttttgaatatgtaaattctggaaagattctcacttaattgagagtatttactagtaaataattttggtatttataattgatgcagggtgtttataagtactaaaaccattttgagtcccccaataaactttactttctaaggaattaatcgatttagctatgttctcttgaaaagaattaataattatgagtgtacatgctgtcatggggatcaaaagtgttttccacatcttaaggggatgaccccttgttttctcaaaatactttcgaaaattaataaaaaaaacttataaaaagatgacattgttactatgtaacatatgataatcaaggaaattcaaagtctaaattaatcatctctcgtattgagaaaaaaagacgaatctaaactgtgaacaatacttaattacattattcaccactatatttctccttttctttttcttggtttgtaggtcgagttttgacatgagattttttgtgcgtgatagtttggtagatgtcaatatattatacattatcaaaagtttttaggttcatccataactatcagtattatcattatctcaaaaaggttaattggatacatgccattccaaatttgcatatttttaaaaaataccattactattcacccatttcaaatcatgccattacaactttacagaaatttgagatatgccactacttaccccttcgatgcattcattaaaatttttagaccaatttaccctttcttctttcttttcctttttttccttccttctctctcctctcttcccactggtgactagtgctactcactctggcagctcctccatctgcaactcactccgtcgatggtgcactgggaggttggggcccacggttcccctctcttcctctcccccagctactcaaaccgacggcagcgcatggcgaggtcagggccgatggttcctctctcttcctctcctctgctttatttattgctcctcatctcctctcactttagatagagcaaagtcggcgactttgccaccgtcgttgacctcatacatcttcgtctccgacctctccaccatcggatatgcttctatctccaacgggtgcactagccatggccatgttgaggggaaagggagagatggctggtggcggagtggaggtggagggggatggccatggtggccaggctaattggaaatgagatagaggagataggggaaggaggaggaacaagtctaaaatttttaataaatgcatcgaagggttaagcaatgacatatctcagataactgtaaaattgtaatgtcttgggtccaaataagtgaatagtaatagttttttttttaaaaatgtaaatttgtaatggcatagatccgattaacctaaaaaaatatcagtattgtatttgagaagcaaatttacacgagagacatcccagctatgtcgcattgtaacatgtgcccattgcttttgactattccattgctttgtttatgcagggaaagttaaagatagctagctagctataaatagaaaagctaagttagctaggtataagttaggccctgttcgtttgttctacgagtagagaataaaattttggataaaagtgacatgctttttaaactgctaaacagtgtgtttcgtgtgaaaactttctatataaaagttgttttaaaatatcagattaatctaatttttaagtttgtaataattaaaactcaattaattatacactattaccacctctttctttctgtgtgaaacacttaatcttaatctttatttttatattcgggagattcaaacaccacccaaggtctctctctaaagatgaagaacgagaatttttgctctaagggaatacactagagataggtctcacagatgtctgatatgacgtgaggatgcatttaatcctttctgcttgattcccatgcatgatggaaatattttgcatgtaagaacatctgtgtattacatattatatatgacatgcatatatgaaaaaaaataatgagagaacattctccaccaaggaccatacttaatctttagtgtacaaaatataggatactccacgtacacggacatatctgaacaggaatatcacatctaaggcctgtttagatcccacataaaaattttacaccctttcacatcgaacgtttgaacacctgcatgaagtattaaatataagctaaaaaataactaattgtaaagattgcgactaatttacgagacgaatcttttgagcctaattgctccatgatttgataatgtggtgctacagtaaacatttactaattaatgatggattaattaggcttaataaatttgtctcacggtttactaacggattttataattagtttttcattagtacccgaacactccatgtgatatcctatataatatccgatgtgacacgtcaaaattttacattcctgataactcttgagcaaatgaggagagtgatcccggaagaaaaacgactgcctacagattgggattgcttagattgtatctcaacttatctctcgagttctaccctaacaagggagaacacagggacataaagacaaggcttcccatgagacgagggtatcacgatctccatacaccaatgcaagccacgtcaaatccacattccgaggattcccaagtgttagccgtcaatcatgtcgccacgaccttaattatctcgccaacacaagtgttggttccattaggattttcatcatataatttgtttttattgtgtctaaaaaataatacatataaacatgacatcaggatttacgatttcgacggacggatttcgtaaaatttcgatgttccgacgaggctcggaagtataaaccgtctaagatttcagggagtttcatccaaattcaaatttaaattgataaaaaaatcaaataaaatcttataaatactatgatattaatagaacctattgggatataaattttcgaaaaaaatgatgtagtgtgtatttactgtaacttacattagaaaaaaaagaataaagaattaaaaaaagaaaaacacttacattggcccgggttgcatgtattaggcccagttaatagttggtccaaaatactggagcaaacaggggagtggcggcgagctgaaacgactgagtcaatatgcttttttttctttatcattttttctaatgggctggtcgagatggccaaacacacaggagctggtcacacaatctcttcgaccgtgttagctttccatcgatggaatgttacaaacaaaaaagcttccaatggattaatcgaacggctaattagttcacctggttgctgtgccaagagcgccatgtgacgaataataaaaattacctggtgtccaatactacatagtaattatttaattatttatttaattattagctagtatatgttatatttaatttaggatcggccacccacttttgcctaaaactgtcacatcgcccaaagcttctgggagaggattgatatcagcccagcaatctcagatgctcaaagcattcacgcgctcaaacgacaaacagcatccaagtctacctgctctggttttgggctctttggaataatcgtcagtcatcgattgacaagatcatcagagttgctgaaggaagaggataggcatgtagcatttcattgacaaggttgaggtcaaacttttataatttagactatcaatgactttaaaaatatttagtttaaaggaactagaacaacatatatagatttgtcttttaaagtactataataaaagtaaacatgcatttatttattatatatcttataatagaaaaacaaggtcaaagatgtatcttgtagaccgtgttattgtccaaaacgttaattaaaatgaaaccggagggattatgtttttcgtcctcgctgtaactctatactctactgtactcctctgtataccttgcaaacaatttgagcaatgaaaaattattcaggtgggaaatctctcccctccggtgattcgttaaaaaaaaaaaaacttatgactgcatacgtcactactacagaaagcgtttttgcatacgggcggaatcgatcttcacatgcggttggccggcccgcatgcgcgaaatggtctgcaaagatcaccatttgcgcatgcggccgtcgcagccgcatgcgaagattgatcttcgcatgcggtcacttaagacggccgcatgcgaaaatagatcttcgcatgcggtccatataagaagccgcatgcgaagatatattttcccatgcggtcgacctaagaagaccgcatgcgaagatctattttcgcatgcgggcgtcttaagtagaccgcatgcgaaattcaatttccgaatagctaaaataatatttattctagcattttggtgattcgtaattaatatgaaattattgagagatttattatcgtatttcggagtagtaagcatataagataagacaagtgccgcagtaacaaacatgtaatacataaccattaattcaatcgtaatttacatacaaatatataatacaagtggcacagttttttcatcatatgtataagtagtgtacatgttattgcatatgttctttctcccactctctgagaggtttaaatttgtcgtccattgcgagttcactctggttgtcgtagaagagacctcttgcgttgcagacatcgcgacggatgaatcggcagaggtcagcggccacgttcaagatagtagtgtggttgaatcgttgtgcaaaatatgggatttcggggatctgcacacagaaaggaaaataaaacggtactcagtgagaagtgtgtgcgagatgggtttctttgtagagaagagttcgatgacctactcggttactggttgttttgtacctcccatttactctgagcatctcgcacacgtaataaccacacaagttggttcctggtggttgtttgtagcactgcgatataattatggggaccgatctcagtagatatatttagtatatatgtactattcgataattagttgtattggtataaatttgatagtaccggccagccagtcctgacggataacttcttctgggatggaatatgtactggtccacctcttttgcggtagtacttgtgtgctctgtttgaaggaaacaattgttttattagtagttagaagactggtgatcgacctaaacaatttatagtaatgaaatgtttatcacttacaaattcaaaatagtgaggaattccataaatgtctccttgtcatagtgtgcggggtccaatgatatgatcaattggtctttcggatatacaaggaataatatgtagtggtctctacatataagataggcttattggagacagaaaattccgaagaagataaattaattaaacaaaaagaagagagagcttacgtgaactggtaggggaccattaagacatctttgtcggcgtgcgccaacattgctattgccaagtatgttgctacttctagcttcttcctcttgtgcaatgtcttcacatattcttccttttcttccggggtcttgccaaccaattgctcgcagtcctgtctcagctctacggtgtgttgtgttttgcatattcttgttggatcgacgtatccaacctttgctccagttctatcagcttcgtggaattgcatactgtacaatgaataaagaagaaatgagatttggtttatttgtttcgaatgaaacgtgcaacatgtaataaagagtttagacttacagacagaaagccgcaacgagattaacgtccattttatctagcttgtagagggcgtaaaggtcttggaaagagataaaaaatatcccattaggaccactcatgaaagcgccttccgggacggcgacgcttatgaaaccgagacctttcctagatgccttcatataccattcgtgcattaccctcatttcccatggtagcttgttcataagataagttggcaagaatggcttgccatactcataagtttcaggcacatcggcagataaccaggattgcacttcatcttgggccgctagtactgacttctgggagtctgacaagacgtgagcaagttcttttctcttctcagaattcctgaaagctgaaaacatgaacttctccttatccttgtcaatctcctttgggtcgtatgtcgatatcaactttggaattatacgacgaggttccaaagtattagactttggttcggatgtagtaccatctggtatgtgcacttcttctaccagagcagattggggtgtaggtggagaggtttgaactgagggcggagccgggggagcatgctgtttagttggggaggtgggagaggcttgaactggttgcggggtcgggagaggcggttgttgagaaggggagggtggtggtgtaggttggcgaggcggtgacctaagcggtggtggtgacggcggatgtcgaggtgacggtggttcaggaggcgacggtggtgcaggagcggcagcagtcattgcctgcgatgaggatggggttgaagatcctgctgcaagaacggccgcgctcaggattatgtctctgcggtgccacaagataaactgattcactgcatcaccgagaagttcaatcccctcaggtgcaggtatgtctagttccaaggaaacgtggtcgctatggaccttggcgacctgtacccttgcgtaatcctcagggattgccgtgttgtggaattgacgtccgggtatcgctaaacccgttgcaacctccttagtctttccagcgcggccgattggtacgacgagactgcacggagttggtccagttatactatccacagggaaggtacttgtctgcactgagcctacactgctgggtacattagttgtttgctgtgcggattgtgtgggttgctggctatcagggaataaccttggaaatgctgtcgggttttcagctgccaacgagtagaagtgttccttcacttgcgcatagatcttgtccgatagttgttctttgtatttgtctctcttcttataacttggtgcgtcttgtggaaacccgaccttccaacttgtctttgaggacaaaccccttacacgtccagagtgttcagccgtccccaacgccgcagtaagctgatctctctccctccgtgggacgaactgtcctgatctttctttctcgactatctgctgcaaattagtagtcacttcttctatgtctggagtctcgaatagtatgtctccctcatccgagacttgacctgtgctgcgcgcccaaacccagttcttgctacgttcaaccatggggtctaccagcaggggcttaccggccgcggcaaatctttgctcgatctcccgccattgatcgacgtgaccagcgtatccgctcgaccccaatctatggggatatctgttcttcttcgcgagctcggacatttttttcctcaaagccaatgcttccgctgttgtacgatccgcaacaaacgtgtcccagtcagcctgcgatatatgtccataatccgtaaacggtgggagattcttctgaacataatcccgatttagatcggacttccactgtcgccatcgatctcccatctttttaagtgcgtaatctctccccctgacctctgatccaggagggaacacaaaatacttctgcaactcattccagagaagtgtcttgatgttgtcgtccactgtttcccacaacttgacattaatgggacaacgcgtcctgactagagtgccacaggcgttgctgaacttggaccgcactatcggtggctcgatgggcttcccatcctgatcgagagcaatcacgttgtaagtttccttgggtaatttattcttgcttctctcaccacgtctttttttcccactcccgcctgcacttgtagatgtctccgtacgttcaggtgcagacgtagcggtgtccatctcaacttcttgctctgtcctgttcctcccggctttacgtttcgagcggcgtcggactaccatctgcacagaataggtaactctatacaccattaggttcatgtcacatcatagttagggaataatacatggctaacgattttcagcacttacggcctgttcgataggtatgtagtccggatcatcatcgcggggggcgacttgtgttatttccattggaaacgggtcacttggtgtgcgccacgtttcttcactagaagcgcctggctgcttattgctaccggaattttgaggagcgttaccttcttgaggcgctattggtgcgttcgatggaaccttttcgttcgacatcttccaacttgacgtaaaaaaatttgacataagtcccaattttacgtaagtcccaatttaacgcaatttcacataagtctcaatttgacataagtcccaatttaacataagtcccaattatacataaatctcaatttaacataagtcacaattatacataaatctcaaattaacacaggtcacaatttaacttattttcacataagtcccaataacttaatttcacataactcccaatttaacataagtcccaatttcacataagtcccaatttaacataggtcccaatttagcataagtcacaattaaacagaaatctccaattgacataggtgccaatttaacataagtcccaattatacataaatctcagtttaacaaaaatcacaattatacataaatcacaatttaacataggtgccaatttaacaaaagtcccaattatacataaatcccaatttaacataagtcccaatttaaacataagtcccaatttaaacataaatctccatttaacaatccacaattaaaccttctcaaaattaaacaatccacaattgcacatatcacaatccacgatgcacaattaaacaatccacaatccacaattgcacatttcacatttctaaaaagtaaatgttaccgagcgacggcggggacgacctggcggcggcgacgacctggcggcggcgatggcaacggcgaggggggagaggtccgtgcggcggcgacggcgacctggcggcggcgacggcgacggcgacggcgagggcaacggtcctggcagtggcgtcggcgacggcgaggggcggggcgacttcggggaggagccggcggtagcggggacgacttggcggcggggacgacctggcggcggcgatggcaacggcgaggggggagagttccgtgcggtggcgacggcgacctggcggcggcgacggcgacggcgaggggggagaggtcctggcggcggcgacggcaaaggcgaggggggagaggtcctgacggcggcggcggcgacggcgtggggcggggcgactttggggaggagccggcggtggcggggacgacggcgacggcgacttgggaaattttggcagcctggcggctagggtttcgcgggagctgggacttagaaaattttggctccccgcgctccctatatataggcgcagatcatcgcatgcgggcggcttaagggaccgcatggaaaaatatctttccatgcggtcgacataagccggccgcatgcgaaaaagatctttccatgcgggctgttaagccggccgcatgcgaaaaagatctttccatgcggtcgacataagccggccgcatgcgaaaaagttctttccatgcggtcgacataagccggccgcatgcgaaaaagatctttccatgcggtcgacataagccggccgcatgcgaaaaagatctttccatgcgggctgttaagccagccgcatagaaagatctttttaccaaaaaaactcatattttttttcctctataagtaaactgtccatatatatttttttcccaatatttcgccacaattatacattccaaatgtttttggcactaagaaaactcatgaaaattactcaaaactcgtaatcaaatgttacatgctaatgattacaacataagggggacctaaattcatgcacgtacatttgctaatgattacaacataagggggacctaaattcatgcacgtacatttggaatacaatgagaactaaaggttacgaaataactatgacttaataaccttggcaacaccatctgctcgaacgtacgacatatttgcttcatcgattgttctctcaaccttcttaattcgcataggaagatcagtaaacaatggtacatcgtcgaactggttgtaatcattggggtcttcgatgttgtcgatgccgacgatctgttgctttccggatatgacaatagtttttctttcatctgaagggtccttcacataaaacacctgagccacacgctctgctaaaacccatggatcatccttgtggcctgttttactgtgatcgactatcgttagcccgtagtcatcaacggaaacccctattgtgtctttaacccattcacaacggagcacagggatctggatgtttaggccatagtccagttcccatatttcttgaatggtcccataatacgacctcttttctccactcgtgtcaatcgcttcgacacggatcccactgttttgtgaggtgcttttcatgtccttcgtagtcgtactcaaggtaaatccattgatgtcgtaaccttgccatgaattgacaatacttgaaggcccacatgccaatctttgtaaagtaagttcctccacagaatcaccaactggcaggtttagatctttcaaccacagaggaaagcgacgcttgtgctctcttgatatccaatcattggaccgccctgggaagcaggctttgatttcttctaggtgtcgctcaatgaatggctcaacgatagcgagctgttgaagaacgctgttgtgtgccgcggacacctttttgtaatcattatcgaagaactgcttcctaccaacagtaccccttccagacaatctaccttcatgtcgatgaacaggaatgccaatggcattagcatcctttatgtagtccatacaacactcgactgcctcttcagttgtgtatccctctatcattgatccttccgggtgagcgcgattgcgtacatagcctttgaggatcgacatgtaacgctcataggcccacatctgatgtaagtataatggaccaagttcaataatctgagggacgatgtgaacgatcaaatgctccatcatatctaaaaatgatggtgggaaatacatctcaagctggcatacagtctcgacggcaaatgtctgaagcggacctaattccaaaggatcaaatactttttgcgaaattcgattgaaaaagtagcacaactttgttataaccacctttgtatggactggtttgactgcccttatagcaattggtaggaacactgttagcaacctatgacagtcatgcgcattgtatcccgaaatggacaaatcctttattgatactagcttcctgatgttcgatgcgaaaccagtaggcactctaaccccttgtaaacatttacagaaggcttttttctcatcaagtgtcaacgagtaacaagcaggaggaatctcggtcttcccatttggcagcagtactgggtgaaggtcatgccgtatggacaaatctacaaggtcgttacgtgacttcaatccatccttcgttttactcgggatgtccagcaatgtgccaacggtgctatcaaacacgttcttctcgaggtgcataacatcaattgcatgtcgaatctctaggtccttccagtaatctaagtatttaaagaaaattgagtgcttcttgaaaggcgacgcagtaccgttgtcaccatcagctttcttcctctttactgtcttcttctttccctttccatatacaaccttaatcttctttgttatctcatacacgtatgtaccacctcttgctactggggcagtgtcattctccactgtattatcgaacaatctagccatcttacggtacctatgtctttgtggtaggaaccgtcgatgtcgcatgtacactgtcttcaaagacgacgtcaggtatttgtatgaagttttctccagacatatcagacatccagtcttccctttaatctgcccagataatgaaaagtttgcaggtaggtcattgatggtaacgaatatgattgcacgtagattgaagtgctcccgcttaaactcatcccatagtcgtaacccctctttccaaagctcctccatgtcctccatcaaaggctcaaggaaaacatctatgtcgattccaggttggtttggaccttgtatgaggatagtgagtagaatgtactttcgtttctgacatatccatgttggaagattatacattgtgagaaggactggccatgtgctgtgcgagctgcttaagtcaccaaacgggttcattccatcagtgctcaacgcaaaccttacattcctaggatccttagcaaattctgggtgttttgcatcaaatgtcttccactggcgagcgtcggcgggatgtcgaatcataccatctattttccggctctcttgatgccatctcatcaactcagcatcagtcgggtttgagtacagacgcttcaggcggtccttaattggtaggtaccacatcaccattgaaggaatcttcccgcgcttacccttatcagaatctggatcggtacactctgaatctacgggcccattccccgttttataccgacttgtgccacacgttgggcaacattccaattccgcatattctttacggtataatatgcagtgattcttacaagcatgaatcttttctacaccaagagataaaggacatatgagtttcttcgcttgatacgtgttcgatggtacaaagttaggcttaggaagcaacacacgcaacaaactcatcagatcattaaaacttgtgtccgaccatccatgtttagccttcaatctcagaagttcaagcactgaacgcaagactgtgaaatccttatcacatcccttcgtttcatcgtaaagaagatccttcgatgccttctctaatgcttgccaattctccaatcctcgtgacctgcccgctagcacctctggttcaacatggcgtagcatatcctctaaatcaaaaccaccatcgaaatcatcactatcggtggaaacatcgacaatcattctttcacgcgacatgtcttcgattataaaattctctgcctcattcatctcgaaacttaactcttcatcgtcatcttccggattggcgaattccccgtgataggtccaaaccttgtagttggcggtgaatccgtactccattatgtgacccaatatttcaccaggatctaccaacaatttctgattcttgcaatgacggcacggacaaaagatctttgtcatattctccctcaaagcatgctccttagcctgatcaataaatttagatgcttccttaataaatatcggctgcgttctccgcatctcatacatccatgacgaccgatccatctaattatataaaggcaaaaaagttacagataaaaaaatagaccgcaggtatttcatacaaaagtttaaatgcatttgtctcccaaaaaaaatacaacaatacatgtaactagtatgtacaattgattacatgcaaaatttgcccatcaaaacatatattttgaagctagattttgcaaaaaatagttggaacaaaccttgtcaaaatattaaaaaaactccactttccaccaacgaaatataacaaaaatggagccaaatgaagcaagatagagagttcttcacctttcgtatagagttcaagtaaaaatttcgagttgaaaacctccccccctaattggtgcttgctttaggagagagaaagcttcgttttcaaatggtcaagctcgggcctggaggagcatatatggccgatcatcgcatgcggctaatcaacccgccccgggggggcggtttttgcaggcgccaccacaagcggcccgcatggaacctaccgaccccctcgtacagaaaaacgatttttgtagtagtgcgtgtacgtcttccaaaagagtaaattgcaatacttattataaagcttgttattgatacaagctagatgcatacatacatgcgtgaactgatcatacaccctcttaaccaacacaagctgatcgaagagaccgatatcaacgacgaatcactaatatagtgtatgtgtaatatttgtgacatcaaaatttaaacattagtggatgcatccacgagaccgtaccacgattcatcacttcatttgtacacttcctagaaagagcatctccgataacatcctttccaaatctcactttccaaatgttcatttgaccgatttgccaaaaaataaaaagatagtcaaatttacctttcatttcaatagcctctctattacaattctctaatctgatagtgggtctcacatgtcagcctccctacttctttccccttcttctttctctccttcaccctctcctctatctcttctcttcctctctcttcttctttgccggccgccagtcgaatccgtgtggggaaagaggcgttggaggccgtgcaaggacagagacggtggagaccgcgacgagcaacaacagtgcagttgtggtggatggcgagactccaaatgatgagtcatgagagagactgtgatgaagccgaaagcgcagccagaacgtattcatcaccagtgaccggtctgacctcgtcgacaccgccgctaaaggtcagcaggccctccgatccatccctgccctatcatcgtcgttgcttgctccgccaccactgctacaactccttgctccaccatcagtgccgtcaccaccaattgatccgccaccgtcggtgtcatcactgcttgcgggtgggggccagtacatggcgagagagagagagagcaagagagaggggggggggcggggagccggaagaagggatgggagagatggtgggacccacctttggccaatggaagaggctggctacgtttagccattcggatggagagtctattggaactcgttttttctctatgttggagatgatctaaagctcatcaattttttttaatacaaactaagtaacacatatataattagataatcaaattaagagtatcttttattttgtcagatgaatttgttttacagattaaatagtatataatataggccgtacctgatctttgtcaaggttatggataccacgtacctaatagtagttgactaaatctcggcaggacccaccacataccatgtcctatacggaaacaacctgcggatataggaggagttctggataaggaaagacaaccagagttctacatagaaatgacaagaactactcggattgtatccatattggtttccttagttctacttggacaaggggacacctatgtgtataaatacaaggctccctaggaggagaggggacacaaccaacgcccaccatagacggaacaacagaagccacaacatacaagccaacatacgacaggacaagacgccggatatcgacttcagggataggcacggctagtcccctacggtgtctccagatactgtcaggagagacgaaagcgctatctctgatctcgccgggcacgaactcgaggaggaagactaccctgttatcgactacgagtcagaccttcagaccgccatgtcgacaacagttagataggctaccccacatattgtacttgtgtgatctagatgaataaagagcaacaacggcttcggccaacatgatgtagggttattacctgataattcaggggcccgaacctgtataaaaaggcatgtataaaaatctccgtctccatctcttttacctcagtctcgcgtataccctagtaccaacgatccccataccatgtaaataccagaatcgcgacatcaaatgtcgacagtggcgtaccaggtaggaggattttggtgcttcaggatttcaatgagatgggtttaagagatagattctccaacaataagctactcgacgactttggctatggggagatctaacctgaccggaatatgtctttcgacaagagcggaaccatagtcaccaattatttgatctctcgagatcaaccaagcttcgacgtgttgccatggtgtcggcatggtgtcggcatgatccaacattaaattctcgacgtgtgcgacatcaactggtgcaaggtatcggccggctgagtccaagtcgaacccgacaccgatccctaccaaccaaccaagcacgtcgaggagccaaaaatctaccgctggattagtactaccgtgttctaactaggacacgatttctagccacgatctactggtcgacagcctgacgtcaccctgcatgtccctttaccgagccaacacccatgtgcgcacgtgcatgtatattggccgaacagagctcctatatgtattttgatgacacatactccatgtctcccaaggtaattagtaagattaatttttaaattggtctactaattccgtagatacatccggcatatatctgcaaaggtacgcaatattttatacacaatttaccatacctacttttccgatctatacgatattatcagatctataatttattatgtttacctagagcatatttttttatacaatatctgttgcgcgggtgtccccgatgttaaatcgactacgatctaacgctggggctcgctctatcttcttctgtataaatcatgcttgtttacagtttacataatgccctgatatttaatctgctcgttatatcctgataatgctagaagatccatgcagtttttttgagtacatattcgatattatctgctatatatcttgtcttctagaaaatatttttcaggaacaattgagcactcgagtaggttgtggtcaagtacaccgcattatcgagaatgatctcgacaaatgcagagttgtttcccccaatctaccaacgaagaccgacgacctatctaatagcaccggccgtggctagactatttgagaaaaggttgttaacggataattcctcgtgaacgttgtcggcttaatcacacgacatgattgcaaacggacatctggatatgctacaagttgggtgtgtgagtcatgctggccacatgagatacacatgtaataaaccaactctagcgctttcattgttgttcgagagatgattctactcgctcgctggttctcgaaccagtacgtagcaatctcccacaccgcaacttccattggtgttcgagagatgattctactcgctcgctggttctcgaacaagtacgtagcaatctcccgcaccacaaacctccattggtgttcgagagatgattctactcgctcgttggttctcgaaccaatacgtagcaatctcccgcaccgcaacctccattggtgttcgagagatgattctactcgctagctggttgtcgaaccagtacgtagcaatctcccgcactgcaactttcattggtgttcgagaaatgattctactcgctggctggttctcgaaccagtacgtagcaatctcccgcatcgcaaacctccattggtattcgagagatgattctactcgctcgctggttctcgaaccagtacgtagcaatctcccgcaccgcaacctccattggtgttcgagagatgattctcgctcgctggttgtcgaaccagtacgtagcaatctcccgcaccgcaacttccattggtgttcgagagatgattctactcgctcgctggttctcgaaccagtatgtagcaatctcccacaccgcaaacctccattggtgttcgagagatgattatactccacaggtggagaaagcgtttgtagtaccggtttgtaacccccctttagtcccggttgtctaaccgggactacgaatctgggactaaagatagctatctttagttccgggtgaaataatcgggactaaaggtcgatttttagtcccagttcgtgttaccaaccgggactaaagatctgtcagccacgtggccggccgaaccatctttagtcccggtttgtgttaccaaccgggactaaagatcggtgtaccattttttttattttgcatggcgctgtttgctgcaaggttgattatatatatatatatatatatatatgtgtgtgtgtgtgtgtgtgtgtgtgggcgcgcgcgcgcgcgtgcgcatatgtgtatatgtataaatacatatattacacacatatgtataatttaaagcacttaacattttatatgcatatatattaccaaaatatatattaacactaaagtaaatgtgtacatatataaatatatatatacacgcatatatagtacaattcatttgctcgatagctatagatacgacttcgacgccggcgttatgtcagaagaggaaggaccgacgttatgaattgtcgatccatcgtagtagaattcaccatcgggattaaggacttcttcgttgatgaatcccattagttattcttgaacagccgtgataaaatccttgtgtgggagattatccctcatgtgaatacgctatcattcgaaaaataatgacatatcaatatatgaaattaataaacaacttaacaaatcgatacgcaatgaaattttgaatggtttatgtatacgtacatcgagctctcgtgtggtgtatatttggtttgataggcagtgggcatactcgcatatgtagtagccgtataagttagttccttggtcctgctttgcacacttcatgagaaacgatgagagatttaatataatctttatatttaactgtaattagagatttaattaaatacaattttggatcatgcatatactcaccggaaaatgaaacctccatccaagtttttctttccaagtcccgcggaccaatttacggaaccgatcccaagccctacatgtgcagttgcaagctatgattaattaattattacccgagatcaacataatagcaatagaatccccgcgactttggaatagatggtattatattacctgtctatcagttggaagaccttttcaaaaatcttctcctctttattcattgagtcatacacagtgactctgcatgcgtccaagtcgaagaataacaggacccagtggaatctggaatatgcgtgagatgagatatatatgaaaatatacatgctatatgtatgggaacgaaatttgttcgaacgacaataaaaactcactctgtgttgtacggcagtagtataaacgtcttgaaatgctgctgcgttaggagatggacgagattgtcctctgtgtctttctcgtacttgtcgatcatttcggtgttgattttccgagggtcgatgaacccagtatcgtaaaccccccgccgtcgggccctttgaatctccattctacaacaataaaatgaaattgttattgtttacatatatgacaggagctagttattgaacgaaacaaatcgaactcaaagatacttacaaaatccatgcgctcaaaagagagacgtcgagggcgtccaaatggtacagatcgaagacatccttgaaatggagccagagaacatcttctccttgcaagaagtcggggtttctgatcctcgctccgaacatctctctacccttggcgctcatttccatgtaccgttcatggaatttgtacatctgtgtcggtagggactgcagctgctcaggcgtgacaagcggtttaccgagttcaaacttgtatgccacttccgcctttaggattggtgtggctccaatcagctgatccacagttagaccggtatctgaaatgaaatccgttattccaaaattttcgccggtcaccaacggctcgacctcttggtttggttgttctccaagctgagggactggtttggacttcttgtgataggctttctgaagtgttcggtcatagtccgatatctttaaggcctccttgtttgctatggacattcccttaaagaagttcttcacgcttgggtcaataggtatcttcttttcattactccgaggcttgagttgcttcttcacttctcctgccacataagcatcaagctcctcttgactgcaatcgtacggcggctccttgtttgtggtggtgtcaactttcgccttcttcgttgcccttgtgtaggcaggcggtggagcttggtgagaccttgtcttgggaggtgcaggcagacacggtggaggtggaggaggcggaggagccggaggagatggtgcagggggacgtggcggaggaaccgaaggatatggtgcaggaggagatggtggagccggaggagatggtgcacgagacgccgcttgtcgcccagggaggatgatgtaccgcttgcaccatagtataatggcgtggcttgtgcctcgtagatgcgtctcaccgtttcctcctgggtagtccaactcgaggtcctcatacgcagcttccactagctcaacttcgaccctcgagtatcctgctggaatcggcctgcagtggtaagtccctgaaatgtccgttgggatggccattcccgacaccaccttcacgtgatgagaggttatctattagtaatcgacctaagcagaaacttgcggaatgtacaagtcaaaaaatcataaaactatgagcataccttgattgataagttcttgaagggaatatgcagctcacatggtgtccgttgcgtgatctcatcaacggggcaggtggtttcatcctgggtttgcatggcgtccatgctctatgatcctacctgccccgttaaggcacagctgttacgattgcctgatgggctaaccattgcaggaggaatgtacggctggggatcctgggaccgatgtgcggccatgcgttcatccaccttccttgccacctcctcttgcatgctgagctcggctcgataccctgtactcaagatctgcaatctttgcctcatccgactcctgtacgtgtggatgtcctccttgaatccaatcttccagggaatcacgcctttccctggtgttcgtcctggatgctcgggagtctgtagggcgagtgacagctcgtccttctctctgtcgggtcagaatgtgccctgagaagaggctttcactgcgtccgttagtcgactggcagcctcgcgtatctgatcgctgaagacaagggagccatcaactgggttaagcgttccaccgtgagcatagtaccagaacttcgatcgatccggccatttagcggtggccggttcgatacccctctcaatcaatcttgcctccatctcctcccacttcggcattgcgacgctatatccgcctgaccctaagtggtgatggtacttctttttggcggcattttctttgtttctggccatcatcgcttgcccttgttgccctgtcttgtaagcaacgaacttgtcccaatgatctcttagctttgggaatacgtcgaagttcggtgttagtcccttcaggatgtatttcttgtagagatctcccttgaagctctggaactgttctgccattttctgtagagtccactgtttcactatgttctccgtacccgcgggtagcgtgagcatctcgagcattgtggtccacaacatctctttctctgattccgggacaaagctgtcattatccccgtgtgcccttgttctgcgccagtacaccgtgctgacaggcacgttgtccctcacaacccaaccgctgtggcgtacaaaattcttggctgcttctgccggggcactaggtcggccgtcttcgtccacctcagttatgatgtgccgaccctctatcttcttcacagaacctcgttgtccacgtgccctcttctgtccagcggagggatgacttccactagcctcctcctcctcgttcccctccgcatccctctccatgttcccctcctcgttcaagtactggtttggatcctcgtttccctcttcttcgttccagtactggctacttccctctgcgattgtatcgtacagtatctgttcctcatcgcgatcagccatctgtgcatacaaaaaatatttgttaggtctataggtcatatttgctaagcgtaatattaaaactctaataatcttatattaaaattgtaataatcatatatgctaagtctaacaattttatattaaatcgctactaatcttatattaaaattgtaataatcatatatatatatatatatatatatatatatatatctatatattaaatctctaataatataataatcttatattaaaactctaataatctaataatcttatattaaaactgtaataatcttatattaaatctctaacaaacacttctttacatcacttgcctgcgcgaattcctttgatggctagctaccacttcggcttgagggacgacgacgacgtcttctctgcaacattaccaggaaaatgtattagtctaaacgggccaagttacatatattgtatttcacgttttaacatatatatatataatcatatatgtatgctaagtttaataatcgtttaattatctcgttcgtacacgttcgctcgcgttcgttctcacacttttagtacaagtgcatt

SEQ ID NO: 8697 - DNA, 1037 bp, Oryza sativa
  unsure (1)..(1037): unsure at all n locations
cggcggcgaaggcaagccggtggtgaagtcgtagacgcccaacagcggcggcataataggccagccgtgtaggcggaggcacccgtcgccggcgacgtaggcagnccggcggtgaagtcgtagacgcccaacagcggcggcataataggccagccgtgtaggcggaggcaccactcgcgggcgacggaggcaggccggcggtgaagtcgtagacgcccaacagcggcggcataataggccagccgtgtaggcggaggcaccactcggcggcgacggaggcaggccggcggtgaagtcgtagacgcccaacagcggcggcataataggccagccgtgtaggcggaggcaccactcggcggcgacgtaggcaggccggcggtgaagtcgtagacgcccaacagcggcggcataataggccagccgtgtaggcggaggcaccactcggcggcgacggaggcaggccggcggtgaagtcgtagacgcccaacagcggcggcataataggccagccgtgtaggcggaggcaccactcggcggcgacggaggcacgccggtcagtgaagacgtagacgcccaacaacggcggcataaaggccagccgtgcaggcggaaacaccagtcggcggcggcgaaggcaagccggtcggtgaagacgtagacgcccaacaacggcggcataataggccagccgtgcaggaggaagcaccagtcggcggcggacgaggcggccggtcggtgaagacgtagacgcccaacaacggcggcataataggccagccgtgcaggcggaagcaccagtcggcggcggacgaggcggccggtcggtgaagacgtagacgcccaacaacggcggcataaaggccagccgtgcaggcggaaacaccagtcggcggcggcgaaggcaagccggtcggtgaagacgtagacgcccaacaatggcggcataaaggccagccgtgcaggcggaaacaccattcggcagcggcgaaagcaagccggtcggtgaaaacgtaaacgcccaacaacggcggcataat

SEQ ID NO: 8698 - DNA, 11168 bp, Oryza sativa
cttgtactagtatgagtttaggactcttagtatgagtttggttcgtggctttaggctgcctacctcatgtataaatagagggggagcgtgaggcttcccggtatcgctttagagagcaattgagttgagtttggagttagggtttcgagtttagtcgaaatttttgtaaggagtgctattggtgcactttgtaagcacagagagaatcaataaagttgtcatctactttaagagttcttcgatttgtgtttcaccgggtttcggcggtctaaccggcaactcaccggcggtcagaccggcggcattgcggcggtcagaccggcgggagcacagcggtcagaccggcggcgacgacagcgagcggcaggcgatctcggcggttagaccggtagatcaacaccggtcagaccagctaatctacttcggtcagaccgatttcatcgaaattaagggtaacttttatttccgctaaaagtttttggtttttgggtataccaatcattcaccccccctctggttggcttagttcttgtgattcgttcctacaagtggtatcagagccttgttttcttctttggatttttatcgatctagagtttttgccatggctactcccgcaaggttttcaactaagcctcatgttttcgatggaacggatttttctcattggtgtagtaggatgcaatcttatattatggctgaagattatgatatttggagaaaagtttctcatccttattgtcgaaacatgataatgaagataatgactcctggagttgactcgttggttgatgaattgatttcttcagcttgacataaaatttgtcaaattttgagccttgtatttgtgtagcccccgactctttgattagttgggaaacaactgaacatagagtcgagaactgtagcttcttgtcgtcgaatagtcattgcttgattgaagatatgtgttgaagatgtccaagtagaaatcctgaatattggagagccacttgttgtagtaaaataacacggcatcgcatgccgagatgtcgagattcacaacaacgtcatggttggtgatgtagcaaaacttgttaagtagcagcaatagagtttgctggttccgaagataataaagatgaagtcgctccaccatgatgacaaagttgtgttgccgtgatgaagtgaaccggtagtgaagacgcgcagttgtgaagataaaagcactagtcggcggcggcataacacgagtcggcggcggaagacgatgatgtccatcagtagtggtagctgtataaaccaaatgtagaggcgagggcactagtcagcagcagacgagacgaccggcgatgaagatggtaaggccaatcaacactggcagaatcatgcagccatggcaaatgtaggcagcttgtgttgaagatactgatgcctattagtagtgacagcgatgtagccagtcgtgaagaagatagcatcagttggcgttataacaggccagccgtgcaggcgatgacaccactcggcggcggatgcggcggccggtcggtgaagacgcagacgcccaacaacggcagcataataggccagccgtgcaggcgggaacaccagtcggcggcggtcgaggtggccggtcggtgacgacgtagacgcccaacaacggcggcataataggccagccgtgcaggcggaagcaccagtcggcggcggacgaggcggccggtcggtgaagacgtagacgcccaacaacggcggcataataggccagccgtgcaggcggaagcaccagtcggcggcggacgaggcggccggtcggtgaagacgtagacgcccaacagcggcggcataataggccagccgtgtaggcggaggcaccactcggcggcgacggaggcaggccggcggtgaagtcgtagacgcccaacagcggcggcataataggccagccgtgtaggcggaggcaccactcggcggcgacggaggcaggccggcggtgaagtcgtagacgcccaacagcggcggcataataggccagccgtgtaggcggaggcaccactcggcggcgacggaggcaggccggcggtgaagtcgtagacgcccaacagcggcggcatatgtcgcgaccgggaaaattgccttttcccgaacgctagtgtattaatccccgtcccaggaaaagccggggtacaccatacaaacatgatataaaagacacatctttattacatcgataatatttacattattacaaaggcacttaaggcctgacaatcaaaaataaacagcagcggactagcgggcctacggctccatcttcacaggcgctcaactggggtataagccaggaccccacctaagacatcttctccaaagcttctcttactgaagaggggaaagattgagcaagaatgagtacaaccacagtactcagcaggccacaccggagatgcacaattaatgcaaaggagtacaaggggataataacatagaggttaagttttgcagtagacggcatttaaaagtcacttagttgcccaaagctattttgtaaagacgatcctagctatacaatattattaaccaaggccgtgaaccctcacgaacctgccttaacccaaggcctacgatgattcagaccgaactggcaacccgaccctgggtcccagctcgtcccaagccaacccaggccaaccattccacattttagttgttgagcaaattttaagaattgaaacactgacttgggtacattgctcggcttgcccataaccgagggcgcggctattcgaatagattatactctgatcagaggtgtacatctttacccacaagacacatcttcctcacgtgtaaccacgtgccacataccaccacggtatacagacggaagacgtgatatagtttccaacccatcctagccatagacaagagtaccgacccaatcccgcctacggccggaacccccgggacaggcaggcaggactgagcccctagcagcagggcaccaaccctctgccatatgacatctcgactaccgggccgcagctcgtgtagccttcatttgccctggagaatgtccatcgacccccgacttcatccatctccaatccgtgtacttttgtttataactagactgagccacaaactaagccttacccactagacatgtggaagtacggtagtgctttgcaacagaggcccgagcttaatccttatagtggccggggtgctacttcccacaactggcatgcacccaaaccccaccgaaaacaggttttaggggttttgaaaggggaagagaggtgtatgtccaattccaccataaaccaacaattccatagtgtccaaatgatatgagaattcccaaagtctaaagttataaaaaccacctaatgttgcctaattaatcagcgaagcatctacctacattcatactagtggaaccatgaatagagtacccactagttggggttttgtttaatctagggtgaacaaggtaataatatcaataacaatagtattaaggtcataacaaaggtaaatgggcatggctaaataaaacagtgatcacgcgggaatttaaataaagcgataatgcaataatttaaatcaaaataattttataaactgggattcaacatgttcaaggatgatgtgacttgccttgctcagagagaacagccttccgaaccttcggcgacaaccgcgaaccacgcttcgggaacctccggaacgacgaaagctacgcgaagcacacaagcaaagctacaagcctataaagaagcaataacaacacataaaaagaaagcacagggttctttaggttataacaaacattaagagacttgaacgggtcgattcggagctcgtatgaccaggatatgatcatccgaagtttaatgctgttatatggagatttgcgaattattataattaggttttgcaactatgaaacatgtgtaagcgctagcctggaaaggacaggaaggctgcgccgttgacatgtggaccccacatgtcaacctaaaggaccgcggtagaccgggtacacagagacggtccacgggtcgacggaggcggaccccgtgtgtcaaccgaggcgagtggccaacaaacggactccactagacaccacacgggatgcacacgtagaaaccacgcggctaccgagcgggcacacaaacacggacaccacacgcacaagcgaacgactaccgacaccggtacacgggtaccggtgtcgacaaccgcacaacgggtacggggcgacaccgaaaggacgagggcggggaagcgagaggacggatccttaccaccacgcgacgaggcgcgggaacgacaacgacgaacgggcgcggcggagacagacgggcacaacggagacgaacggcgaggggacggcttcggcggcgatccttgaacgaaggcgagacgcggccggcacgaggcttgacgacgcggagccgaggacgaagacgaggacgggggctgcagcgacttgcttgactgatgcggacgacggatgagaacggcttgacggagggacgaacgccacgacgagcgaaaccgggaacgacgagaggacgatgacgacgacgaccggaaccggcgaggaggcgacgaggacagccggcagcggctgcacggagacgaggacgacgtgggacacgccgctgcgatgacgatgacggaggcggtgccgcgagacgacgagccgggcgaccgacgggacgtcgacgacgagaacgatcggagacgacgatgatggaccgcggaggggtttggatggaggggaagcgaggccaagagcgaccttgccgctgcgatgccggaggtggtggaggtgcagcgagccgacgagccggggaggaggaaggggcggccgaaaggacaccggcgacgaagaggatggagagaccggcgcggcgacggcgttccggcgaaaaccgaggagcagccggggtggagggcgatgcggcgacgccgagggaggagacggtgacgtcggccgacgctcaggcgaggcggccgggacagctggagatggtggagtggtggcgacaccactagtcgtcggtgaggacgcgtctccggtgatttccccgcgaaacggaggcgaagccgggaaagaggaggcagctgcgaggccgagggagaagacggcgcggccgggcggcgctcgggcgaggagaggaaggcggctggaggtggccggcgcgaaggaaagaggagggcgacggcgggaacgtagttccgggggtctcctcgcgaaacggagggcaggccggcgtggaggaggtggcggcgacgctggaggaggcgatggcgcggccggccggcgcacgggcgaggcggcacaggcggctggaggtcgccggcggcgtgggagagagagggcgacggcggggatggggctagagaccacggggaggctcgggatggggttaaaacggtagaacggagtgcggggatcccattttatatgagagaagagggagccggccacgggggaggtcggaacggcggcggaaaagccggccggcggcaatggaaggcggccggacttggcgcggccgttcccggcgattgggggcggcattcaaaggggaaattagggggaaatgaagaggagtcaatggggattaatttcccctatttaattttggaattaaccaagcgaatcaagcggatttggaggagggagcgagctagggttcacgggagagggagagaggacggccgggcgggaggaaggggacgacgcccggcctggcgcgtgggacccaccggtcaggcggcggcgtcagcgcgcgcacgcgcgcggcacgtgcgggaggggagcggctcgggggctggggcggcttgggccggcggccggcccaggaagagaggagggagaggcggcctgggccgggcaggccgggaggggaggggaagagagaggcagcccgggagggagagggaagagggaggtgggccgaggggaagggggcccaagaggaggagggagagaaaagagggaggagaggaggactttggactgggcttggcccaaaggaggaagaggagggatttttaggttttctttttattgacctttgataattgtttttgttgtttaataattatttccggtgctctgaaaattcaagtgaaatttgagggctccttttagaccaaggagaatttaacaaaaattctccgggtcacatttgaatttttcttgcacgtattttagtgtttgccaatttctttccgacttttaattaattctattattccttttagaaaatgaattttaatttggaatggatttatcaggacgtgacagcataataggccagccgtgtaggcggaggcaccactcggcggcgacggaggcaggccggcggtgaagtcgtagacgcccaacagcggcggcataataggccagccgtgtaggcggaggcaccactcggcggcgacggaggcaggccggcggtgaagtcgtagacgcccaacagcggcggcataataggccagccgtgtaggcggaggcaccactcggcggcgacgtaggcaggccggcggtgaagtcgtagacgcccaacagcggcggcataataggccagccgtgtaggcggaggcaccactcggcggcgacggaggcaggccggcggtgaagtcgtagacgcccaacagcggcggcataataggccagccgtgtaggcggaggcaccactcggcggcgacgaaggcacgccggtcagtgaagacgtagacgcccaacaatggcggcataaaggccagccgtgcaggcggaaacaccagtcggcagcggcgaaggcaagccagtcggtgatgttctgactgatccattcctggagcgtaagagataagcctaaagccatgaatcccttttatgcatatctggatctggatcctgcagaacaaacatataggatgagtagtatctgatataaatataatactcgagaaaaaatcaagtattttaaaatatttataaacatgtatttctcctcttgtcaattttgatttccccgagcagatgactcattacgtttaaacgctctgcccaactagtcatagccaccaagcactgggagtcggcctaagcacttcccaaacatgcatatgagtgacatgagttcgtcattaatggaacaaagtttcacggatcggagtttactactcgggtacttttgcaattattaagagcagaaaataaatttatctcatctctatgcttttgatttattccgaataatacttagcaccttgcgttactcgatccatccaacgagcccccgggtgctaggaatcggcccaaaggcaaccatccattggcaaaccaaacggaaagcataggaagatagaactccataactcgataggtacttttgtactcagattatgtcgcaagcaatcaagataaatattataaaaaatatgatataacatctgtagcccccgactcactactcaatggaagaccaattggtgtagtgaggcagaggaaaaggaaaaatatcatataaagaataaaataaatgatgacttagctttgtaatattccccttggtgatggcagaagtggccaatgtgggaacaaagtcgtccatcaataacaatgaagacaccagtcggcggcgacgaaggcggtcgacggtgaaagcgaagatgcccactaatggcggcataataggtcagccgtgtaagcggaaacaccagtcggcagcggcgaaggcaagccagtcggtgaagacgtagacgcccaacaacggcggcataaaggccagccgtgcaggcggaagcaccagtcggcggcggacgaggcggccggtcggtgaagacgtagacgcccaacaacggcggcataaaggccagccgtgcaggcggaaacaccagtcggcggcggcgaaggcaagccggtcggtgaagacgtagacgcccaacagcggcggcataataggccagccgtgtaggcggaggcaccactcggcggcgacgtaggcaggccggcggtgaagtcgtagacgcccaacagcggcggcataataggccagccgtgtaggcggaggcaccactcggcggcgacggaggcaggccggcggtgaagtcgtagacgcccaacagcggcggcataataggccagccgtgtaggcggaggcaccactcggcggcgacggaggcaggccggcggtgaagtcgtagacgcccaacagcggcggcataataggccagccgtgtaggcggaggcaccactcggcggcgacggaggcaggccggcggtgaagtcgtagacgcccaacagcggcggcataataggccagccgtgtaggcggaggcaccactcggcggcgacggaggcaggccggcggtgaagtcgtagacgcccaacagcggcggcataataggccagccgtgtaggcggaggcaccaatcggcggcgacggaggcaggccggcggtgaagtcgttgacgcccaacagcggcggcataataggccagccgtgcaggcggaaacaccagtcggcggcggcgaaggccagccggtcggtgaagacatggacgcccatgaacggtggtgtgaccgaccaaccgtataggcgatgacaccagtcggcggcgacggaggcaggccggcggtgaagtcgttgttgctatcagcaatggcggtggcgaggataagccggcggagtggactcgcggccgatcgaccggaaagctgagaagcctcgagtccatgaccagcatcaatcgcctcaatagtgccgcgtagttatatgcgaacaacaacaaaaaatagcaagaaattaatctgagattaaaaatcaatatgataaataatgataaaaatcagattgagtttccccctgactgatttggatcaagtcagagaagaggagcttgaagaagtggtcgacggaaaggaagtgaaaactcccaaagcgaaagcgaagtcggcgactcatgaaattgattccatcgcgctcgttgataggaaactcgacgcaacccctacctggcgcgccaactgtcgaaacatgatttcggcaataataaaagggggtagcgcacgagacctaaaagtggatggatgcagagacaaaagatttagacaggttcaggccctctcaatgagaggtaataccctactcctgtttggggatttgaatccgccgggtgtagtatagatctgacgatcaggttgtgtcatgccccctagagggcctcctgcccaccttatataggatggggggcaggattacaagatagaaaccttaaccaatacggtatcggtttcctaaatctattttacaatattatcgaatcaggactttaggccactccataatataaaaggaaacgtaacacccaagtcatgatctgttacatattacataaatataagttatcccctataactagtcggataaccatgccgtgtgggtatggggtacccataatctccacacttatgtgattcctgaagctattaatactactgctgaaaaaactgcttttgaacaaaattgcaaagctcgcaatattcttttgagtggtatttctcgttcggattatgatcgtgttgctcatctttaaactgctcatgagatttggactgctttgagtaattttcatcaaggaacaaataatattaaagaactttgtcgtgatcttttcaaaaaggagtatattaaatttgagatgaaatccggagaagctttggatgactatctttctcgatttaataaaattttgagtgatcttagatctgttgattcttcttatgatgttaattatccacaatctgagatttctcgccactttttgaatggtcttgacatgtctatttgggagatgaaagttacatctattcaggagtctgttaacatgtctactttgactttggattcactttatacaaaattgaaaacacatgagatgaatgttctttctcgaaaagttgattctaagtcgaatgctttggtttcttcttcttcctctttggatgttgatgcttcttcatctaagtcgtcttttcttgctgtttttaatgccacattcgatgatcaactcgaacaaatcgaggaggaggatttggctttggttgctaacagaattgctcgagctatgaataatgccaggaacaggaaaagaggtggtccaaatcgttgctttgaatgtggttcaattcatcatcttcgttcgcattgtcctaatcttgggagaggcaaaagagaagacaaagatggtgagaagaccaacaacaacaagcccaacaacaacaagtcgaagggttcataccgagggaggaagatggagaatcttaggaaggcttttcaacaagtttgcgccgccttcgagccactaagtgatgtagatggtgaaagtggagatgatgataagggaaagaacatctccgatgtttgctttatggcgcgtggtgaatctgacacagagtatgaagataatgaggtgaatgcttttgaggaagctattaatattttgagtgcaaaaaataagaagtgtgagaagatgtatagaaaacaggaatttatcattgaatctcttaaatctgaaattgatagattaaaatctcttattcctaatgatgatgattgtgaaaattgtgaggttttaatgaatgagatttcaaaaattagagatgttaatgctgcacatgatttaaaaaatagatcttctcttgcttgtagttttgccttgcatacacgcactttggatgagttgtttttaactaaaaagttgttgcaaaaatatcaaattgcttttcatgctagtttgatgtttaacatgatttctgctaaaaagttaaaacaacctcattatgttttggattgctcaacatgtaatttgaataagatgaaactaaaagatgctttaggtcatgttgagtacatggaagatgctgtgaaaaacaatgaagtgctttcttgccctaaatgtcgtaaaagcaaaggtatcatggtagattgtgaaaattgtgctaatttggaaaaagaggtttcttatttgaaaaattctttgctaagattttctgatggtaaaaagaacctcaacatgattttggatcaatcaaaggttagcacacataaccgtggtttaggttttaatccttatgctcataattctagacatcctcctgttgtgttaggtgttag

SEQ ID NO: 8699 - DNA, 2992 bp, Oryza sativa
tggtatcaagaggtttatacctggaagatgttctaatcttttgcattggacggctagccagttttttcctgggagtggtatgctttgggagtttgtcgggcaagcctttgttcccagatttgctgccatcgtcgccttcgtcgtcgctaagcaccagctttctcttgcgagaacctgtctgcccagttggattggaggtttgaggttgcgggtctgatctgattgttggccctccacctccctgaacggtgtgctggcgaggagaccggcgctgagtgattggggggtcagacttcatcaatacatattcctgaatgagatgcctccacggttagttaactcaacatgaagacaagattatgttttggtcatgggttgaaggtttcagatacatacctgcggaggcggattgaacgcgttatatggcaccactggcagctgatgtgagtagttgacgacaatagcatttgagaagattttatacattctctccttcatgattttaaaatccagagaatctggttcttcacgattaggatcatgcttgccgtcaaactcgaatgccgtacgggatctttctttaattggtgccaatcggcatttgatgaagtgccgagtaatctgctctccttgtaagccttgttctttgagttttagcatgcgatccatcaattccaaggcttgggctgcttcatccccaatcggaagagagttccaggtatcttggtacaccggaggaagacaagagtactcgggaagggcaggctcaggattctgaatataaaaccagcttgcatgccaccctttgtttgaggtcttgaagggcatagagaagtacttctggctcagagtccccctcagctgaaatccggcccctccgactacacatggcttactcttgttcggttggggcttgagaaagaagattcggcgaaacagagcgaagtggggcttaattcccaagaaggcttcacaaacatggacgaaattggcgatgtggactatggaatttgggtttaggtgatgcaagctgattccatagaagcttaatatcccgcggaaaaattttgaggtcggaggagcgaagccgccatagaagaaatgggagaagaccacaacctcgtgtgtatcgggggtcggaaaagcctcaccgcacgctggccgccacccgatgatctccttggcagggagaacgccgtgcgccaccatctccttcaggttctcctccgtcacgtcggatggcgcccattggccttcaaagctttccttctcttccgccattgattttacccgaatgcgctgatttgattcgagggatggctaaggagaagtgaggggttgaggcggtggatcacgggaaggattttgatgaacttttcgaaggtggattcgagtggaatggtgaaccctagtttgccggcgcagctctgtactgtagcagggagtggggaaaatggcgagagttccggcggggaagatgaagtgtcgcttggatcttgggatttcttgttaagggtatcggaggtgcaaatgggcttaggcctgaacagtacctcagcccagtacttttgacagcgtggcccattgtgctccttagggacttaggcattttttgctttggcaatttatgcgcacaatagtgttgcccaatgctgataaaatcctttttacgcggtcatataattctttggaattattgcaatgcaaattaaaaggtgcccgacagaaaggtgttatgctgtttttgtaagcttttttaggctacaaaagctgtctgggttaacttggaatgacttgtttttaccatagccatttccttggtatgttatatgcctgttttcattatggtaaatagtcatagcctaggctattagacttattcattaccataatttttataatttttggtgggtaatctttagagttttatattcggatgcccgtcaagtgtgttcattcgtgaaccttttagagtgctaatcactcggattccttttattatggctaaaaagcagttggctagaatgcccctttaggcgccacgtatgcttttgtcatacgatgcacgattgtgctattattttgttctcaactatatgtttagtctgttaactaatcacatagttgggggctacacctaattaggtgcatctattcgatgcaccatattctttatcttttcgccctttacagtctttgtcttcgctactcggcagatcttggcatgaaaggtttgaagcactcggattattatctttgagaaggctatgatggttgactgcaaaggtctcgggggctactgtggagattatggatatcccatatctacacggcgatggtatttggattgaatacaggataccaaatatagatagaatatcttatttgtgtctcgggtttgtctctcaacttgtacatcaaggaaataccttgagacttagtcggttacgactgtattttatctgtatctgcatattccgttagggatatagattatcttttgtaacacggactccttcccatatataaggggggtccgggtgcctctaggggcatatgttgattttctccaaatcatacaatcaataagacactcggcggattcatccccggacaggagtagggtattacttcttgaataagaaggcctgaacctgtataaatcttttgtctccaaacccatacacttctccagcttgatagccacccccttttattattgccgaaatctagtttcgacactactgacattgactgggtgaaaattaatatcttcaggctggaaattacttagttggttatgaagtgaaaatttgtggcatttgcttgaatctgaggttcttttgtcgagggtgagcttctttgcttctcaaggatctgatgttgcacaggtgacaaggcaaatgttcttgggttatgcaagcggactgctgatgacgtccttgtaaaatcaaaggtgtttttgattattattctgtgatgaacaattggg

SEQ ID NO: 8700 - DNA, 9361 bp, Oryza sativa
atagttggcaccagcctccattaagaaatttaagcactcagttgaaccatcattgcccattgcagaatcaagtgcagcagttgagatacaatctgagttgacatcagcaccagcctatcacataaaaggaatgtttctttaaggcgaataatgtaaaatttaaaggcttccaaactgaagtgtttgaagaatgctttaataaagtaagcaaccccagagcaatggtagaacttgacaaagctaagatgaggtacaatacctgaaccaggagcggtacacattccactgatgaaacatttacagcctgcaagaggggttgtcatatgatacaatccaaacattatgtacgttatgttgcactagtgagagatgtgaagcacattacttgctattaattgattataataactggatggagaaaaatatcaaacagaaagggtaatatacatgaccatatatctatgccaagctttcagtaaaaaagaaggaaacatttcccgtgatattgcaattttcaaaaacaaataagcacaatgttgcatagctgccttattggtcaactcttgactagtagatttttcttatttgagtgattgattccacatgacacttacataggaatggcaacatgatagaaaatcaaccattatggcaagtgcataaaagggcaatgcacccagaagaaatcgtcccatgcatgcaattggctctttgaaaaccatacatacatgaaagcatgcataatagattttcacataaaacaatagtggtgatcccagttaacattaaacattactcttgcgtaagaatggagattataaagctatagactggactatagctttgagaatacatcgttatggatttaaacagaagcaatgaagtatttctgattattgtaacagctgctaccaaggagatcttgaagaataacatgtaactagaaaactagacagctaggaacaaacatttgaaaatttaattgtgctgcaaattaaagagccatgatcacatttcacatcttaacttacattgcaccaaaaaagcaaaacaacgtcaagggatgaaagtaccaaagagtaactacaatggagaatgagaacaacacagctaacaaacaaatgaagaaaaagcaaatgttcaaacttagtttatgtttacagttgaacatgcaacttaaggcagaagtagcatgatcttaagcttacatctgcattatgatccaataaaaccttcatagcaccgacttgtcattccttagtagcaagatgtagtggcgtcccacattcatcagctaccggatcaatatcagccccctttgccagcaacgtttctatcatttcacaatctcctgcatacaagaagcaatgatggtaagttttttttttcctgaatctttttttcttaatttgtatctggctcttggcagacctcagttttccctgcatataggctacaaagatcattctaaaggggttaacgtttcatagaaacaacaacaatccctactcgccaagtcaaagaaattgggtggactgataactgttgaaatcaagcaaagggggacattttggatgtggacatatttttcacacaccattgaataacaaaagaacacttatttgattaaaaaaaacattcagagaatacactgcctgccatagacattgaaatgtttaaggctgagttcggcacttcatgttcccaactcatctctttcattttccgcacacaacggtgtgttttttgcaaaaaaaattctatgcgaaagttgctttaaaaagtcatattgatccatttttcaaaaaaaaaattagctaatacttaattaatcacatgctaatagaccactccgttttgcgtgcaggagggattaattcccatcctgcactaccgaacacagcctaaggaataaggatgttgtgaatgatagctcaacagaatttagctatcagctttgaagataatctacttccacactaacataagggaaagaaatataaattgtcctggaacgaggtcaaataaaccttagttagaacataataccgccgcctaatatattacaaacaaaaggaaaaaaaaactgtgaacctgtggtgcacgcgtgtaaaacagagatgcatatgaatagagaggacctattccagcagcggaatgtagaggggttagcccgtcatcatcagctttgtctggatcagcaccatgatcaagaaggtacttgacaatagcagcattttcaccgatcaccgcaaaaactagaggtgttctacctgtcatgcacacagatcgatgcaaacaaattcaggatcagaaaagaaatgtacatctgaaaacttttcactgggcatcatatttagaaatatgatcagcaagattacaaagcatggaaccacacatacatgaaattcaggaatcacatgaaatggaatgtggaagggcctgagactgtgtttggaaaaaaggactaactatttcactttaaaagttctaacagacccgtaagtatgcagaatcaactgtaggaaattaatttccatccccgtgagatgaaattgaagtattaataacaccaacgaattcttttggggcattttcgcaagtgcgagtaaccaaacaatcacagagaattccctctcaatcggttacatgtttgtatctgatagtgataggaaatatttcattgttgaacatggcatattttaatgaagcatacgatgatgaatgaggataacataacaagacaatgaagagtaaacccatgcttatcattttgtgctttttctctgctaggaatagacacaatcacacaaaatttccagcgtcccgtgaactcatcaatcatatctaaaacctagtacgtatcaagcaaccgatcaacttaattaattacacaagtatatcatcttataagttgcacgacagccaatacactggttaattccccattgtgcaatcaattaactattttcccccaccaaaaaacacaaaacagagcaggtttttagattcacaaatcctaaaatgccagcacaactaactacggatcaacaaaacagaaacataccctcatcatcggcggcgttcacatccacgcgcagcccttcgacgaggtagcggcacacctccagctgctcgttgcccgcggcgagctgcagcgcccagatgccgccgtccgtcctcgccgcctccaccacctcctggaggcggcccctgaccttatccagcgcccgcaccagccctgcgcacattcaaaagcaattccgaagattaacgccacccaaatccccaaaatcgcggaggctgggggtgagtgagtgagagagtgagcgccgcgtactcttgaggtggcggaggtcgccgctggccgccgcctcgaggagctcgtgctgcatcgaagcggccgcggctgtatagagagagagtgagcggatttagttagggtttttggcgtacgggtcaaggcgcggggaggagggggggtgggggcttaccggaggaggacgtcggagcggcgaggcgagatcgccgcgccgccatggcggatgggtcggggaagcgcgagggagtagggttttgcgaatgggggtgagactgagaagaggagggtgagagagagagagaaaggaggcgaggtggggaagagagaggcgaaaaatggttgggcatttgatttttgaaaactgaggcgagagaagacgagagagagggcgtggaggaggcgtacgcggcaagccagcgcgtgggacccgcccaacccctgtaactgcggacacctggaggcggtaggccaaaatgcccaaccgattccatcgtttcgtctaccagtaacctgtgcacgttactgtgcacgtgtagtacacgtcgtaacctgtattaaaattatattatttttaaaatcaaatttatagtagtatataattaaaagctacgacatacatttaaaaaatcaatatactttcacttataagtttgaataacataacataactatttttttttgctatttagtaccaaggaaatcctcccaatcttgcatcataatacttttatatgaattgagaaaatatgaattgcgcttgaggtatctttaatgataatgaaacaagtcacatatatacataactttttaacaaaattatcagtcaagcgtcatgtcctacaagtcaataatattatatattttaaaatggaggaagtaatattcatgcatcaaagtgtgactgcaatcttggatttttcatcagcctccttgaatgagcaatatagctgttagaaaaacttaagagaaataaaatttgctcatgttcagtataaaatttcttagaattttaactgttccctatcaccctatgtgccaagggggcaagaagactaaagggaatgccttggttaggtataaaactgctcggatttttgtttaacactaatttatttgaaaattgtaaacataatccctttctcactccatgccaaattttgcaaagaacaaaatataaagtcctgctaggttgctatagagtacaaccaattcaacattggtaacacttgatgaattacaacagctagacagctagacgattgtaagggtacaaaacaccagatgagaaaaaaaatagtttaacctaagataatatattgttcaaaacatcttcctcatgtattgcctttctccaactgaatcatgtattctgcactttatgaattacagtattgatatccaagatcctagcatggtcaattggatcaccatggaaaagttgtttccatttcagtttcttaacaatgagtttccctttcatttatgcctatgaagacatggtcacagactaactgtgcccaaaaatagttttatcactgccctatgtttttgccttttgctcttgagcagcaacctgatttttttttcaatctcaaacaataaaagccacaaatggataaattttgatttaacaaagttcatataagtaatgaaagctccttatgacagaccatcctagattcaaactgtagctattagagcggcaatcttgtgagttgtgataagaaagtgatctagctagctgcatacaacttccaacctgcagataggactgaataaatatgtaaccctcttttcaatttggcaatttagaaaagtatgaactggcatatgatgaacatcaagagtttctccacaattccagatttgcaacaaagtggacatgcaggaacggaggaatggcaacgtaggtgaaaaaaaaacagtagtttttttttaaataaattcagctgcaaccaatcaatagaatatcagtagcatagtgcctcgtaaaaataaagaattgtaaatatgtaccaatatgttcatgtgcatagcagaaaaatgttgggctacttctttatgcgcaatcaacacaatctgttaaatatatcatatatgtcaactctcaggtgttctggagtaaagaaaaactctcagattgttcaagtattacatagcatggagttgagctgatcagtttcatgctgctaattctaacagccattattgtaagaggaaatacctagctagtacgtatgcagcaggaattctagtgacaagaagtatatagtaaaatatgaatgtcagatcatcaaatagcagagctgagatttagaaattacctcccaacccagatgacaagtactttgaagaggtgagtccaaaataactactatgaaacttgataatgttgtatcatacaatttaagagtaaattggagagatagtagaagtgggaagctaccaaggtattttggacatgtagctcttgtactaattttgcccaaatcttaatatcaccattaaaggaccagaagaaaccatgataattacgtttagaatcaaacaatcaactttggtattgaatctgcctcagctaatggcattcctccttttgttggttctaatggcaaagcagcgggataaagcaatatcaaactgcaaattattagtggtcgaagaaattagaacagacaattaagagtgcatgagtgcatcgaaggaaaaaaagaatatggcattccatatttcaatggtgaatggcagagaaacaaaaacataccagtgggctttagctcgtaatggaataaatcaattaacttgtaatactgtagacaagtggtgttattaacttccttggatttgcaactcatgggaatgcctggacaagaaacatattatcaagatctcaaagaataataattctttcaatgcacatcgtctgttttctttccaaaaaaatgcaaattaattcttgttagcaaaatagagaatgcatctattgaattgcaaagggataaatttctgaccacacgtacatataccttcctaatcaagatttctccgataaaatcctttccaatcattattgatccaataaaagtacaattcccagcgttgctccaataaaaccctttccaaactgccccgcaaaatactttcccaataatgttttaaaacattttccaaacagctcccgacatatatagccttctcgacatcgacgcaagtaaacaatttttgctcattccataataaaacagatttcagtcattccacaatgattcactatgacgtatcaggataagagcacattcacctacaagaaaacaacgatagcaactataacaacaaaaactactgaaccaccattatgtcgtgtatgctagtttattcaacaaagaagtatttaaactacttgatttctgggggtgtagcaactatttcctttgcgcgcacctgaaccggctccatcaccgaagaggagaaaactcaggtaataagctcgatccacaaaaatctgactgattagtgattagcccccacgcctccagtacatcctctgtacctggttcacctacaaagaacatgaaagaaatgagggggaagaaagaaaatgtttcatcgtaattggacatggtggctagggtggctgcagtgcaagggtgggaactcacctggtgggcgctggagatgggtgctggcctgctcgatcgggcggcgagccagcgagcggcggtggcagttgatgacgcccgacgatgggcgacagccttgatccaatagcgagggcagtcaacgccggacaacgacctgcatccaacagcgacggcgatagacgccgggtggcagccgatgatgggaggggatccggcgacgggagggtgagcagcgaccgacggatcggcgacgctccctgaggaagagagaggagcttagggattccgtggggagggattctcggaggagagacttttgtggggccggcgcgggcttcgcatgaagctcaggagctatttgcggaggagcaatgggggcgtgcgtccatagtcgtcgggggcagtcccaggcgtggcaccggcggaaggggatgcgattgtgcggtggtggctcagcgctggtcgagtgaggagcaagcgagagaggatgcgcacggcggagtcatcgcggctgggttttgtgtggcggagtcaccgctttggggcgaaattggtggaatcgatggaattagtggagatccaacagcggcggaatcggtggaatcgccgtcgctattggaatcagcgaggaggagcagcgtgagaggagcgaggcgtggtcaacgcgcggtcatcacgggagtcacgtgaggagcagcgggaagcaggggtgggcagaaaaagaccgaacagaaaagatcgagaccgagaccgaaaagaccgagaccgagaaattcggtcatcaattcggtcctaggtagtgaaagaccgaattttgtttggtcaattcggttagtctcctcgggtaaccgaatagaccgaaaagaccgaattaccaaaaaatgtctaaatgcaacatacaatccactatgtttaataagattaaactctaattttcacatcctacttcttctagcatgcaacctattaagagtctttactcataagtgcttacgaattttttttgtgatttttgtgttgaaaatttctattgtttctttgcatatatgaaaatattattgaatttcggtcaggaccgagaccgagaccgaaaagaccgaggccgaatttgtcggtcctgacattttttactgaaattcggtcttcacttttcaaagaccgaaaagaccgaaagaccgaagaccgagaccgaaattttcagttagaccgaatgcccacccctagcaggaagagccgtgcaaggatcagcgctcattaggaggacgacagaacggattaggatagaagatggacggtccggattagtagatagatgtggacggatggtagggattgatccaagtgaattggctggtaggattggaggggggcaactcctcctttttatattagtatagatgaattgaataagcgaaacggaatatttataaacgaaaaataatttgtaaataaaacttttaaatatgtattatttgtgatttagaagtaaagtatgaaaaataaattatgataaaaaaccttaaaattaacttcaaatttaaggtttgacatttaaatttcgtcttataagcataaattttggctgcaatgcagaatgagtttgtatcgtcttaacattgcatagtaatggcaggggtggcattctctccatcctaatcatccacacccaagatcaatggctaataatgtagtaggttgttagagcaagtataattggaggctataagtcgactaaatgttgagatgaaggagagaagagaggagaaagaggagaagcgggctataaatttatagccggcttgaacacaagaaccaagaaatttgggccatatattaattgtaaatactattatatatgtgggctaagaaaagattgcaaaaaatattatagccaacaagttagctatattattagcttgctattattgaagtgcttgttagttatccaaaagctcacgcttctttgtttctagcggaaaacctttttaccgctctcattcttgccgccaaaacatgagacggtccacattccttaatattagttggtattactatcgtcaaacatgtcaaaccagccacatattgcaatacttagattgaatgaaagacaccaacaaaaatagagacgacttgcagtgcgattcattctccattagatggcaaggaagttcatctcatcaacaatattctgttccagttgttacatctagcaggtaagcaatataattctttcacacgatcaacagcatttgttccatgtgaagaagttttctatgttctattttctacagagaagaactgcagcatgattcagtatgatgggcagcaagaagattcttctcttcaatctccctgtcctgtttctacatctaacaagtaagcaatacaattgttagtt

SEQ ID NO: 8701 - DNA, 19146 bp, Oryza sativa
  unsure (1)..(19146): unsure at all n locations
ggaaagaaggcttttctggatgctcttgaatgcagagaaatgcggcccgattggccaaaggcctgctaccggcttggtgctgctctgatgaccctgaaggtgcaatagaagatccttttggctagttttttgaccaatgcaaagtgttttaaataattcacaaggccttcatcatcaggacttcgagagcgcgtgcgatgcactttttgatggattcaagttggacccggacaatgcagagattgagcgtgcattacggtatacataatactcttttgcattgttgcatgcatgtttcagcacatctcactgttagttatatattggaaacgtgttattttgatttctcttatgtgcttactttaggatgggaattttacagttgctcttgcttcctaaaatcttcatctatgctatctatttgctagatttgtgccatatcctgtttttgtatccttcaattggtaggggttgattcataacatgccatccattacattggtccacacaacaccatttacatgcatagagtattaaatatagataaattaaaaaactaattgcacagttaggggggaaatcatcgtgagatgaatcttttgagcctaattagtccatgattagccataagtgctatagtaaccccacatttggtaatgacggattaattaggctcaaaagattcgtctcgtggtttccagatgagttatgaaattagttttttcattcgtgtccgaaaaccccttccgacatgcggtcaaacgtccgatgtgacacccaaaaattttcttttcacgaactaaacaggcccaagctttctaggctgaaaaggaaagggaaaaaaaagtcaaaatagaactatggaacacaaaatggtgatctgtggcccaaatgatgtagatggatgctattccctgtattgcttcttaccgatgttcttctgtacttatgtggaatgccaatgttgttcatggcatgaactgaattatcccttcaatcagaagtttcatgttttattatacaaaaaggggtaccattacatgtgaccatattgtgatcagtcacgcatctgtgcctaaagacgtacagtacaccattatccaacactgattgtggctgtgatgtgcagggaagctatggaatctctgaagatatcatctaaaggcaccaaggcaacatgaactctgcccttatgttgagacacatctcgtgaatcagatgtgtggatcgcgtcctctttttctagtcaagtagtgaccgcagaaatgcttactgcgaagcatttcccatgtttccgagggcgaaaatatagcgaagttgcttttgtgcattacccaatgtgtcgccactgcttctcgtttgttatcttttgtgcatccgaggtggtaatgtttagtactagcaaatttttgtttctggcttgatttttgctgtgaagcgtctgcccgtatacgtcggtcataaacactgtcggtggtgggtgtgttaatgagggaaggccgcctcatgtagtcatgtgccgccgcctaagctgctcctcgcggctcttttacatggaccgctgaccgggttcggcagtgcgatcgattaggaataaaagttttatgtatactagaagtataagcgcggcgtcatatagagttaatacgaagcatataatataagtatatggtgtacggtacagaaaaatgttgtacaataaattagtagaaatacagaacacattgcagctcgttttgcccgcaaatggaaataacataattttgaatttactcatgttcccgagttccggcggtataactccagtaagtttgttctcatgtaaatatctgaagagaaaaatgacagtaagtgctatagaagagaacttactttcagaaaactgaaaatgcatagtaagatgcacttactttcttctcttcttcttctccttgtaccgtgtaagagcattatctctgctgcctccagcagatgaactttcaggaccaggaggatgccagggtggctcacccataaggatcattgacaataccccacaatcttaaaatctccagcactactttcaccagtcaaaccagagaaggaaagggatatgctggacatagccttcctaccaggaatacaatggctggaatcagcccttgcagctgggtttgacatcccagtatcaacagatgcgacattgttacattctggctggtgcacaggtttgggctgctgaaagtacaagaatttgacaaaacttgaacattcagagtcagatttgctgataagatgaacgaaaccttaaaaaaaatgacagtaagtcatggcctttgaacaaacaatatcatcagaaagggatactccaacaacagaacctggagcccctaaattcaacaattatacaaggctaaaaaaatcattccaatttcaaccaaacttccaattttaacgtgaactaaacacacccttcgtcaacctctgaaaggggacatgaaaacaagcagtcatgtacgaacataaaaatcaccagaagagttgatctgagcttctctgcccaacaagaaaaattcaagaaattggtactgcacgaaataaatgctaacataagttctaaattccaactgacattaatgaatctggagcccagaaaattcagaacacaaaacgtagtacatacatgaaccttgtctagtagtaaagtgtaaagttcagaatgtccatcgatccagttgaacaaaaaaaaatcaaactcataaacggcgctgaggtagtagtatgtgtataaaaaagaaaataaaacctgtggaagagatatcagatatagcacctgtaaacttggtccatgaaataaaaacacaactttcctgcagaaaaattggacatacagacatacagtaagccaacgaaaaaaccaggacaacacgtagaaccaatcggggcagcaaaaattaagagatttgctgccgttcgaagaaggaaaatttagtcgaacaaaattcagaatcaaccaccgctgacgcattgacaggtaaaaaaaaaaagaacagtggattctctgaagaacacaaaagaaagattcctgcagagtataggcggatgtgcttgctccagatatgcaccatatgcaacacaactcccagttgcttgatgccctccttcctgcacataacagcaaacttgccaactgcgttcatcacatgctccgcgcacctatagaggaaaaaccattcagatgaggaagaaagggtcaggacacggaaagtgcaaaaaaatcagatcttgtcaatcaaacaaaacaacagaaaaacaaacactttcctctgctccatccaacggcacattctgggcaagggcgttgacgtccttcagcggcagactccgtcactatgatgttgagggaggcgcactccagtcgaaggctcggtgctgagccagcccctcgttatctcgcaggttggggaggacacttttgggggtcgttcgagtggtcgaggcaggtgaagtcgtcgtccctttcccactgcggtgctgctccagccggtggggatggggatgagctgacccggagagagaagcggcagaaagcaataggtaggaggagtggtggagaggtagagagcgcggcgcacggagagacgggttgggagggagcccgcggagaggttggagggccgatgtgccttgtcgggttgagggggaaagaagggtgctcgccgtcgcatgcacctcccctcccttgccaatctagggggtcgagatccactcaatccagggggaggcggacgacgaaggcagcgacagagggaggacgcaccacggcgacgacggcggccggcggagcggggcgcagtggggacctccgccaggccaaggtccacctcccccgatctgcacggtgtgggaatggcggcaggaggcatcacttgagaggaggagatgcgggagggcgagcgccggcgctgatgggccgacgacggaggcggattcgaggggaggacaatggtggtggtgcttagggaggtggcgaggacggaggaaggcggtcgacgatggcggcgacggagagagggcgcacaccacgtcggggcgagggaggggggaggggaggcggacgacgaaagcggcgacaggagaggccttaccacggcgaggacggcggccgggcggcagccccaggctggcggcggcgcggggcgtagtggggaggaggtgggaatggggaacgatagggtggggatggagggaagcagatcctacgttagagggacgtacttcgcttcatcagcgtcattccgaatcctacggcgacggcgcgatttcctttttcatcgtccttcggcccagtagctgtccagagttcggcccagttgtcagttgcggaggccgaaggggaaaaacagagcagcgaaaatgaattagaaagtgaaacagagcaacgaaggtgagaaagattagtcatatggcccgcccaaccggcctacaattataatagccaaagtgcccaaccaaacatccccttggtcgctccctctcctcctgtctcctcccgacctccgccgatggcgctgctgcccgacgtccggaggcgagcagccatctgcggatgctccaggaggatcttgatcgtgccggtgtgtagttctccgcggcatcggtgacggctgcggccggacggcatgaggcttcagctccagccagatcgacggtgccctcgccgccgagcctccatggagaccaggtacggggtacgcgcccgcctctagtgctaaggtcgggtctgcgcgacgcgctttggctcggactgaatccatcccgcaatcagtttttgtcccacgtcgcttagagcaaggctaatagtatagcccgctgctggctaatagcccatggctaaagacaattactagtacaatagattgtctattagctagctgcatcttataatcaaataattaattataacatgcacatatcaatatatgtgatcaggagtgaattgtatccttgtagctatttgtgttgtgagatgaactttgttcaccaaacaccaagatcatttcacagatcatgccaaccaagttatctgttgtataaaaattacttcatacaaagcactagtgtttcgtgggcaagaagagctcacgaggaaggagtatatttcctagccggatttttgttgaacggtgtggcgtgagagtttttcaccggccgagtctttcgctgatgcatggacgacgattacgcacggacgatggagatggattcgcgcacggtgggggggaaggggatcgtgcgcctcacgggatcgggctgaggatgtgcgggccccacaaaccgcgttgtttagcgctagggtcgactgctcgcgagcgatacggcgtggagagaagcgctagcgcccggcgacaatttagtcgctcgcttcattctctctcatcctttctctctcatccacataggaaaatgatgatgtggcactgttttggagcccgctgagtcagcctattgtacctgctcttattctcagaacgcgcgacctctttagagcacgtataatagtgagctataagcttactataagcttaggtggaggagagaggtagtgaaaaattaaggatgttggctctcatgcaagagctagcttatcacaagctccaacacaaatgcattaaatgtgtaagtgagagatagagagaggagaagaaaattgtagccaaccttatagctaatctattatatatattggctttaaaataggctaatagtaggaagtgggctctattattatccttgctcttataaacgctagttgattatgtggtgtcgcctccccggagacacccacaccgactagatacaacagtaagatccccaccgtggccacggcttggcggataccttctgctgtaaaaattaaaaatggagcagtcataaggtcccctcccattacggggcacggcaggcgcctgccggttaggctgcatccataatacgttaagatgtcaaatacggcatacatatagtcgggtctcccggtggaggcagcgctagacattagcgctttgctttttgaaattttgtatgatcaaattattatttttccgttgattaattatacaatagcagcaatggaggcctgcattagaaccccctctgcgtttgaattccaatttcctttgcgtttgaattatacttaccagcttaacttatctgaagatgttgtccttttttctttttataattttctcggagtgaatcaaccatgatgccataatgcatgctaacgatggagtgtttaaaatcttgtcttgattgcccctgcaggaccttattgttcagcttctatactcattttgtttctgccactttctagagttaaaccctggctagataggtcttctccatgtctttgtattttaaagcattctaaaactatgctctacctttgttagcacattagtgtgtgcatctgggaatttgggtctaggggtgggcaaaataaaccaaaatcaaaaggcaagcatgccagaaccgagttgctacttgtggagattatggatatcccatatctacacggcgatggtatttggattgaatacaggataccaaatatagatagaatatcttatttgtgtctcgggtttgtctctcaacttgtacatcaaggaaataccttgagacttagtcggttacgactgtattttatctgtatctgcatattccgttagggatatagattatcttttgtaacacggactccttcccatatataaggggggtccgggtgcctctaggggcatatgttgattttctccaaatcatacaatcaataagacactcggcggattcatccccggacaggagtagggtattacttcttgaataagaaggcctgaacctgtataaatcttttgtctccaaacccatacacttctccagcttgatagccacccccttttattattgccgaaatctagtttcgacactactgacattgactgggtgaaaattaatatcttcaggctggaaattacttagttggttatgaagtgaaaatttgtggcatttgcttgaatctgaggttcttttgtcgagggtgagcttctttgcttctcaaggatctgatgttgcacaggtgacaaggcaaatgttcttgggttatgcaagcggactgctgatgacgtccttgtaaaatcaaaggtgtttttgattattattctgtgatgaacaattgggcattggagattattgattttgttatttggaatttattcacgaagtggttttggagatgattggattcataggtgatcgcagggttcattattttatgtgaccggtcagaccgggttgtgtatgccggtctgaccggcggtgatcgagcggtcggaccggccagcccgcggtctgaccggccgacgctgtgtcggtttcggtttcgggttgtttgtttggatatccgagtttatttcttgattatgacttctagatggatactatacgtatgtaatactattgtttgctgctaatgagtcaagttggagatagcttggtctcggaatatggtttctttgtttgttccatgtgtaggtgactcgatgtctcgggagagtatttgcggtgatggaccgggagtcggcttggggataaggcgacatccgtgatggtcagagatcatgcgggacacttaggctagagttgatgcacatggttgatggagattctatatgtcatacgatggagttattgtgtgcatatgggatgcggagttgaatttggaaggagtccaaatttggtacgattggttatgtaaagtttctttcttgtactagtatgagtttaggactcttagtatgagtttggttcgtggctttaggctgcctacctcatgtataaatagagggggagcgtgaggcttcccggtatcgctttagagagcaattgagttgagtttggagttagggtttcgagtttagtcgaaatttttgtaaggagtgctattggtgcactttgtaagcacagagagaatcaataaagttgtcatctactttaagagttcttcgatttgtgtttcaccgggtttcggcggtctaaccggcaactcaccggcggtcagaccggcggcattgcggcggtcagaccggcgggagcacagcggtcagaccggcggcgacgacagcgagcggcaggcgatctcggcggttagaccggtagatcaacaccggtcagaccagctaatctacttcggtcagaccgatttcatcgaaattaagggtaacttttatttccgctaaaagtttttggtttttgggtataccaatcattcaccccccctctggttggcttagttcttgtgattcgttcctacaagtggtatcagagccttgttttcttctttggatttttatcgatctagagtttttgccatggctactcccgcaaggttttcaactaagcctcatgttttcgatggaacggatttttctcattggtgtagtaggatgcaatcttatattatggctgaagattatgatatttggagaaaagtttctcatccttattgtcgaaacatgataatgaagataatgactcctggagttgactcgttggttgatgaattgatttcttcagcttgacataaaatttgtcaaattttgagccttgtatttgtgtagcccccgactctttgattagttgggaaacaactgaacatagagtcgagaactgtagcttcttgtcgtcgaatagtcattgcttgattgaagatatgtgttgaagatgtccaagtagaaatcctgaatattggagagccacttgttgtagtaaaataacacggcatcgcatgccgagatgtcgagattcacaacaacgtcatggttggtgatgtagcaaaacttgttaagtagcagcaatagagtttgctggttccgaagataataaagatgaagtcgctccaccatgatgacaaagttgtgttgccgtgatgaagtgaaccggtagtgaagacgcgcagttgtgaagataaaagcactagtcggcggcggcataacacgagtcggcggcggaagacgatgatgtccatcagtagtggtagctgtataaaccaaatgtagaggcgagggcactagtcagcagcagacgagacgaccggcgatgaagatggtaaggccaatcaacactggcagaatcatgcagccatggcaaatgtaggcagcttgtgttgaagatactgatgcctattagtagtgacagcgatgtagccagtcgtgaagaagatagcatcagttggcgttataacaggccagccgtgcaggcgatgacaccactcggcggcggatgcggcggccggtcggtgaagacgcagacgcccaacaacggcagcataataggccagccgtgcaggcgggaacaccagtcggcggcggtcgaggtggccggtcggtgacgacgtagacgcccaacaacggcggcataataggccagccgtgcaggcggaagcaccagtcggcggcggacgaggcggccggtcggtgaagacgtagacgcccaacaacggcggcataataggccagccgtgcaggcggaagcaccagtcggcggcggacgaggcggccggtcggtgaagacgtagacgcccaacagcggcggcataataggccagccgtgtaggcggaggcaccactcggcggcgacggaggcaggccggcggtgaagtcgtagacgcccaacagcggcggcataataggccagccgtgtaggcggaggcaccactcggcggcgacgtaggcaggccggcggtgaagtcgtagacgcccaacagcggcggcataataggccagccgtgtaggcggaggcaccactcggcggcgacggaggcaggccggcggtgaagtcgtagacgcccaacagcggcggcataataggccagccgtgtaggcggaggcaccactcggcggcgacggaggcaggccggcggtgaagtcgtagacgcccaacagcggcggcatatgtcgcgaccgggaaaattgccttttcccgaacgctagtgtattaatccccgtcccaggaaaagccggggtacaccatacaaacatgatataaaagacacatctttattacatcgataatatttacattattacaaaggcacttaaggcctgacaatcaaaaataaacagcagcggactagcgggcctacggctccatcttcacaggcgctcaactggggtataagccaggaccccacctaagacatcttctccaaagcttctcttactgaagaggggaaagattgagcaagaatgagtacaaccacagtactcagcaggccacaccggagatgcacaattaatgcaaaggagtacaaggggataataacatagaggttaagttttgcagtagacggcatttaaaagtcacttagttgcccaaagctattttgtaaagacgatcctagctatacaatattattaaccaaggccgtgaaccctcacgaacctgccttaacccaaggcctacgatgattcagaccgaactggcaacccgaccctgggtcccagctcgtcccaagccaacccaggccaaccattccacattttagttgttgagcaaattttaagaattgaaacactgacttgggtacattgctcggcttgcccataaccgagggcgcggctattcgaatagattatactctgatcagaggtgtacatctttacccacaagacacatcttcctcacgtgtaaccacgtgccacataccaccacggtatacagacggaagacgtgatatagtttccaacccatcctagccatagacaagagtaccgacccaatcccgcctacggccggaacccccgggacaggcaggcaggactgagcccctagcagcagggcaccaaccctctgccatatgacatctcgactaccgggccgcagctcgtgtagccttcatttgccctggagaatgtccatcgacccccgacttcatccatctccaatccgtgtacttttgtttataactagactgagccacaaactaagccttacccactagacatgtggaagtacggtagtgctttgcaacagaggcccgagcttaatccttatagtggccggggtgctacttcccacaactggcatgcacccaaaccccaccgaaaacaggttttaggggttttgaaaggggaagagaggtgtatgtccaattccaccataaaccaacaattccatagtgtccaaatgatatgagaattcccaaagtctaaagttataaaaaccacctaatgttgcctaattaatcagcgaagcatctacctacattcatactagtggaaccatgaatagagtacccactagttggggttttgtttaatctagggtgaacaaggtaataatatcaataacaatagtattaaggtcataacaaaggtaaatgggcatggctaaataaaacagtgatcacgcgggaatttaaataaagcgataatgcaataatttaaatcaaaataattttataaactgggattcaacatgttcaaggatgatgtgacttgccttgctcagagagaacagccttccgaaccttcggcgacaaccgcgaaccacgcttcgggaacctccggaacgacgaaagctacgcgaagcacacaagcaaagctacaagcctataaagaagcaataacaacacataaaaagaaagcacagggttctttaggttataacaaacattaagagacttgaacgggtcgattcggagctcgtatgaccaggatatgatcatccgaagtttaatgctgttatatggagatttgcgaattattataattaggttttgcaactatgaaacatgtgtaagcgctagcctggaaaggacaggaaggctgcgccgttgacatgtggaccccacatgtcaacctaaaggaccgcggtagaccgggtacacagagacggtccacgggtcgacggaggcggaccccgtgtgtcaaccgaggcgagtggccaacaaacggactccactagacaccacacgggatgcacacgtagaaaccacgcggctaccgagcgggcacacaaacacggacaccacacgcacaagcgaacgactaccgacaccggtacacgggtaccggtgtcgacaaccgcacaacgggtacggggcgacaccgaaaggacgagggcggggaagcgagaggacggatccttaccaccacgcgacgaggcgcgggaacgacaacgacgaacgggcgcggcggagacagacgggcacaacggagacgaacggcgaggggacggcttcggcggcgatccttgaacgaaggcgagacgcggccggcacgaggcttgacgacgcggagccgaggacgaagacgaggacgggggctgcagcgacttgcttgactgatgcggacgacggatgagaacggcttgacggagggacgaacgccacgacgagcgaaaccgggaacgacgagaggacgatgacgacgacgaccggaaccggcgaggaggcgacgaggacagccggcagcggctgcacggagacgaggacgacgtgggacacgccgctgcgatgacgatgacggaggcggtgccgcgagacgacgagccgggcgaccgacgggacgtcgacgacgagaacgatcggagacgacgatgatggaccgcggaggggtttggatggaggggaagcgaggccaagagcgaccttgccgctgcgatgccggaggtggtggaggtgcagcgagccgacgagccggggaggaggaaggggcggccgaaaggacaccggcgacgaagaggatggagagaccggcgcggcgacggcgttccggcgaaaaccgaggagcagccggggtggagggcgatgcggcgacgccgagggaggagacggtgacgtcggccgacgctcaggcgaggcggccgggacagctggagatggtggagtggtggcgacaccactagtcgtcggtgaggacgcgtctccggtgatttccccgcgaaacggaggcgaagccgggaaagaggaggcagctgcgaggccgagggagaagacggcgcggccgggcggcgctcgggcgaggagaggaaggcggctggaggtggccggcgcgaaggaaagaggagggcgacggcgggaacgtagttccgggggtctcctcgcgaaacggagggcaggccggcgtggaggaggtggcggcgacgctggaggaggcgatggcgcggccggccggcgcacgggcgaggcggcacaggcggctggaggtcgccggcggcgtgggagagagagggcgacggcggggatggggctagagaccacggggaggctcgggatggggttaaaacggtagaacggagtgcggggatcccattttatatgagagaagagggagccggccacgggggaggtcggaacggcggcggaaaagccggccggcggcaatggaaggcggccggacttggcgcggccgttcccggcgattgggggcggcattcaaaggggaaattagggggaaatgaagaggagtcaatggggattaatttcccctatttaattttggaattaaccaagcgaatcaagcggatttggaggagggagcgagctagggttcacgggagaggaagaaaggacgcccgggcgggaggaagggaacgacgcccggcctggcgcgtgggacccaccggtcaggcggcggcgtaagcgcgcgcacgcgcgcggcacgtgcggaaggggagcggctcgggggctggggcggcttgggccggcggccggcccaggaagagaggagggagaggcggcctgggccgggcaggccgggaggggaggggaagagagaggcagcccgggagggagagggaagagggaggtgggccgaggggaagggggcccaagaggaggagggagagaaaagagggaggagaggaggactttggactgggcttggcccaaaggaggaagaggagggatttttaggttttctttttattgacctttgataattgtttttgttgtttaataattatttccggtgctctgaaaattcaagtgaaatttgagggctccttttagaccaaggagaatttaacaaaaattctccgggtcacatttgaatttttcttgcacgtattttagtgtttgccaatttctttccgacttttaattaattctattattccttttagaaaatgaattttaatttggaatggatttatcaggacgtgacagcataataggccagccgtgtaggcggaggcaccactcggcggcgacggaggcaggccggcggtgaagtcgtagacgcccaacagcggcggcataataggccagccgtgtaggcggaggcaccactcggcggcgacggaggcaggccggcggtgaagtcgtagacgcccaacagcggcggcataataggccagccgtgtaggcggaggcaccactcggcggcgacgtaggcaggccggcggtgaagtcgtagacgcccaacagcggcggcataataggccagccgtgtaggcggaagcaccactcggcggcgacggaggcaggccggcggtgaagtcgtagacgcccaacagcggcggcataataggccagccgtgcaggcggaagcaccagtcggcggcggacgaggcggccggtcggtgaagacgtatacgcccaacaacggcggcataaaggccagccgtgcaggcggaaacaccagtcggcggcggcgaaggcaagccggtcggtgaagacgtagacgcccaacaacgacggcataaaggccagccgtgcaggcggaaacaccagtcggcagcggcgaaggcaagccagtcggtgaagacgtagacgcccaacaacggcggtataaaggccagccgtgcaggcggaagcaccagtcggcggcggacgaggcggccggtcggtgaagacgtagacgcccaacaacggcggcataaaggccagccgtgcaggcggaaacaccagtcggcggcggcgaaggcaagccggtcggtgaagacgtagacgcccaacaatggcggcataaaggccagccgtgcaggcggaaacaccagtcggcagcggcgaaggcaagccagtcggtgatgttctgactgatccattcctggagcgtaagagataagcctaaagccatgaatcccttttatgcatatctggatctggatcctgcagaacaaacatataggatgagtagtatctgatataaatataatactcgagaaaaaatcaagtattttaaaatatttataaacatgtatttctcctcttgtcaattttgatttccccgagcagatgactcattacgtttaaacgctctgcccaactagtcatagccaccaagcactgggagtcggcctaagcacttcccaaacatgcatatgagtgacatgagttcgtcattaatggaacaaagtttcacggatcggagtttactactcgggtacttttgcaattattaagagcagaaaataaatttatctcatctctatgcttttgatttattccgaataatacttagcaccttgcgttactcgatccatccaacgagcccccgggtgctaggaatcggcccaaaggcaaccatccattggcaaaccaaacggaaagcataggaagatagaactccataactcgataggtacttttgtactcagattatgtcgcaagcaatcaagataaatattataaaaaatatgatataacatctgtagcccccgactcactactcaatggaagaccaattggtgtagtgaggcagaggaaaaggaaaaatatcatataaagaataaaataaatgatgacttagctttgtaatattccccttggtgatggcagaagtggccaatgtgggaacaaagtcgtccatcaataacaatgaagacaccagtcggcggcgacgaaggcggtcgacggtgaaagcgaagatgcccactaatggcggcataataggtcagccgtgtaagcggaaacaccagtcggcagcggcgaaggcaagccagtcggtgaagacgtagacgcccaacaacggcggcataaaggccagccgtgcaggcggaagcaccagtcggcggcggacgaggcggccggtcggtgaagacgtagacgcccaacaacggcggcataaaggccagccgtgcaggcggaaacaccagtcggcggcggcgaaggcaagccggtcggtgaagacgtagacgcccaacaacggcggcataaaggccagccgtgcaggcggaaacaccagtcggcggcggcgaaggcaagccggtcgtgaagtcgtagacgcccaacagcggcggcataataggccagccgtgtaggcggaggcaccactcggcggcgacgtaggcaggccggcggtgaagtcgtagacgcccaacagcggcggcataataggccagccgtgtaggcggaggcaccaatcggcggcgacggaggcaggccggcggtgaagtcgtagactcccaacagcggcggcataataggccagtcgtgtaggcggaggcaccaatcggcggcgacggaggcaggccggcggtgaagtcgttgacgcccaacagcggcggcataataggccagccgtgcaggcggaaacaccagtcggcggcggcgaaggccagccggtcggtgaagacatggacgcccatgaacggtggtgtgaccgaccaaccgtataggcgatgacaccagtcggcggcgacggaggcaggccggcggtgaagtcgttgttgctatcagcaatggcggtggcgaggataagccggcggagtggactcgcggccgatcgaccggaaagctgagaagcctcgagtccatgaccagcatcaatcgcctcaatagtgccgcgtagttatatgcgaacaacaacaaaaaatagcaagaaattaatctgagattaaaaatcaatatgataaataatgataaaaatcagattgagtttccccctgactgatttggatcaagtcagagaagaggagcttgaagaagtggtcgacggaaagaaagtgaaaactcccaaagcgaaagcgaagtcggcgactcatgaaattgattccatcgcgctcgttgataggaaactcgacgcaacccctacctggcgcgccaactgtcgaaacatgatttcggcaataataaaagggggtagcgcacgagacctaaaagtggatggatgcagagacaaaagatttagacaggttcaggccctctcaatgagaggtaataccctactcctgtttggggatttgaatccgccgggtgtagtatagatctgacgatcaggttgtgtcatgccccctagagggcctcctgcccaccttatataggatggggggcaggattacaagatagaaaccttaaccaatacggtatcggtttcctaaatctattttacaatattatcgaatcaggactttaggccactccataatataaaaggaaacgtaacacccaagtcatgatctgttacatattacataaatataagttatcccctataactagtcggataaccatgccgtgtgggtatggggtacccataatctccacacttatgtgattcctgaagctattaatactactgctgaaaaaactgcttttgaacaaaattgcaaagctcgcaatattcttttgagtggtatttctcgttcggattatgatcgtgttgctcatctttaaactgctcatgagatttggactgctttgagtaattttcatcaaggaacaaataatattaaagaactttgtcgtgatcttttcaaaaaggagtatattaaatttgagatgaaatccggagaagctttggatgactatctttctcgatttaataaaattttgagtgatcttagatctgttgattcttcttatgatgttaattatccacaatctgagatttctcgccactttttgaatggtcttgacatgtctatttgggagatgaaagttacatctattcaggagtctgttaacatgtctactttgactttggattcactttatacaaaattgaaaacacatgagatgaatgttctttctcgaaaagttgattctaagtcgaatgctttggtttcttcttcttcctctttggatgttgatgcttcttcatctaagtcgtcttttcttgctgtttttaatgccacattcgatgatcaactcgaacaaatcgaggaggaggatttggctttggttgctaacagaattgctcgagctatgaataatgccaggaacaggaaaagaggtggtccaaatcgttgctttgaatgtggttcaattcatcatcttcgttggcattgtcctaatcttgggagaggcaaagagaagcaaaagatggtgagaagaccacaacaacaaagcccacacnnancaagtcgaagggttcataccgagggagaaagatggagaatcttagaaaggcttttcaacaagtttgcgccgccttcgagccactaagtgatgtagatggtgaaagtggagatgatgataagggaaagaacatctccgatgtttgctttatggcgcgtggtgaatctgacacagagtatgaagataatgaggtgaatgcttttgaggaagctattaatattttgagtgcaaaaaataagaagtgtgagaagatgtatagaaaacaggaatttatcattgaatctcttaaatctgaaattgatagattaaaatctcttattcctaatgatgatgattgtgaaaattgtgaggttttaatgaatgagatttcaaaaattagagatgttaatgctgcacatgatttaaaaaatagatcttctcttgcttgtagttttgccttgcatacacgcactttggatgagttgtttttaactaaaaagttgttgcaaaaatatcaaattgcttttcatgctagtttgatgtttaacatgatttctgctaaaaagttaaaacaacctcattatgttttggattgctcaacatgtaatttgaataagatgaaactaaaagatgctttaggtcatgttgagtacatggaagatgctgtgaaaaacaatgaagtgctttcttgccctaaatgtcgtaaaagcaaaggtatcatggtagattgtgaaaattgtgctaatttggaaaaagaggtttcttatttgaaaaattctttgctaagattttctgatggtaaaaagaacctcaacatgattttggat

SEQ ID NO: 8702 - DNA, 15386 bp, Oryza sativa
atcctttttgacgcagttagataattctttggaattactacaatgcaaataaaaaggtgcccaacagaaaagtgttatactaattttgtaggcctttttaggctacaaagctgttcgggtcttattgagatgactgattttgaatagtcattctctcggcacgttatatgctactttggtaatagcgtgagatgtagcttaggctatttagactcgtcgtttatcatgttttataccacatttgatggatctttttgagagtttttactcggatttttatcatatgtattgatttatagacctttagagtgtttctcactcgggcctcttctatgtctcctttttggtgtgttaaagctaaggcagtcgactggatattttattaaacgccgcatatgcttagctatatgatcccttggatgattcggttgtaaaaccacacggatggatgttcatatgcactttgactatatgattggtttttagttaactaatcatatagttgggggctacacctaattaggtacatctagtcgatgcacctgattttttctattttcagcccttcacagtctttgattttagtactcgggagaccaaggcagaggaagttgaagcactcggattatcattttgaatgacgagagaagactatttcgtcgactgtaaaggtctcaggggctactgtggagattatggataccccatacctacacggcatgtatatccgactgggtatggggtaccatgtatagatagaatatctttaaagggacttgggttaaattccaaacttgtatgtcaaggaaatacccgggatcctagttggatacgattgtatcttatctgtaactacctattccgttaggaatataggctgtaccttgtaatacggaccccttcccctatataaggaggggtccgggtgcctcttggggcacgatttttctcccagatcatacgatcaataatacactcggcggagtaatccccggacaggagcagggtattacttcttgttaagaaggcctgaacctgtataaaattccttatctctcaacacatccacttttctagcttgatagccacccctcttagtattgccgaaatcttgtttcgacaaacggagagacgaattttacgtggaaaacccttgtgggaaaaaaccacgggcgccgaccgcaatgatcactatagaggagttggatatgatacattgggctatcgcaccctccccgtgcggcttacaagagatatgtataaaagaaatctaggagtcctagtgggaaaaaactgagtcatattaggaactgatcctaatagtcaagttctattaattaggaagctattccaaatatattgtgggctcaaaatttgaatcacatatttaacagagaagatgattagtgcctcagttatttgaatgtccattattctgaaatctgaaacatatattcatatggttaagtttaggattcctaatacgtacgtatgtatgcgtatctgctctgtttttcatctcctgtcatttgtctaaaatgcatgctagcctgagacccagaactatatatattctttcacgcgtatacgtgcagcttcatgttgaaacgcacggtggttgaactatcgaccaatttcttcctgtatatgtagatagttctgtggattacttttaaattacgaatggaaattaaaacacataggcatccatatttggagataaaactttacggtgcatgtattggtctcggtctacgagtaacaacttttacgttaaaattggaaatttggttgaagttggaacgatgtgatgaaaatattgaaagtttatgtgtgtagaaaagttttgatgtgatagaaaagttaaaagcttgaaaaaaaaagtttggaactaaacacggtgtaaatatatgaaaaaaaacaaaatagcataatcactcaccgcgtcacacagcgggaacagcgtctagtctccttcactccacggtctccacctctcctctcttatcctctcctccacggctccacgtctattctccgagcggcgttggcgccttggaacatcgtcaacactagttgaaaatggaagtggaaggatcctagtaattgctgattgctgtcgccttaatttcaaattgttgacgcgcatatgcatattatttattcattccatgaggagaggggcagcatgtgccgtgtggtcgccggccgtgagcagtctcatactctcagttagtactctatcagtgcagcagctaagcctcagcctcagcctcagctagctcgcccgacgcccggcccctcctctgacctctctctgcggccggcgccgctcatggagtacggcatcacgccggccggggggtttcggtggagaagctaccgcgacttgatccgggacgtgttcatcgccggcgacatgtactgcgggccggcgaagctgttgttcccgcagatcactggtagtgccggcgaggatcaagcgaggtgcggctggtcgagcgcgagctccgtggcttctagccccgtggtgtcgtcttcttacatgtcatcctctggatcccctgcttggtcctcggcgtcgtcttctcccgtccacaagctccgcgtcatcgctcaacagatggtcggcgacggctacatacaggaactcatccgggcgttcggccgccgccgccccgacgagctcatcttccagaggtggttctcgcagctggacgtggactttgtcctggtcctccacaccgacggcatggtgcgagctgacagcttctccgtggaagacctgatggccttgataaagcggtggatccgagctctcctgaccatggtgcaggtcctcaatatcacgctgctcgagctcccactcccggtcgccggaagtacggaacggatggcggcggcggcggaccacgcgcagttcactgggttcgcggaggagagcatcctcaggatgctggccttcgtcgacgccgtcactctttctgctctcaacgtcaacgacgaccaccgccaccggacgccggagctactcccggggatgctgcagctgtacgcctgcgtctccgaggcatgcgatctcctcgtctcagctggcatgggcaaggacgagatcacgaagatgcaggccttggacgccatgaacaatggcatcctgatgcaaagcaggaggaagctgagcgatgctatctgggtcatgatggagaaggtccgggctctcttcttgatggacgcctgctggcaggtctcgcaggaggcagccgcatccgggacccatgagaccacggagctgacgatgaactacatcacgcttctctggcgcaaccataccatgctcgactacttcagcgtgttcgtctccgacgccgacagcttcagctcggtggcgagactcatcgccgagatgatcacctgcctcgagtgcaagctcgaggaaacctccctctccatcccggacctgggtttgcgcttcatattcttgctcaacaattggcaccgtgtcttgcagcgtgttgaatccttgcgagacttgccagcggccgtccggcaagaacgaatccttctcctccatgcctcggacagcaagattaagaggtacatagacgattatcttaatgcctcctggtcgcctctgttacgttgcctgctcatcgacaagccttttgttgctctcgggaggtctcatgaatctaaaattgagacacaactccaaacaacctacgcaacacaaaagttttggaaggttccgaaccctcagcttcggcagagactgcgtagagccatcatgagcaaagttattccagattatagtaaatacatagagcaaatggataggcagaataaaatcaatcgacacctcgtggtcactagtcccgagcagctcgagcagcaaatagaggaattatttgaaggatgatgattattaattcaactaggaaggtaacccccgcattcacgtgggtaagtatgttttttttcacgtgtttgaccatttatcttatttaacgtttttatgcaaacatgtggaaatgtaagtcatgcttaagttataaaccaagtcacaacaaaataaataataatatttatttttaatatgctacgtgagccgtggatctcgcatccgacggcggagatctgtagttagctgcagtacgaactccaagatgtaatgtgtgtatgacaggtgagactagatattaatagtatagtaagcaactattgtaagaattgactattacattggctatagatgatttagagttagtagtaggctatactattaaacttgctcttatgcattcaacggcatggtttttgacggaaggtacacgtgtttgaccatttgttttatttaacgtttttatgcaaacgcatttgaccatttgttttatttaacgtttttatgcaaacatgtgaaaatgtaagtcaagttataaaccaagtcacaacaaaataaataataattatttatttttaatataaataaattgccgaacatgtatcaaaaattcaacggcgttatctatcgaaaattgtacctttaataatcgtacattttttttgaaaaatattctttatcgatattgattatttttaagctatttgttatatatttaaatatcaatactcactctctaaagtataagtatatttggattttcgtacggtgtctgagatgctggattttttttacaatttggtctttctaaaaacttaatttacaaatagatccctaaaaaaatttattttagaaatgatccttttttttacgccagagtggctgatgttgtcatccaatagagctgtgcctgccatactggcgccaaccccccaccaccccaaggcgctagcgcctcttgcacgcttctccggggtgggggtagcacttaacccatgggccccaccccctcccctctcactccccacacatttgccccttctcccatgctcgagcccgagaatacctcttgctctctttcccctctcacttcctccttctcaattcgactcgttttggagccattttttgcgggaactttcaagacatcgaagagcaagatatactcttccattccccctctcaaatagacttcaataattgttttgtcttttgtgttggtttttagtcactctttatgtagttgcctgaatgcttattctctttatgagattattgtaataagtggctgcagcttctttgaagtaaaggccaggatttattccattatctaaaaaattcccccctctttttttcgttttaatcggtgaaattcgtagatcggacggtaatcttataacccattgttcccccaaatttatgaatttgaacgttaaaattggggatttgtttataatagtgttacatgtgtgtaatatactcattggtgctacgattttttagagtatgtatgtggtaatgttgattaagtttaacatgtttgacatgccactattttaaatatgcttatttttttagttttggaacagaagaattgtatgataggataatcctaacatattaaattgttctctaatatttgcacatcggtttttggcatgtatagtgttagaatatgcatccatgtaccatatatttcttttaatttttttatatgcaattattaagaaatactaattaaattatgcaattattaagaaatactaattaaattatttttatattaattgttagctagaaaataggaggttagctcaaaagaaagagaggatacgggaggggagggagtacgtacgtgcaactatttctaaacataatagatctaatcaatttaattagtgggttcaccaagggaaaatcaacacttgatattattttcagaatatttagaatctttctaatttattatattgccacatggcggtttaggagtgtttatagaaatcctccattgcggcttgagagcgtttgtaaaaagtttaatggattttagtatataatagatggaattgtttgtaacattttgagaatcgtggcaagaaaaacctataaaatttagaactttctaaaactttttgcacttctttgtttgtttgagatgtcaggtaatccattttaaaacaaaccaaaacatatatattgatctcggagtataattaatatacattactttttaagcattcatgacactactagagaagtaatctttgctgggattgcaaaaatcacattagtcccggttcgaataggaacagggactgaagattatttttagtcctgcttaaaaagccgaagggaaccttttgatctctagtcccggtttgttattttttcagtcccgatttaaaaagtcatcagacccccactgtctttagtcccggttattgttaccaaccgggactaaagattaatatttagtcctaattatttgggaaaatttgctacaggacaccccaaaatcgtgtaattggctgtgggacaccacaaaatcttggctttgcccacggacactacgaaagttgtgaaattggctgtgagacaccggaggcaatattttataatttccgaggcaaaagaggtcagaaaattttctaaatgaccaatctacccctgcgcgccgctacctctaagcctgactgggtctggtcgaaccagacccagccggcgctgtttccatcctccctccctccacagcccgattcccgattccccattcccaaacctaaccctaggcgacggcggcggcggaggcggcggcggcagcgacggcggcggcggtggcggggccggcggcggaggcggcagtgttgaggacggcggcgacggcggcctagtcggcttcggttggtgcggcgatggacagctcggcgtcatcttcagtggtacggcgccgtggtggtggcgagttgcccttgggcaaatgtccattgtgccactgatggggattgttggctcagaaatgaagggagttgaaggagtgggacgaattttagtgtaccttggagttgtgcaagctttattattactgttgattttggtagttgtcattagcaagtaatatggactgtaataggcaatttagtatttggaagcaatgtaatgttgaacttatgaatgccctgtggaattaatgaatgtagtatggttttcagatgaaatgcagccattcgaatttggtttgatatggcatctgagcaattggaatttttgcagtactctgtgatgttgctttgatatggcattgagtaatagtgcacagcatttgcagtagtatatggcatctgagcaatttggacaacatgttgacaaaatttggccagagaaaaatttggacagcatgttggcaaaatttggccagacaaaaaattggacagcatgttggcatctgagcagtaaatttttgctgtctgaaacattggcaaaaaatttgcccagacagcaaattgacagtttggcaaaatttcagacagcaaactggcatacatccatacaacaaacatttacaagcatgttggacagtaaacaaaattttagacagcaataatttagaagccattccagaaatactcactgccattccacatcaactagtgccatacatccagtgccacacatggtactgccactgccattaagcttggtctatacaaaagccatacatgaaagtctttaggcacattttgcctagcaaatatgagtagtactgcccattggctccataacaaaagcagtgcacttagcacataaaggagtccatgccattaaaagctaacatcagtgaacatagcatcctacatttatacaaaagcaaatttcatgtcattgaacttcagtcttcagatggcaccagctgccttgttgcttggagcatcaacatccaaattgtgagctctagccctgctccttgttattgggcttgtttgagttaccccagatgcttgtgatcttgaaggtgtggacctgcaaaaaaatgaaaatcaacataaatatgtagagtaaatatagcaaatgtatggcataaaaaagaaattttgctgttgacaacatacacagtagctgttgggacttgtataacaggatcttgcacagaaagcacaactttcttcactctttttctcttgggctttggtggggctggtggaggggcagatggatcagcaactggttcattgcaagtcttcttgatatggccaaactgaccacacctcttgcatctatactttctttttcctgaacctccttcttccattcctttaatccttctgcttctaggtctgcctgctgacctcttcaacagaggtggatataacttgaatcctacattaatcttggcccattgagacttgtctgtcattggaactacatgtcctgcatatgccttcttgaatgttgcaacagagtagcagtcatccacaaactgttccaattctagccccctccgtgaaatgactagaaaaatggcatgtgtgcaaggtatacctgttacctgccattgcctacaactgcattctcgagtgttcaagtcaacagtgtgcctccatgtcttcaaatccctaccagtccctcctatttctcctaggtgactgtgggctgagtacagcttgtatccaaggtccctgctcctagcatacagggacttcattacactaggaagaatagtaccagtcaacttgacagcaagccttttcctaacagacattctctccatgatcatttgcctaatcttatccatcaaatcaactacaggcagtgatttctcatgcctgatccaactattgaaggtctctgctatattgtttgtgacatagtcacatttactgagagtagagaactgacatctagtccaaatgtgcttatggaagttatcaatccattctgtagcttttggacatgcctctttcatctcattatagtgactctcgaatatgtcctgcctataggcccttgatgcaggccacagattcctctcaaagacctcaccactgaacctcttctgaaagttcttcaccaaatgtctcatgcattccctatgctctactccattggtgaagactctggtgactgctgtgtcaatgcctttaccagcatctgtggacagaaccaacccctctggggacccaattgccgagtaaagcttatccatgaaccaagcccaattatctgtactttctgactcaaagactccatatgctacaggaaacatccagttatggccatcaatcccaattgctgatgccaattgccctctccatttgccagtcagtacagttgagtcaatacctaaatatggcctgcaaccgttaagaaacccatcaacacatggtttcagtgctacaaacatcttgctgaaatgattcttcccatccactgtcacatgatcaacctccacaattgatccgggacttgtcctctccaactctgctttgaagttgtaagctgcatcgaagctatcttcccatttgccaaggatttcatcaagtgccatctgcctaccgtcccaaacaacgtagtaagaaatattgatcttgtacttctcttccaagaacttctttaaagcagtagcaccaagggttggttcttgtctcaacttgttgatcacacgatctctcacccatgaattggtggccatgcaattgttctccaaaccagctgtgctagcacaattatgtgcgtaaggaagcttctttatctgaaatgaaatagcaaaaatgttataaatggcagaaaacacaatgaatagacaaatcagtgaacatcaattatgtaggcctacttacttgccaagttctcccatccggtagtctagaagcatgtatcctccacttgcaccgcttagccttacagtatgccctatacctccttgattcgctatatggcactgcaagttcaacctcttttagtactgcatattgtctaatgcaccttttaaagcaattgccatcttcaaaagttacaccaacggctatcttaggattgtctacatcagttacatgagccactgactcacaaccctcctcatcgtcaacggctaaatcgtcttgatcttcgtcagaaccagggtcatagtctgcgtcaactgcctcatcatctgaaaccaagtcgttgtatttctctttctcatcatctacaccaacatactcaacctcatcactctcaccccaatcatcaaccttttccttaggcttcgtaggtttgctaggtttgctacgtttagatgcaatgacttggctctcttgagtggctaatacaatgtcagtacaagcaacttgtccatctcctgcaacagtactagccggcccatcaatgctgccttgatccatacaaggctcggtcctatttcgtgggtcatcactcacattaacaagcaaagggagcctcctcatctcccagtacatatcaaatgcatcaagcaatgaactatccgaagctatctctgcatacctctcaacatttttgtcccaataggttacagttatctcctgaagataactatgttttacctccccatcaagatcattaataaggtcaatccaacaaattgtatccttgtctattacccacttaatatcacgagagacatgataatccggtctaccgttctcatcaaactcaacgtatggaccaactcgaacatcaactctgcaagctgcgctagcgtccatcctacgcgacaaaaacgcagcaataaaatcaccaaatttcaatcactttaaattgcaacaaaaactctacaactcgcaacacatatcactgcaaacaattccactcataatgcgaggcaaaaaggaatcaagcttacccttgaggaacccaagacatgtccaatgccttcaatggaacctcactgctcgtcagccgcagggacgatttcttcccagcacacttcttccttggcgacatcttcctagctgccgctcggccgcctaccaatatgacagctccatcggcctccgccggcgccgccaccgccggccccgccaccaccgccgccgccgtcgctgccgccgccgccgtcgcctacggttaggtttgggaatggggaatcgggctgtggagggaggggggatggaaacagcgccggctaggtctggttcgaccagacccagtcaggcttagaggtagcggcgcgcaggggtagattggtcatttagaaaattttctgaccacttttgcctcggaaattataaaatattgcctccggtgtctcacagccaatttcacaactttcgtagtgtccgtgggcaaagccaagattttgcggtgtcccacagccaattacacgattttggagtgtcctgtagcaaattttgcctaattatttataccaatcggaaccaaagattaaaaaaaagcagctgcacacgcctcctcggcaaccgcgcgcctactcgttcttatcccttcttattctttttcacaaacgccttatcccttcgtcctctcttcctccactcatcctcttcactcctttcccgatcccctctcctcctctcaatcccctccccttacctattggtggcaggaggtggcaggcggcggtcgggcgggtggaggggaggacggtggcaggcggcggcccggaggggttgtcgcggcactgacgagcgggctgatgcagcgctgaagacgacgatgtgaggacttgtttttgtgatgtcgttgtagatgtgtggtgctgctgtggatgattaattttgtgaagtatgtgaatttgtgatatcaatgatctgtgaatttgtgttgtcattttgatctgtgatgtttatttgatctgtgaatttgtgatgttggtgagttgggctgtgaatttgtgatattggtgagtttggcgtgaaaacaataaattagagggtaacctttaattccgcaaaaaatttgggtttttgggtataccaacaattcacccccctggttggcttagttcttgtgattcgatcctacaaacatttttgttctctctgaattagtctgaacagttttgaactcgtccatttatctgaagcttgaacggttctgaaatctattgctccaaagtgttacctggaactaggcaaatttgaacagattggccagaaagaagctctccactgcagctcaccaccatcttcctcagcatgttgtcactgtaaactgcaacgaggaaggcagaggccaccaagtgctgtagtgagttccactcaactacatacagcaaactccctaaaataaattgctgcaagccatgtgaattattactgcattgcttccttcaatcaatttctagctaccttagctataaaaaaaatattcgcagtgttgtgaacttaccttctgaaagcggtggtccctaagtccggcaggatcgaggagtatgtgcaggactgtaggaacgaatcacaagaactaagccaaccagagggggtgattgattagtatacccaaaaaccgaaaacttttagcgaaaataaaagttaccctcaatttcgatgaaatcggtctaaccgaagtagattagccggtctgaccaaagcgtaaccgccggtctgaccggtgttgacctgccggtctaaccgccgagatcgcctgccgctcgctgtcgctgccaccggtctgaccgccgtgctcccgccggtctgaccgccacaatgctgccggtctgaccgccggtgagttgccggttagaccgccgaaacctggtgaaacacaaatcgaagaattcttaaagtagatgacgactttattgattctctccgtgtttacaaagtgcaccaaatgcactccttacaaaaatttcgactaaactcgaaaccctaactcaaaactcaactcaattgctctctaaagcgataccgggaagcctcacgctcccccttttatacatgaggtaggcagcctaaagccacgaaccaaactcatactaagagtcctaaactcatactagtacaagaaagaaactttacataaccaatcgtaccaaatttggactccttccaaattcaactccgcatcccatatgcacacaataactccatcgtatgacatatagaatctccatcaaccatgtgcatcaactctagcctaagtgtcccgcatgatctctgaccaccacggatgtcgccttatccccaagccgactcccggtccatcaccgcaaatactctcccgagacatcgagtcacctacacatggaacaaacaaagaaaccatattccgagaccaagctatctccaacttgactcattagcagcaaacaatagtattacatacgtatagtatccatctagaagtcataatcaagaaataaactcggatatccaaacaaacaacccgaaaccgaaaccgacacagcgtcggccggtcagaccgcgggctggccggtccgaccgctcgatcaccgccggtcagaccggcatacacaacccggtctgaccggtcacataaaataatgaaccctgcgatccacctatgaatccaatcatctccaaaaccacttcgtgaataaattccaaataacaaaatcaataatctccaatgccctattgttcatcacagaataataatcaaaaacacctttgattctacaatctcccccttgatgaacacattggcaaactcataaaaatgttttggtgtttggaaaaataaaaacaaaagtggtaaaaagcacacttcgtacaaatgtacacatcgtgctcaaaaatccaaaagaaaacttctccccctttttaaaagaaagaaatttccaattgaatctcccctttttaaaagaaagaaattcccaattgaaccaaaaacatgctcttctcaacaactcctccaaaaattcaccttgcttctccttgcttctccaaaaatctaaaaattttcacaattacttctcccccttttgacaatgatttcatcaagtataggaattatgttctttaatggtcaagagcttagcatacatatagcatatcaagtcatgtgttacaataaaaagaagataaacccatctagaacacaataagcatgcattaaagtataaccatgaaccaaagattttacaattaagcttgaatcaacaatcaaaattcatgatatcatacgatttataatacaacatcttaacaagcacataggttgaagaataaacactaaacacatatacctattgcatttatcactctttctcaaataaactttagcacaaaataaccaagataattttttaactttttcttttcttgagcctttttactcatatttttctcttttattccgggtacgtccctgtcgtcaaaactgtttccagagattcggcacccattattttgctcacatcgaatacgtccttgtcgtcaagactgtttccaaggattcagtattcattttttttcatattttttattctctttttcacaatgagcaattaaagctatttgaggaataacaattcaataaagcatatatatagagcatttataaatcaaaccatatgctagcatcaacattgcatatttacttaattcaagtagaatttaaatgttatgcatcatctcccttaaaagcaaaatctaaatctcatgaagagactagaatacttacaagctatgctagagacaaataaaccttcaaagtattgctagcatgcacaagaaaataccatatgtataacataaagctctcttttctcaatttttctcattgcaatattattgcttgataaaaccatgaggtacaaactctccctcaaaccatgccaaaaggatgatttatgcccaattcaccacgaagaaaagcaaagagattagaatccaaaggtttagtgaaaatatcagcaatttgcaactttgtgtccaaaaactgcaattcaacatctcccttctcaacatgatccctcaaaaagtgaaaacgaatatcaatgtgctttgtgcgtgactgttgaacaggattcttagcaatattgatagcactagtattatcacaaaagagaggtactttctcaaaagtaagaccataatctttcaaagtagataaaagccaaagaatctgtgaacaacaactagcaacagcaacatattcagattcagtagttgattgagcaacactagattgtttcctagaagaccatgcaattaatgatgtaccaagaaaatgacatgttccactagtaattttcctatcaattctacaaccaccaaaatcagcatcggaatatccacttaagcatatagaagatgaagtagaataccaaattccaaactcaagtgtatgattcaaatacctcattattcgcttgaccgcttgacgatgtgaagcacgaggagaagcttgatagcgagcacacaaacacacagcaaattgtatgtctggcctagaacagttagatacaacaaagatccaatcatacttctatactctttttgatcaatagcttcaccatcttcatcaggatccaacactgttg

SEQ ID NO: 8703 - DNA, 5869 bp, Oryza sativa
cggcgcgctgcagtgggcgctgtcgcaggccgtcaggcgcaacgacgcagtcctcctgctcgccgtcgtcaggccggcggcgaacgcgtcgtcagacggcggcggcggcggcggcgagtcgtcctgcgtgaacatatcgaggacgaggtgctaccagcagctggacgccatgaggagcatgtgtgaatcagccagaccagaggtaattaattaacaaacacatcaacttcttagttaacttgtgtaatttaaatctccttgggttcattcgtgctatgcttaaatgatttgactgttcaattagaccccctttttaaaatgccagaatacattttctacagtaagttgtcctctaaaaatatgttacagcaaagtttgagaggttagtatactcctatttgacaagaaacagtgatcccaacatgtaattagaagtcaaagatgcaattaaatcgtctctccagttcagccacgtgttgattggacggcttacgttgcggccataagtagttcagtcgattatctactaaccattagcattacaataaaagttttttaaaaaaaataaaaagaaaacaaagctttatagccttataggcagtgatccacttagcacatttcgcggaatggaggcgtcaaaagctattctagctaagcatgcagcctccggatccggatatttgcttcatcgtccttcatccctttcaaagcaaagaatattctaaacttaatttttttcagagtttcaattcaataaaataatattcagaatttcaaaaggacttatatatttttcataatttttgtacacttcaaattttactagaaatataagaaattctactagtatttgctaattaagtggcgttgtgcatgtgtgtaggtgaaggtgaaggtgtgcgtgatggaggcggccggccgggagcgcgcgccggcggtggtggaggctgcgaggcgccacggcgcgtcgctgctcgtgctgggccagcggcggcggcggcgggcggcggtcgcgcggtggctgcagctggcgctctggccggcggtggcggcggcggcggcgaagagcaagtactggcagcggaggggcgcgcggaggtcgacgacgacggtggagtactgcatcgagcacgcgccgtgcgtggcgctgggcgtgcggcggcggagctccggcggctacctcgtctccagcaagcgccacaaggacttctggctcctcgcttaattaattaatttaatttaattaattactagtgctttgtactagctaattgctgcgtagactggtcaatttgattcacatgatgctggataaggaagatgttatttacgggtggtttcatatcctctatagtaatgggaccctgatatgcgaggtactagaaggtggaactcacatatcagtaactgtaatggcagtaatattatggtagaggatcctcgccttcacggtggggttaaagcgcactaaaagtcggggagtatgctgtaatgtataagtgattggcataccaaatatcagacggttaaactacaaaccaaaaatatgacacgataaaaccctgctcgttgttgcgagagttaactatgataacaacaagaaaaaaaaatgtgtaagatagtttaaacaatataaacttacataaacataagtttacataagttgatgtgatttaaattcaaatagtatgtatacataagttgatgtgatttaaattcaaatagtatgtagagtgatgatttaaatgtaaaagaaaaataatgtgtctttgtgatagaacacaagaaggaagataatttagaccatatgagggaagaaaaaaaaagataatttgaaccatggattaatcatctaaggactaaaaatattgatgtgatatgacttaacaagagaaaaaaaaatagcatgaactaagtgagaatgaactactcactccgtttcacaatgtaagtcattatagcatttcttacattcatattgacgttaatgaatatatatatatatatatgtgtagattcattaacgtcaatatgaatgtggaaaatgttagaatgatttacgttgtgaaacggaggaagtatataggtatataggatataaaaaaataatggagatatattgatatattatgtgaatttaacatgtttatatttaaatctctaaaatttaataaattattaaattatagataatatatcatgcttgcatgatacttaaatgtaataattactagaaaaaatatccgtgcgttcaactggtgaaggatattttaatcttattattattggtatactgtttaattaaagtgaaatttaatgtgggatgaattcgttatatatatatatatatatatatatatatatatatatatatatatatatatatatatatatatatattagaaaatcatgagttgcagttatgatcgtctcaaggtagcatgcgagttttttttaaagtgatttcttatacaactctttttgtattttcaaaagtgaacaaacttcaaaaccgattcaaatatggatatgtatttccaaaaccgaacggacttaaaatcgactcatacacagatgattaccaaagtatcggtaaaaacatctttaatttttataatagtaaagattagtggatgatgatgtgtcatctttataaatgtgactttatagtaagagatgattagtcatgtacctgttacgtagagtagcgtagttgaacgttctaaacatgaagttttacatatttgcatgggaaaaaatgataatcattattttcaaaatttacctggcaaagtttttggataataatcaaaagatattttttaatttttagaacttgattttaggattgatgggaaaggctcgaggctttgcaacctacctggtcttaggcttaatttcagcggtgtaggcatctcctggacttcgcacattgccggatttgctactaacttctatcaacatatgtaaaatttgatcaatcgctgtaagacgctaatagttgtatggaccttagatatgagtgatattgtgatctaagttaaaccatatagaatttgacacatgagagggttcaagcatatctcaccataacaagcggccggacagtgacacagaccaggcaaatgaatagaatagttcaaaatgataaatattatggggattaattgatacgattctattacaaccataccatacgatgccttaaaaactttcaactctattttatttttttaaatcaactcaattttgaattcttctaactcggattttgaagctttcagctcaaattttgaaactttcaactcaaaatttaaaacttttaacttagatttgaaaactttcaactcaaaatctaaaactttcaacttaagctatgaatactttcaactaataattttaaatttttaacttgattttcttatatattactccctccgtttcaggttataagacgttttaactttggttaaagtcaaactgtttcaaatttgaccaagtttatagacaaatatagtaatatttataatactaaattagtttcatcaaatcaatagttgcatatattttcataataaatttgtcttgggttgaaaatgttactatttttctctacaaacttagtcaaagttaaagtagtttgactttgaccaaagtcaaaacatcttataaccaaaaacggagggaatactttattacgaaaaatgattcaaaaccataattaatgttaaacgctattaacgctaagcgcgtaactaggcccgcgtgggcacgtgatgtgcgcaccaggtcgcctcctgctgcagacgcgctgtgtcagagggtgaattcctcaagtgggggatagtaaggcccccttgttagttcggctgggggcagcgggtgagaatcgaggactcggtggaaggtgtgatgtagagggggtcgggcccctcaagaacgatgagacaagagcggtctatacaggttcggaccgctgagaagcgtaacactctactcccaggggcgaagccaggatttatagctagggggtgtgggcagggtgaacaagtcataagtcaagggaatcctctacgccgataaaacaatacacaatgtattctgccataaaaaagcttgaatttagctttttagttgtatcattagatgtttgacagtttgagacttaagacaccatgctcaataacgagacgcaatgggaggacagagagacgtgtgaagccgaagcaatgatgacgaggagttgatttgcatcgtctctccgtctctttcttattaattgattttctataccatgtttattaataatggactaattaacatgctaatgcgctagttagtacaataagcatggggtcggataggggggtgttggcccccttcggcaccccttgtagctgtgcccctgcctactcacgtgcttggttgatcgagtatggaatacaacccttgaatctctgagacactagtgtgagttagccaaagaatctttctctttctctccctccctcacgaggcctggacctccttttatatctcaaggggctgccacatgggcccaaaagtctacctagggatgagggaggacattctctacattaaatgcatgtcttgtcgcttaacttggaagccataagcacgggcgccatggcatggggcccatcaaatcgcaccggctgacacgggggacgcctgcgtcatttaccatttaatagatgaagacttctgggtcctcatgcgcgccgggaaacggaaaccccgcgttgaccaggtcagacgaactgactccggctaggatgagagactaaaaaacctttgatcatcatgacattacggggcatgttaggtggcacgccgcctgacatgtgaccagtgcgcaggcgcactatctcggtactattggtcactcgactggtcatagaccagtcaggcgcatagcacgtcgcattaagtgcggcatggcgcgcccgctcaggtcgccttaaatgcggttaggtaggcgttgggaccgcccacctaactccgtacacgtggtgtcctgcagagggggtcggggcccgacccctaggcatggagggggcggccactgctctaccccgggcccgacccccctcgagggagttgttgatgcgaaaaacacacactggcctggaagatctgcttaacttcagtgcaggtccaaaatcttacttttaggttcgtgagcatgccggttgatttgatcctgcaatcaacaagaaacaaagacaagaaaaaccatggttaaatctataaacgatagctgatcggccagccgccgatgacatatcatttattttcaagccgatgtcatatgtgaatcgatcagtagttgtaaacaagcaagatatgactaaatctgctcgatcggctgtagatattaacgatatacaatccttctatcgatgtatatttaaaccaagtgattgggatagatcagtcatcatgccgagacagtataaatcacttagatcaaaatatacattaacatgaggactataaatgtttatagcatagccgatcagatagatctagcatgtatcggctaatactccgataccactttatattaagatattaaaacatatataatatatcaaacaggagcctaatatactttattgcgaataagatcttaatataaagggcagatctagcatatcaattaagcatataagatatagaatagctaaatcaggtaagatcggctgaaaccccgatactatctctctcgacaatcataaaacaagccagatatcataataataaatattacttaatagatcgaactcaaccgatgcagcattaagcataaaaataagtacaagatctaggcaagatgatgaaaata

SEQ ID NO: 8704 - DNA, 22387 bp, Oryza sativa
atcccccccacctcgcggttctcctatgggcgggtaattggctttgtggttgtagaatgcggggggtttacgaggggttttgctcgattccccgagccgaacagagtttagtttggggatgatttcgtgtagctcgattcgtaggatcggtggtgtccggcatttgtttttttttcccttgatgaaatcgaaatgcagtgtagtgtggagttgatttgattggtgttctactgttgaaacggagatgctcacatggcgtcgttctactgtgtccgtgtgcagattgacagcgccagtctgcgccacatcctccgccccttcgccgcacagggagcggcgccgccggagcagctggccgcaagccatccgagctcgcagtacggccagcccgcgagagcggcgccgagcacctcgttgcttgctcaggtggctgggaaccatccccatgccacccatgtttcggaccggaaggcgttgtttggcatgctcaatgcaggcaatgctgctaatgtcattgatcttactcgcgcttccccgctcggaggcgcggagcctctgcccaagcatccgaggcacggcttggaagccagcagcagcgttgagcagccctcctgcttggggccgttgtttcagaacacaagtgcaaatgtgcagggtagttttccaggggaatgttcagttaacaatggtattgttccagtattccaggagtctcagtgacatgatttctgtcttcctgctgcagtcttttactgttagtgcttctttggacatgcagggatatcccaaggcgccatccagtttcaggactcgagcacatgcgcagtgcagaaattgccatcccaatcaacccctcgccatcatcctgcgcttctaggggatcagatatgcgtctcctgtctgaatgttggtgggttcaacttgcaacaatatctgcaacctagatcgactaccctctgtcatggtctcatgagggaggtagtcattgaatggctagttacagtaagcatttttaccccttcagaaacctgtgtctgcaatggcctaaatagagaacccagccattgaactatgtacgatgtgtggtgtgcaatcaaaagttctacacccatggaaataaaagttttctgcctcttgcttgtactgttgtacagcatgtagtcctcaaattactgctctgtgttatagcttcataatatgggttctgttgcttaatttggtagagattttaatagtgatggagctcttattcacagttattgttaattattattagaacaattcgatattttttatggtaaaagtgttcccacctgctgcttttaaccattatgatcatatattactttttttactaaagccttctgatgtgcttttgggatatgaacaggtggtgaattctttgtcggtgaagctgggatttttggagttcgttgcttttgtcaccggctgagaatgtctgtggctaagttctgtgaggtactatacaaatttatgattgttacgctgattccccatttaggcactactacagatgttcttactgataaaaggtatgtatatacacattttgtagcattcaggaggacccgcagaaaaagctggtgaaattgtcattatggataatggcatgactattgtacaatggctcaagtactgcatgggggtgagcattttatcttgtttcggttaatctgttaacttttagttggtccaagatatgtagtttaagggtaagtatttggtaaaaatcacatactggatttgcttgtttaactctaaaaggtaggcacctagtacaataatagttgtgccagcagccagtttgatatgagtcacaaagtgaaagttggcattggttgcatttttattttacataatggaaatggattacatctctggcctctacccgtaggcacagccaagcattggttgcatattaccagatagaaataaagtaactctttttttaacacatgtaaaaacccaggctaagttctacataagtttatttctggttgtcctttactgtgtcacatatcatctggaggctgtattagcagcagaaaaaagaagaagaagaagaatgctttagtagtattttctgcattatattctggaaaatatcattaaatgtagtctgtggtaacaggtacatatataaatttttaagtttttctttgtttaagtctacaaatgaggcattgtaaactcctgtattatagccttaaggatacagagatagtttccatcagagattggtaactcacaagtcacaagtcacaactagtacatgtcatgcaatacaactgtgtatttgtattgtgttgcatcttgtaagtattttacatattttgtgaatgaacaacagaaagcttattgaaatacattttcttcacacatacacttccagcctgtcccaatcatataacagccactctatatcaatttttttccttcttgtttacatctaggttggagcatccatttctgacactaagtgggactggccagaatgggcatatatgagatattcttcagaagaatactggactaaaagtctccttacaacgaacaataacatggaaaaaacagggctattcagtggacatggaaaaagcactggacatataaacaatccagtttattccagtgatatccacaatgaggttggacgattcacttctgttgagaagctagtgaataagccagatgaaacattttatagaaagagtgtcggtttacatgaagctttctcaaagaatccagctatacagcagagttcgaaaataaacttagcaaatcatatgatccatgacatgaacatgaactctattagcaggccaagtgaacgaacatattcaacagcaaacatgggaataacttacagtagaaatcatttggcacatgattatgcaaactttctggagaaaaacttaaataacttgtctcgtagtcctggtcctagttctacaagagttttgagcaatgacagtagggcatgcatgcctgatgtacctcacaaaataattcaagatggttcaggtagagcatcaaacaccgaactgaagctggggcaatcatcttatcatcaatctatggctaccctatttccatcggtgcagtcgacaataatcgaatttcagaaacctcagcaccacctgcaattcacaactccaagtgagctttcctgttattagctgcaaatgtaattgttttgttatccacattatcatttgggtagaatttaacttgtattaactattaatatggcacatccacacatgtgtagttctgtttgctttctcgctagatatgcaagagcttgttaattgttatgctaggtgctgactgaatacacaaaacgacaaaaacaccataagaagctgctagtactagcacaatgaatgtgaacaacaacatagttctggtatgattttataacacattaacaccatagaagaaacacaattttgcttagttcttttttttagtgtaaaatgagagcatttcccctgtaatgttcatataatgccagaatcacttggtgcagatgcttatccgaagcaaactaccaaagccaacaaaactatagaaaacattgagccatcatttggtacaggtaataggaaacgatcacttgatgtttctaatggaaccagccattctgaactcaatgagattacagatgatgcagcaaagaattcatttatttcattatttctttcacatcttgagagaaatagtacatctgagtccattgatgatgttctcaacagtaatgagcattaccttcttaaggctccagatgttgcatatagttccgatcgtttaaaaactgcaagtacacaagttgagacaagggcaaatgataatcagttgaagttggcacctgccattattcacacgaaaaggatatcagatagcaggtctcttccagttccagtggcttccaagggatatgttcatcaagatgtacttcatgcaaatagtcaagagcctttaataaatggggactgcctgccacatttgctgcctagtcaacctaacgccggaatctccaaaatttgcgcagaagtttcttctccagtgaattgcaggtgttgtaatcatgttgctgacaaatcccatcttgcacattctgagactggggctccctgtttttatgatagaacggtaagttgatcttacactttctcatagcacaagtaaccactgtcaccactgccaaccaccaaaatgtcttttgattcttcaagcattatgtgcaggccaggagatatatttcttttgaatgtgctgatgacttgtgcacacataaaagtttgagagctaccaattatcagtgtggaagagccttttgttctacagctaatgagtttctacctagctttggccaaaatgatcaatcgccaataggaaaatcaatgcatagatgctgttgcaaagctcaagaagattcttccaaacttggttttagagctggcaatttctgccgatctcatttctgtaatgatggcactccagttccagcccataggtctattgttgaaggttggtttcttcacagtgcaagtgatatgatagacatcacttcttatttctgattattttcttgaatgttgtcttgttttaattcagtggcacactttctcatatttcagggctagatgaagtgcgcacccgctctactttcataccaagatcctcattatgttctagagagcttatgttgcagtcctgttgccatgcatgtcccattgatgggtactacagaaggtattttgatttagggcctattcactttgatgccattttcaaccttaccaaattttggtaaagttgccaaaaaagtgactacatttagtttgctgccaaattttggtaactatataagaaatcctgccaaaattttggcaactataccaaaattttggtaatgccaaaaattggtaaggttttttttggcatcaaagtgaacaggcccttactcaatctttttcttatcttgaatttcacatattcctgttaatgactacttcctccgttttacaatgtaagtcattctagtatttcccacattcatattgatgctaatgaatctagatagatatatatgtctagattcattagcatcaatatgaatggggaaaatgctagaatgacttacattgtgaaacggagggagtatttcagttccatcactgctaccaagatttactcttcacatattcaaattctagccttgattctgatcctattggttctaatagatgatagctactgcctagtgtatgtataatgctaatttggcctgaaagcacttgctatttcctgttcttagcaatgctcttaagaccagccttttaattgatttgagtactggaaaatgggcaggcggcctgtcaaacaggttgtatagatgagcctttcttcgttgtttccattttgacattatgcttatgtgtgctgtttcacatcattacaagataaattgatgacatcaatttttgctgaaggttacacttagttttcaaggaaatgagcttagacgtttgtttgatgctatatctatatacacatgtcaatgatagcatacatgcgctatcatgcaaaatgtgctcttgaagctatcgctgtgctccctttcatattcttttatttacttattgcagttctatgggacacacagccaacagcttgactaagaacactctgcttgatgcacctaataatacagaatgtagtccttaccgggatggaaaatgctgctgctctttagccccaaaatgtttggcaggttatggatttacaaagcactgtgttgctagaatcgatcaaactgatcatacagtacaaaagagcaaggatgatggcatgcaagctgctgccagatgttgcacgctaggggagagtgaaaaattaatatgccagtgctcaagcgagataattgctagaaaaagcgactctaaagcttctttccagaatgaggtctctactgaagtattgaaccgaccttgtgttcctacattacagcagctgaagaatgtaacagaagcatcggctgtaggtggccattggccctatgaaactgtaaaagagaaagcgagtgcttgtagagattctggaatatttaaagaactaaaatccggtttctcttctggattctccagcgatgttgtgaccaagttttctgcatcacctgaattgaacaagtatggtcttgaacacaaaaatcttgtgtttgatgaagggtcacgaattgagaaatgttcctcatccagctatttgcctattagtacaggatgtgaagaagcccaaaatagtttttctagatttcacctggagccatctttagtgaagcacaaaaataatcaaatttctgagggaagtacacggaaagaacatgagaatgagggacaatgttctgaaatgtcaaagaaaacacgaacattgaggtgctgtgcaaacaaatcagaatccgatgattgtactaggaaaattgatctgtcatcccgggaaggggattctcaaccgcagcataaggctggtccattttcacgcagagtatcaaaaaccaagaggaaacatcctcccacgcatctgaataaacatgtgaaacggcttcacagcaactgcaaagttctcaatgttgacaatgaacggtcagatgatgagggcatttatgttggagaatcaaattcctctgatagaaaaaagcaagaagataatatgaccactttggatagaacaaaatgccaacagcaagggagtcgattgcttgtccgcaaactgccaaaatatgtgtctctgaattgcattgtaaatgaaactaacagtgaagatgcctgtagtgggagtgccagtattgattctagtttgattgctacaggaataactaatgataatcggaaatctcccaaaattgttccactcaatctgattcttaaaaaggctaagagatgtcatgctatcaaacccctcagtaagacagaaaatatccatttttctgaggaaaagagttcagatggttctgcagataaatcttcctctggtgacagaagtttcagtccacaagatgaactgtggtctcccaaaaagaataggtattcatctaatgtctcgaggccacacgtcaagactgactgccaaagtccctgctgtggtataattctgaaaactgcattacagatagtatcaacatatagctaagtaacttacagtgttccttttagaaaaatggaattgacaaaagaatctttctttttcagtacttgaagaagatgagcctcttagccttgcagatatggggacaagtcagctgtcagcatcaagaagtagaggtaggagtctaggacaaggacagccataacatatttggttagatttttttggttatttattggaaaatttgattccatttttgtcaaaatgatgcactgtgtgacattacagattaactagtaacatggtcattagttgtcatctttactgaaaaactgcatcgcatgcatagcaaacttctcatttgcttaatttccacatgagatgctaaagaagttttaccaacacgatctaccaaccatatgcaggaagtaagaatcaaagagcatgcatatctcttaataggatggagaggtgtgaagaatttacaaatgaatcagcatgcagtccttgtggcgataaacacgctgcggttcaagcctgtgtaacaaaatttgaaaggttgtaactccaggtgcattctacagatttcctttgaaggatatgttccatagaaaatatttcgtttttattaatttatcttgcttttacagactgatctgacaaagttctgcataataccttatgcagatatatacaaaggcctagtttagatgcttcatgttgtgtttgtggtatctcaaacctggagccttccaatcagttgatagagtgcagcaagtgctttatcaaggtttgtcatattcccttaccagaacctagtactggagtctattcacatagagccttgcattttttttttctgtaggtgcaccaagcttgctatggtgttctaaaagttccaagaggacaatggttctgtaagccctgcaagatcaatacccaggacacagtaagaaaattcaatttcagagtagtttcatttaaggcatttaatagggcatgatgtagccatgtaggccagaacagccatctttgtgcttgcagattactgtgtgcaagcactatagaatttttcactgattcttttagggctatttgtagaatgaagcttttattgaaatcaagataattacatcaaggtgatacaaccatttagggatacactgctggtatagatgtatggacgctgcactagcatggaaaatacttcagtcaaaattaatcttactaacactaacatcctcattgttagatacatttagtagtgattaattgtatatcggtatctctttacgttttcctttgccaggtctgtgttctgtgtggttatggaggtggagctatgacaagggcattgaaagcccagaatattctcaaaagcttgctgaggggtattgcaactgcaaaaagatcagataaatatgtttattcatcaggaaatgtgaacagtgagtgtacaagcaagttacatggggaatatgtcaggcatgattcatttaatggacacagatcaagaagcttcaatgctatatcttcttttggtataaaagaagcttcaataggtagtgcacgtggggacattatcagcaagtcgtggacctctaatcgcaattccagtctacttggtccacgaacaaggcagtgggttcatgtggtctgtgggttgtggacacctggtacaaaatgcccaaatacaatcacaatgagtgcttttgatatatcaggggcttcacctgccaaaagaaataccgtgagttccctacatgcatattcttttgaacttcattgaaaatatgtttcctgtaaattgaaagtgcatccaatgccaagtgctggcattggccatgggtttcctttcatcctgcacccgattatttagtcctaatgaacttaatcttcattattgctaatgtttttgttgtcaggaatgctcaatgtgtaacagaactgggggctcatttatggggtgtcgtgatgttaattgctcagttctctttcatccttggtgtgctcatcagagggtatgatatccactcataataagctatttgacctatatattatcacattgatttactgtatgctcataagaaatattctgcaatcttggttaaaacttattgttatctcaacactgtaaatctgaatgttgctcatgatatcacaatagggtttgttgcaaagtgagccagaaggcgagcataatgaaaatgttggtttttatgggagatgcctggatcatgctatgcttgatcctaatcatgttaatcctaagaaggaatgcttgaggagcaatgactggacatgtgcacgtactgaggtaatatatttgttttacctttgtactgcttgaaaaattagaatcctaacaagtgacaacttcctttgtcattcttctgaaacaggtttttagaggccgaaagggagactcatttggtgctaatcgtagcaggaaaccagaagagaagtttggtgagtgcagtgtttcccaagaacagatcaatgcttggatacgcataaatggatcgaaatcttgcatgagaggacaggtaacttctaatccttcactgcaatgcagttggttatcttcaatatagtacattgtaatgtactctgctttagcggggtatcaaagtttgcatgtacatactggatgagctgtttacatgtcttcattctcatttttagaaggaatatgtccactacaagcagttaaagggatggaagcatttggtagtgtacaaatctagcattcatgggcttggtctctacacatcggagtttattccacgtggctctatggtaattcatcagttattctttccttagtcgataatctgacacaagaatttagcaaatgaagaaattgttaacttctgcatgaaaatatttcaggttgtacagtatgttggtgaaattgttgggcaatgcgttgctgacaaaagagagattgaataccagtccgggaaacggcagcaatataagagtgcttgttacttcttcaagattggaaaggaacatatcatcgatgccacccgcaagggtgggatcgcaagattcatcaaccactcttgccaagtaacaaataatatgctcatctgtgtcttttttcgtccatctaaaactgaatgtttctaatgcatgttttgttttcttccaatctttgctggatcagccaaactgtgtcgcaaaaataatctcagtaaggaacgagaagaaggtaccccttttctttatttcgatgttgtcgtttcaaaatattcgccccagccctctttctttcctggcaaatttatctgtttctattctaatgtgtttttatcattgtccaggtagtgttcttcgcggaacgccacataaatccgggggaggaaattacctacgattatcacttcaaccgagaagatgaagggcaaagaatcccctgcttctgtagatcgagaggctgcaggagatatctgaactaagatagtgtacttcggtcgtatgtttgtagtgctgtttaaacattgtaatgtgcgcactgtatatatgaataaactgtagggacttaatctggcactgataatttagacatccaaacttaaatttagaatggatttagaattaatttagacttcctctcccgtgctcggcagcaaaattggaagctacttgccgctgctggagaaggccactgaccttgatagaacccgtaactcgttgatttcccgggacattgttgtcgtaggtactgggaattgtgctcatggaacaagctcataattcatagaaaattcatacacaacctaggtccaatataacaattgaaccttaaagtacaacatcagtaacttggaggtaaaactatcacagaaatttccaacacaaaagaccaattacattcactcgcagtatcaatcgtagcttggagtcaagaaaggattcttctcgtcatagaaagggtttgtgaaatgttgactgctgctaagactgtcatggacgttacccttcactgcagcctgatgctgagagaatgctctcgggttgaaattttcgtcatggctgtctccgaatgcaacccagccatcaccgccgccggtgatgtccctctgcttctccatctcttcgacgtgctccttgaactctttcttcgccacgttgatcacgttgtctccgtgttcatcgcaccatgccctgcaaaaacagatactatcatctcagaatttctgaaccatgtctgttaaatctgaatgatgacggaattgtgaagttttcagtactttgggaagaaggtcttgaggtcagatttgtccactggaagccttgttgagatggcctcaatttgttgatccctacaatgatgccaggacatacattttacacacttcaaacaacagtaattgatcaaaaaattcattggcaaaacagacagattaaaacttacgaaaagttcaagtttcggttggtggatgacaactcagcctgaatccttgaaagctctttctttgtgttctccaccaaaaccttcagtaagttcagatacaaaaagctcagttcagtccagtaattctgaaactaccaagtaccaatcaatggacacctgcacaatctgtttactgaaactaaacacgatggagagatcaaccactttgcaataccttatcattcgctaaatcggaagcagaatcatcgtcgccggtggccgtattcagcttcttcttggctctctttgcatccttggcaacagccgggctcgcctcaagccggcactcactgtacgaagaccgcggcgcagcgtgctccggccgctcaccgccggccgtcgcctcatcgttgcttgccttcttccacttcttgaggccatcgaacccccacgaactcttcttcttgctctttgacgcatccttctcctgatctgtgccttccatggacgccgccgggggctccttgttctcgctgccattgccgccgttgtggaacatcgccgtcaggtgcctcctcttccccttgtcggtcttggcggtgggcatggcttccgacggcgagctctcggccatgaggacggatggggcgttcttgctgttgttctggtcgacgggggctaacggtggcctcgatgcgtccagctccttcttgcctctgctcttccatggcgggacgaaggccttgtgcttcggcttgtcggaggccgccgcggcgggcggcgggtcccggaggtcgatctccgaccactcctccatggaagacgacgaggctggtgccgccgccgaagccgcgccgccatcgccgacgtccgcgtcggggcagtcgaccacgacaccgaacgccgcgaggcgctgcacgagtgggctcttggtggagttgtactccgccgccgagatgcacttggcgtacaagagctcctgcaaaaggagaagggagaagcgttcgatcaattgctcgctcggattggagggagggaggtagaagaagaagaagaagaaggcgatgcgggtgggtagtacctggaggaagaggagcttgtcgcggaggatggcgggctggtcggggtgggcgggcgggggcggggcggcggcgagggtggcgagcatgtcggcgcggaaggcgtcgacgtcggagggcgggacgatgccctcgcggtggagcgcggagaggtggaggatgcggtggaacgattcctgctgccacttgagcgcgtcggcgtggcgcctcgccgcggcctggtcggcggtgaggcggcggccggacctgaagccgccgaaggggaggatggacttgcacagcgacgcgatggtgtcgtgcaggcccgagtagtacgtcggcgtgtacgtgtaccccatcgtcgtcggcgactcgtcggcggcgagctgctgctgctgctgctccggtggctgctcaggcgaggcgaggaggggagcgtgagagagagagagagggagatggtggtgagagagtgaaggggaacgggttttgttgggctacggcccaacggttggggagaagggaggaggaactagccgttgagttgaatctgcagctgcaagtgggcccgttcgccacgaggtcaagaagcttcttcgcctaacatgttgatctcagccgtttaacgactgatccaatggttggtcggggagacatcacgtttaccggagtatccgatactatcatgtaaattaaagagcaagtgatccctctgttccatatttttccctatttaaattttattaagcttgatcgagttttaaaaaaaatttagcaatatctaaaatatcaaattaattttattaaacctaacattaaatgtgtttgtttttttattaaaaacactattatatttttctataaacttgataaaatgaaagaaatttagttagaaaaaagtcaaacgacttataatataaaatagatgaagtaaaaaaaataagggagacgaagatacaacaattcatcaattcaaaacacgaagatcgattgttgaacagatatatgcgtaggcaagaaactgcaatccaatcgtccagcattcacgattgtatgtattccacaaagaaatgccaacgtaatcagataactgtgagtgagttcagtgattttcttgaacggaataataccagtttttaacttttgataagagcgttgagccacaaagctgaaaaccatgctgaaaaccatttgctggatactgctttcatcccatgaatatagcaatatatatagtactatcagataagacattataaaactatgaatatataaattaaattagtttcattaaatataacatcgaaaatattttgattatatgtttgctttgtgttgaaaatattactatatttctctataaaatcaaaacgacttataatatgaaacgtccctccgttttttaattataagtcgctttgatttcttaagtcaaacttactagaagtttgatcaaatttatagaaaaatttagcaatatttatagcaccaaattagtttaactaaatctagcattaaatatatattaatagttttttgtgttgaaaatattagagaaaatgcatgtgcgttctaatgtgttgaagcaattttaatctcacacattatttgattgatgaaaataggagtcctcctatgatttttgcatcatgcaaaacctatacgcatgcatgcatgtattgataacagctagatagacagatatactgacatactgtagtaatgtctggctaaacaatttcattctcagaagatagataggattcacaaaccgcatgaactagacgtacgggctccgacttagggtccaaataggatttagtttggctacatctttatttttttttctctttcataatcggaaacctgactctagtatcataccttctattcatcttcacacatagatagtttttctatctaaaacgaataaacttgtgtgcagatcgccggccatggctaccgtcttcccctaccgttggactaaaaccaagcatctcaccgagcgtccacccacccacggccaccctcccgacgctcacccatggatcgtcctcgacgtccgcgcctacatcgccgaccgccagaacgccaccaccgccaccacctctctcaccagcggccgcaagctccagatcaccatctgcgccgcgccgccgccgctcgtctcctacgtctgcgcctggtcccccaacgccgaccccgccctcgtcttcgccaaggaacccgtcgtcgcctgcgtcaacgccgacctcgtcttcctccgagtccacagcgatcaagtctaccacctggtctaccacgccggcggcggtggtgacagccgccgccgccgcccttcgctcacgcttgtccggcaccccgaccgccccttccatcgctgtcattaccttagtgagctcggcagcattgccatcctctcccgccgccgtgccggtgccggtgacgaccacgacgacgactccaccggcttctatgtctgcagtcttgatcaggagctatggtatgggttacctggacaacgtggccacttcaagctctgcctctacgactccatcgatggcgaatggagccaggagacccttcgtctcgaccagctgcgcaatccgcaggacaaagacaccgttttccattacacggagaaggtgattactctgcacgatgaacaggtagtggccttcgttgatctgtggcgaggcatggtcatctgcaatgtcaacgatggcacctgcaacaacgtcgagctcctgccgaagctgaacggtctccctgccatggataagctgcggatagctcgtcctatgctcagcttgatggattcgcatgtcgtttacatcatgggcaaggtcaatctctccggcgagaaggcggtggtgctcactgttgacatggccaacaagaggctgcaaggggtatctctgcgtgacgctgaaaggatcgtctacgatgataacggttgcagctacaaacagtataccatctcccaatatttcactacatctgcaggtgattgattaatccctggcctgtttttttttcctacttattgcttttcttttggagaaatcttgtgtcgaactgacgagacctcacctgctttcaagaactcggctcgttcgtcatcaacctccctctcctccaagaatttcttcaccaattccatctccttagcctcaacttcctgcgaatctttcacagcaaacaaaccgcatgaaccagagcgcaaaatcacaaaaatgtccgtacgcgaagtttgtgtgtgtgtggtggggggtgctccgttgccggcgctggatcaggacgagttcgtcgtcgaagcgagggcgcgtcgatcggccaccggcaatccgattctatccaaaccatcttccgccgatccgatttacttctcccctccgactccaacttgcattgctgacatcgattcggatctcgatcttctccgactccgaatactccacgctgctctactttaagcccggccggacgatcgccggcgggaggagaggccgcagccatggctaccgccttcccctacagctttacaagaaccaaacacctcactctctgcccgcccagcagccacggtggggatgcggccgatcacgggccccttccatggatcctcctcgacgtccgcgcctacatcgccgaccgccggaactccaccaccgccaccatcgtcttcagcaacggccgcaaaatccagatcacattctgcatcgcgccgccgccgctcgtctcctacatctgcgcctggtcccctgccaccgaccccgccgtgttcttcgccaaggagcccgccgtcgggttcgtcaacgacaacctcgtcttcctccgcgtccatagcgatcaaatctacgatctcatctaccatgccagctctcgcccatctctcaagctcatccacaacccctacagcccctacaacccatacgactaccttcgtcgtatcgacaacgttgtcatcctccctgaccgccgccatgccgccggcgctgatgatgatgacaacaacagcggtcacttctatgttagctcgctcgatcgggatcaccgcttcgatattggccacttcaagctctgcctctacgacgaagacgattccatggactgcaaatggagcaacaacatccttcttcttgaccaactccgcaatgcgccagacaaagatatcgtgctccatttaacagagaaggtacttatcctggatgatgaacaaccactagtggccttcgttgatccctggcggggcatggtcatctgcaacgtgctcgacaacagcagcacacctgggggaagcagctacatgccgatgccatccgagatcttcaacatccacaacacctacacttcatccatttcccgtgacattgctatcgtcaatggccgtctcaccgttgtcaggctgtgcctttacctcgattcagatgatgattcagacgatgatgatgacgacgattgctgcgcttgggatctgaccacatggagcaagccagtcacctgtttggatgatgagtggcgtgaggacttgaagatcaagtccagtgacgtctcgattgacgacagcactcggaacgcctgcctcctgcccaagctggatgatggttgcccaacaacggagacgctccagttagctcatccaacactcagcttggtggacgctcacattgtttacatcatgggtaaggttgacgtctccgatgagaaggcgctggtgctcaccgttgacatggcaaacaagaggctacaagaggtatctatgtatgacgccgaaagaattgtaaacgattttgattatgcctacacgcactctaccatctcccagtatttcactacagcagctgcaggtgattgattaattcctagccttgttttttttttctacttttgccttttcttttggggaaaccttgtgatgaatatgatagtaaacctaattcaaagtagtgataggggaaactattttgatccctcgaggggatatcaatatctttgtcgtttgcatgttactcaaatggttattaaaaaatgtgaaaaaatttgagaagatgtattaacgtgtgatatatcacgccacaaacattcaagttaaaattcaatttttacatctcgcaaggaaaaaaaataaattaaactatacaactagttaatgtatattcacagacaaatttatttttttcgttgcgagatgtagaagctgaatttgaacttgtatgtttgtggagtgatatatcacatgttaatacatcttctcaattttttttaatttttttaaaacaatttgattaatatgcaaataatgaggggatatcctctcaaggatcaaaatccactcccgttgaccgttgtgatagctgatatattgtgtgtggctgctgctttagtgctagctagacaagttgaggccgtaattagtgtgaacctcgccaaactctttattacccatctaatcatggaagccgtcggtgagcttccaaacaagttatagagtacagttccagaaaagttgtaaatttcatgagaattaatgcaagtcatgtgggacacaaacccactcaaatacaactgcggcatattggattgaaaaaagtacgaattacctctctaactatcaaggtcgaccgaaatacacctacaaaatcgaagaccagatattctacacccccaactattgaaaccggataaataccccgtgtctcaatccggagcggtcccacatgtcagcctccacctcatcctccctctcttaagaagctagttggccccgcatgtaagctgctccctcttccttcgtctcctggccgcagagatgcctgtgccgcctccaggctccagggacccgcaccgccgccgccaggcacctgcgccgccgcactcatcttgaagcccgcctccttcagtcggtcgtcgtcgccgttgctcccatccaaccgctggagagagagcgagagaggaggggaggggaggggagaggagagagagagagagagagagagagagagagagagagagagaggagaaaagagatgacaaccggcggcggcgacaccctccagggcaggcgggtaaagcgacagactccttcacttcggccaaggacccccgccgcccgagttccgtcggagtggccccgtctccaccaccgccgacgccgaggtccagacttcgctcccccctgctacgccgtcgccagaggatggatgctgcttcaccgcctcgatttcctccgccgatcccatcgtcaggaggccaccactgaccgcgccagcaccggtctccatcgccgctaggccgccgcttcaccacgaccgccaccgctctgcctggctgccgatggcctctcctctcccttgtgccacatctccgtttttctctctgcctcccatccgcgcccgccgccgctcgccgccgaccgttcccctccccgactcgcccgctgccggccggagccgcgcccgctgccgctctcccagccgctcccgtcaacgctaacagcatcaacatagaggatgggagggcgccttccacctccgccaccggctgcccgggcgagctccgcctccgcctcagccgcccgccgctcggggagctagctctgcctccaccggcggccgcccgctctgcctccgcctccgaactcgaaaaccgaggagctccgcctcagccgcccgccgcccgaggagctccgtctccgccgccggtcgccccctccgccttcgtttcagccaccgtactagtgagatggtgaggggagggaggagagagagaggggtggggatctgacagtgggtcccactaattttttttaagagagggaggatgaggtggaggttgagcaggatgttattttgaccggtttcaatagtaggggggcgtagaatgtccggtttttaagttcgggggtgtaattcggtcaacctcgatagtttagggggtaattcgtactttttcctattggattctagattgtctttatagataaatatttttccctgtcagtgcacactatatcaataacatgcacataaaaaaagtgagcatttaaaagaaatggtcggaaatgaaaatagaaacaagatttccgccccaacaaggtagaaagagaaaagaccattttaggtgctattgcatgcgtgaactaaattggttgatactcttttttgtttgctcgaacacattggtgatactctgataggaggacttccattttggtcaccctcgtcgcgtgaagggttaggcatattaatatattatatatgtactcctctgtttttaaatatttgacaccgttaactttttagcacatatttaaccgttcgtctttttaaaaacttccgtgtaatatgtaaaactatatgtatacatataagtatatttaacaatgaatcaaatgataggaaaagaattagtaattacttaaattttttaataaaacgaacggtcaaacatatttaaaaaaattaacggcgataaatatttagaaacggagggagtaatacgtaggctatttgcgctgacacatggggacttttgttttgctgggtgcaggtgtaaagggaagcctgaagagacctttgaagtttcatattcaatatcctcacaagcggttgggtgaaacaatcaataggagcgatcctatggacttgcatgagccattgcaactggatgctggatctgacatgggaactacagacggaactgaaggcagcgataatcctatggacttggaatagccatgccttttgagtgaaactaaatgggcataaattaattagagctgttgagaatcatgtccgggcataaattattatagattaatttgagctgttgaaaatcatgcccgggcataaattaagggtgtgtttagttcacgaaatgaaaatttttgtgtgtcacatcggatgtttgaccggatgtcggaaggggttttcggaaaaaaactaatttcataactcgcctggaaaccgcgagacgaatttattaagcctaattaatccgtcattagcacatgtgggttattgtagcacttatggctaatcatggactaattaggctcaaaagattcgtctcgtgatttccgtgcaaactgtgcaattagtttttttatctatatttaatgctccatatatgtgtcaaaaaattcgatgtgacgtttttaggcaaaattttttagtgtagctatatttatggcgccatatttttcatcgaaaaatagtcggcatgtatttacattttaagtccctaaattacatatgtaattttagtgtatttacaatgtaagtctcaaaattacatatgtaagtactaaaattacatatgtaaattcgaaaattacatactaattacatatgcaagtggggtgtaaatgaggtgtaactacggtgtaagtggctaaaaaaaaatcgactgtaacatatggcgccatatttctagcaactctgaaattttttggaactaaacaaggcctaattagagctgttgaaattttgaaaatcatgcatgccccgttatgtattttggttgttgtgcatgactgcatgtctacattttagatttgccttgaatggatatgtttatgctcttgttggactgtatttgatcgttcagatcgagagttgtctttggagcgtggtgttaacatattgatttcatctataattctgtttcagaaatattttttcgtactctacaattcagaaatagcaggggaagcccactgctttccattttcttgaaaccagaaaatagagtttgagggtggtcgttcgccacgacttgacctccttcgccaacgaaatgtaatcgccaattatgcataacccataggctgatctgatcaggaaagaagattattgctagtggcctttgccagaaatcaggctatcgtcaagcacaagccactaccggcgataatacaaccatagcaattcaagataagcagatccgattttaagcacctccgatcgatgaaatcgatttacttctccccctccgattccaacttgcatcgctgacatcgatttggatctcgatcttctccgactccgactcgggatcctccacgctgctctactttaagcccggccggacgatcgtcggcgggaggagaggccgcagccatggctaccgccttcccctacagctttacaagaaccaaacacctcactctcagcccgcccagcagccacggcggggatgcggccgatcaccggcctcttccatggatcctcctcgacgtccgcgcctacatcgccgaccgccggaactccaccaccgccaccatcgtcctcagcaacggccgcaaaatccagatcacattctgcatcgcgccgccgccgctcgtctcctacatctgcgcctggtcccctaccaccgaccccgccgtgttcttcgccaaggagcccgccgtcgggttcgtcgacgccgacgtcgtcttcctccgcgtccatagtgatcaaatctacgacctcatctaccatgccagctctcgcccatcgctcaagctcatccacaacccatacaacccctacaacccataccattaccttcgtcgtatcgacaacgttgtcgtcctccccgaccgccgccgccatgctgccggcgctgatgacgacgatcatgatggcagcggccgcttctacgttagctcgctcgatcgggatcgccgcttcgatcttggccacttcaagctctgcctctacgacgaagacgattccatggactgcaaatggagcaacaccatccttcttcttga

SEQ ID NO: 8705 - DNA, 62058 bp, Oryza sativa
ccttcttcttgaccaacttcgcaacgcgccagacaaagataccgttctccatttaacggagaaggtgttcatcctggatgatgaacaaccactagtggcctttgttgatctctggcggggcatcgtcatctgcaacgtgctcgacaacagcacaccagtgggaggcagctacatgccgctgccaccggagctcatcgatgcccgcaggacctacaattcatctgtttgccgtaacattgctatcgtcaatggtcgtctcaccgttgtcagactgagtctttacctcctcgattcagatgatgacgattcggacgatgacgattactgcacttgggatctgaccacatggagcaagccagtcagttcttgtttggacgatgaatggcgtgaggacttcatgatcgagtccagtgacgtctcgattgacaacagcactcggaacgcctgcctcctgcccaagctggatgatggttgcccgacaacggatacgctccagttagctcatccaacactcagcttgatggacgcccacattgtttacatcatgggcaaggttgacgtctccgatgagaaggcactggtgctcaccgttgacatggcaaacaagaggctacaagaggtatctgtgtatgacgccgaaagaattgtcaacgattttgattacgcctacacgcactctaccatttcccaatatttcactacagcagctgcaggtgattgattctcttttttttttttcgggaatacgccagtgacgcatttttcacattatgagaaataaaagttatttacaatcaaagaaagatcagcacgggacaaagttattgattcattcctggcctgtttttttttctttctgcatcttgtttttcttttggggaaaccttgtgatgaataccatagtaaacctgattcaaagttggctctcataggactttttttttatcatatcatactttcataggacttggcgtgaagggttaggcacatgtatctgtaggctatttgcactaacacatgggcacttaatttgttttgccgttttactggtttgcaggtttaaagcgaaacctgaagcgacctttgaagttccatatacaatatcctcacaagcggcagggtggacctggttcgaaaattagagatgaaactgaagatgggaataatcctatggagttggattaattagtatacgaattgcgatacaaccaaccgcatacgaattgtctgtattcaacaacaaatggtagtgcaccagagcaccaatataatcagatgagcgtgcttagtgattttctcaaatggaattgcagtttttctactagaactgagccactgaataagctaaaacccatcttattactagagtcatacatggcttgaacaataggattgagctgttgaggtggataatttacatggcatgtatgagagcaacttttaacaccacttcccagaggcctgcagccttagttttcagttcccacaggttgaaactatctccaaagtcttgctgataccagcaaggaactcgaacattcagacttcaaacattcaggaaatcaaattacaatgacaaatggataagactgattgctaattctgggtaatgaattataaaagaactagattggctgtcgatattcctactcaatttgaaatatcacactccaaaatgtgaacaaggtggtcaggcacatatagttaccgaatttctcattccagtgatgtaaacttatagatgaaggtcacttaaaacatgtccatactcctgaatttcgtattggattattggccttgctataagttaacaatgctaacctacctgcttgggtaaaagggttaacgtctcacactaacagatacattatttaagaaactgcatgttccatactggagtatgattgataggaagaaacctcagaaccaacatctgattgtgtaactcagtatacatttagtgcatcaataacaatgttctaaaacaaggtctacaaggccgcacaaaggaatggatcttaaccttgtactgcttaagccacacaataggccagctatgccatgtaaggcaggcgacaacacataacccttgacatcttttagaatcttgataaaaaatgatcaaaggaattgaatttcctagtactacctgttctgcagtctacaggtcgtatggctcaactcaacagaaaagggaatcaaggcaaaatgtccagggtctccaaaaatcaaattttgtggtgactgcaaaattgacagccataacttattgatctattatctctttatccatttagactagtcaggggtaaactcatcatagacatcaagaaaatttaagtttcaaaatctctacatattaaaatactacacattttgtctcacttgtaatcagcgattatttcttacctcctcaccatttctgtactagagttaagactgtaaactatgctgcgtctttgattaggctggcaatccgtttctatccaaatcatctttcgccgattccaacttgtcttgattccaaatcatcatggttaaggtgtcaaaaaaaatcatcatggttaaacctctccggctcctctactctgctctgctctacttaagctagcccggccgggcggacgatcgccggctggaggagaggccgcagccatgtctaccgtcgaccactacatgtggagtagaaccgtcgcctggagtatatttgttttcagttcccaagtcatgcggataccagcaaggaactcctgcaaatgcagaagggagttcagacttaaaggtttcaggaaaccaaattacaacgacaaatggacaacactgattgttaattcagggttaatgaattgataaaaaggatgaacaagactaattgttgatgctccaaaaatgtgaatgaggtggtcaggcaaatgtcaggaaagtataggttcagtcaattagctgcattacgtctcaagctcaaactcagtcagttaagactgtataaaactcacctgttttcaagaactcggctcgttcgtcatcaacctccctcccctccaagaatttcttcgccgattccatctcttcaacctccaacttcctgcgaatcattcacagcgtacagaattcacaaaccgcatgaaccagagcgcgaaatcaatcgacctcaactcgacgatgacgctgaggtggatgcgcgggccatgccatgctcgagtgacccgacgcggcggaagatcgtgcggatcgtcggtcgccggcaatccgttcctatccaaatcatgtttcgtcctccgattccaacttgcctgtgattgctgagatcgatttgcatgtcgtctccgactccgactcctctactctgctctacttaagctaagcccagctgggcggacgacgatcgccggcgggaggagaagcctcagccatggctaccgtcgaccgctatatgtggaataaaaccgaacacctcactctgcgcccgccctgccatggcggggaccctctggatgcacaccagcctctaccatggatcctcctcgacgtccgcgcctacatcgccgaccgccggaacgccaccaccgccgcggccgatctcggcaatggccatcgaatcgagatcaccatcttcaccgccccaccgccgcaggtctcctacatctgcgcctggtgcccgaccggcgaccccgcccggatcttcgccaatgagcccctcgtaggctgcgtcaacgccgacctcgtcttcctccgcctctacagcgaggtagtctacgacctcgtctaccgcgccggtggccgcccttcgctcacgctcatccgggaccccgtcgacgtcgacgccgccagcttacagagggattacctgcgttcgctccacaacattgccctcctccgtcgtgctctctggatctggacctccatcgagtcacaccatctacggcagcttacaaactctgcctctacgagtccaccatccatggcgatggcaagtggagcctggagagcctccttctaccccagctgcgtcaaatgatcgtctataatacgagcagggtaattactctggatgatgatggacagggagtagtggccttcattgatctcaagcggggaatccacatctgcaacgtgctcgcccatggctgtcctggaagttacctgccactgccgccagagctcaccagctctcgaatgagcttctttgccgggacattgccatcgttaatggtcttctcaccattgtcggactgcgtactttctttgattcagacactgattgctggtcctgggatctgtccacatggagcaaaccggtggctcatctggacaacagcaaggactggcaaaagggcttcatggtagattctagtgacatcacggtcgacgccacttgttgcaacgtcgagctcctgcctaagctggagggtcgcccggccatggcaaagctgcaggtagctcttcctacgctcagcttgacggatgctaatgttgtgtacgtcatgggcaaggttgacgcctctgacgagaaggcggtggtgttgatggttgacatggccaacaaaaggcttcaaatggtgtctgtgtatgatgctgagaggatcatcaacgactttgattactcctacacgcagtctaccatctcccaatatttcactacagctgcaggtgattacttaattcttgcgctgttctttctacttattgctttttttttcggtaactttgtgttgcatacgacagtaaacctgattcaaagttgtgattgctgatgtattttaaacctgtgtggctgctgctatagtgctagttggacttgttagtttaggctggaattattttgaacctcgctagactctttacctctctaattatggaagcctttggtgagattctagacaagttatagagtacagttccagacaagatgtagagagcacatgacatgcaagctatgtggaacacaaacccagtcaaatgcaactgcattttggattctagattgccttcatatgaaaattttcttgtcagtgcacgctatatcaagaacatacacataaacaaagtgagcctttaaaagaaattgtcagaaatgaaaacagaaacaatttttctgcccccaacaaagtggagagagagaagaccattttaggtgctcttgcattttttaaacattcttgaactaaattggttgatgctctcgtaggttttctttttgtcatactctcatagggcttgggatgaagggttaggtacatttgtgtgtaggctatatgcactaattcatgggccctttgttttgctgttttactgggtgcaggtgtaaagggaaacctgaagagacctttgaaatttcatatgcaatatcctcacaagcggctgggtgaaacaatcagcaggagcgataatcctattgacttgcatgagccattgcaactggatactggatctggtatgggaactaaagacgaaactgaagacagcgttattcctatggacttggaatagccatgcatgcactaaacgggcataaattaattagagctgttatgaatcatgcccgggcataaattattataaattaagttgagctgttgaaaataatgcccgggcataaattaattagagctagctgttgaaaagcatgcccgttatgtattttggttattgtgcatgactgcatgtctacattttagatttgccttgaatggatatgttcatgctcttgttggactctgtttgatcgttcagagagttgtctttggagcctggtgttaacatattgatttaatttataattctgtttcagaaatatttttttcctactctacaattcagaaatagcaggggaagcccgctgctccattttcatgaaaccagataatagagtttgttgcggagagtggtcgttcgccacgacttgacctcctccgccaacgaaatgtattcgccaatacgcatactccctcctattctatattaattgacgttttggacatagttgagatcaaatttttataactttgaccattaataactttaaaaatatttagtttaaaacaactaaaacaacatatatagatttgttttttaaagcactataataaaagtaaacatacatttatttattgtatatattataatagaaaaataaggtcagagatatattttgtaaaccatgtcattgtccaaaacgtcaattaaaatagaatcggagggagtagttcatatgctacagatcgatctgagacgtccaccgcctgatctgatcaggaaagcagattgctcgagtggccttaccagacatcaggctatcgtcaggcacaagcaaatcaccaccggcgataatacaaccaatagcaattcaaaacaagcacagtaggagatctacttatattgtttaaaataaaaatgaataggcgagcaattgccatacaaccaaccgcataagaattgtctgtattccacagcaaatggtagtgctccatagcaccaatataatcagacgagcgtgcctagtgatcttctcaaatgtgactagaattgaaccacagaatatgctgaaaacccagctcattgctagagtcatacagcacgaacaatgggattgaaccactgaggtggataatttacatggtgtgtaggacagcagctcttatcatcacttcccagacgctatttgttttcagttcccatagtttgaactttgaaataagtccagagtcatgcggataccagcaaggaactcctgcaaatgcaaaatggagttcagacttcaaaggtttcaggaaaccaaattacaatgacaaatggacaacactgattgttaattcaggggtaattaattgataaaaaggatgaacaagactaattgttgatgctcctacttgatttgaaataggacactccaaaatgtaaatgaggtgatcaggcacatatagttaccaaatctcattccagtaatgtaaactgcttactgatgaaggtcacttaaatatgtccatgctcttggacgtcatattggattgttggccttgctataaattaacgatgctaacctaccggcttgggtgaaagagttaatatcgtttcacactctgacagatacattatttaagagactgcatattcatccaccaaaactagaaagaaactgcatgttgcatactagagtatgattgaatattgataggaagaaatctcagaaccaacatatgattgtaacttagtatctttagtacatcaataccaatgttaacataaggtctacaaggtcgcacacaaggaaagggatcctagttcctaaccttgtactgcttgagccacaatatgccagctatgcccacattatgccagctatgccagtgatgtaaactgcttattgacgaaggtcacttaaatatgtccatgctcgccttactagaaactattgggaacttatatatgaaggtcacttatagattattagccttgccagaaattaccaatggtaacctactggcctgtgtagaagggttactctgacagatacactacctaagaaactgcatgttcatccaccaaaaaccagaaagaaactgcctgttccatactctgtatgattgataggaagaaacttcagaaccaacatctggctgtaactcagtaccctcagtgcatcaataacaatgttctaaaacaagatttacagggccgcacaaggaacgggatcctaaccttgtactgcttaagccacacaataggccagctatgccatgtaaggctgtaagcactgcaatgcaggtgacaacacaatagcccttgccaccttttagaatcttgataattgaatgtcctgcctactctagtaccacttgttctacagtctacaggtcgtatgactcaactaacagaaaaggaagccaagacaaaatgttcagggtctccaaattttctggtgactgcaaaattgacagccataactttattgatctataatctctttctccatttagactagttggattaaactcatcatagacatcaataaaattaaagtttcaaaatccctacctatgaaattactgtatttttccttactagtgatcagcaactatttcttacctcctcaccatttctttactacaacaagcattgcggaggaaaacaggttcagtcattaactgtagtagggttttagctcgagctcggtcactcaaagagttaagaactagtatctgtgattttgtctgtgtgcttcttctcgaaagcgtggagccaagccaagccaagccaaccaagggattggattccctgcccatcccttccaagttattaactgtaaaactatgctgtgtctttaatctcatagttctaaatgtatctacgacgaattaacaatctcacctgatttatctgcttctcctgtgcctacttctcgacgaatgattcgacagtcttcaaccaccggagaagctccatcttttccttgttcgccatgtagtcgtgcaagaactcggcaagctcgtcatccacctccctctcctgcaagaatttcctcaccgactccctctccctagcctccagcttgctgcgaatcattcacagaagaggaacatcatcacagaccacataaaccagagagcaaaatcacaaaagcttccgtacacgaagtcgcggcctccgctgctggtgctggagccatcggcgtcccggagagtgaggacgtggcggacgacgagttcgtcgtgccaggcggagcagatgaagccgaggacgcggtccgcccgggagacctcgacgatgaggctgaggtggaggcgcgggccgcgctcgagcgactcgacgcggcggaagaggggcgcgtctgggggcggggcggcggcgccgtcgaacatggtggcgtcgaccttgacctcctcgtcctgggcgccgcgggtggcgcggaggcgcacccactgctcccccgggcggtcctccaccccgaacgatttgaaggccttcggcggctgcaacgcattcgtttctcggcgaatcagagaagacacacacacacagagagagagagagagagagagagctaagatgggggataggcacgttaggatgagaggataccgggtagggagggcggcgttcggagatgtagttgatctcggagcgcaggaggcggaggaggcggtcgtccatcggggagcgcagcggcgcgacgacggtggagaaggatggtttcgccggggaggaggccgcggcggcgagggagagagcccggcggactagggcgcgcgccatgtgttcgagcttttgcctctgcgaagcgtctgcctagaggcgagggttggttgaaggaaggatacgacgacgcggcggcggcggcgacctgacctgggctgcctaacattgcggcccgattctcctttgtggaatagaataagttcactagaggtcccttgatttgtcccagggtctgacagtcatctctgaaccgaaattctccactagctcatcctcaacttaccacatcatgttgagggaattttaagttcctgaggtatctaaatttttcataactcctctgaaaattgcgaaacgtatttattaaacctaattaattcgccattagcacatataggttactatagcacttatggctaatcacatgtgggttattatagtacttatgactaattatagactaattaagttcaaaagattcgtctcgcgatttatgtaaactgtgcaattagtttttttaatctatatttaatgctccatgcatatgtccaaagattcgaagtgacgtttttttggcaaatttatttgaaaactaaacaaggccttaggcttaacactatgaacaacggcgtgctattaggaaaacttccggattcggacctattttcgaaaatggaatctgtcggtcggaattttttcgaaaacggaaacgaattcggaaatattttcttggaaactgaatcggaaatgataagggcagtttccgtcggaactcggaatcggtccgaaactttccgaaaattttctcagaagtactagaaattttgtgactaaaataccctggattctttttttaagcactaaatagtgaataccatggtgtttggctgttatttttataaaaaatatgtgttatgcaaatctaaaattacataagaatattttttgtcctacattggaatttatcaacaacattactctttcaattggatttatcactttgatgggttttttatttcgataaattttcgttaccgtattcgcgccggttcattttcgctccgttttcggtttcgataatattcgattccgttttcgtatccggggtttccgatttcgactctgaaaaaaaatatgaaaacgaaaacgataaagatggtttccgtccgtttccgtaccgttttcactcctacgtgctatgccgcatatgggaggcagtctggtcaccttgcgcccaacagcccgccagctgttcgacgcaatgccccaaccccaacctcttcacctgcaacgtccatctctcgctactcatccctctccgtgtccttgctggacgatgatcgaatatttggcgcagaagcagaacgcactggatgttttcaggagaatgagagcacagcagcattggtcaatacaagaacatactcagttcacatatttttcatgttccaggagaagaacaataagagtacatcaatttgtggatgctttcttggtagaggagtggccaaccatgtaggagccgaacccccatacggtgatgagcagagacaggatcttgaagccgctcatggggtcatggaaccagatcaccgccgcgatgctcgtcaccggcaccctcacggcgttgagcacgccggcgaggacggtcgacgccaggaacagcacgccggtgccccccagcaccccgagctggaacgtcaccgccgaccacaccatcaccatcgcgtacgacgcctcgccgtgcctgaacgccgccgcctcccgccgcatcgccgggaagccgccgccgctcacggcgagcccgacggtggtgaacgcgaaggcgcagagcgacaccatcgcctgctgctccagcacgacgtggaacgacctccggccgaggacccggacgaacaccagctccgacagcgcgaagatgaggccgtggagcgccgacccgagcacgtcccagacgagccccagcgcgtactgcctgcccgtgatcccggggtacctgtccgacccggagtccagcgcgatgatcaccacgccggcggttatgacgacgacggcgttcagcgacgacagccgcagcctgttcttcgcgatggcgcagccgaacagcgccgagaacgctagcgacgacgcggcgacgagcgacgccgtggacgccgggaggtaggcgtaggcccaggcgtacatgaggttgtcggcggcgctcaggaggccgagcagcgcgtaccaggcgcacagcttcggcgacagcggcgtcggcgccgccttgccggcgaggtagcacggcagcaggaggagcgccggcagcggccagccggcgacggcggaccacgacaggatccacttgctctgcccgccgttgttgtagtacagccgcgacaggaggctcgacgccgggaacgctgtgagcatcgcgccggcgctgaggacgagcagcagccagaaggacatgggcttgctccggtacgtctccatggaggaggcaaccatcgctgctgccttctgacgcagagagcgatctgctgcctctgatgaggtctcctccattgctgcaacttctactgctgttcatgacagggacaaatattcagaagatttcatcattatctgaataaaattcagaagatttcggattctgtctacagctccagcttggtgaagaggagtattttctgaacaataacgttgtgttaacatttgaaaacatggttagattggtagtaactccagaaataaaacagagtgaatggttgagtgcctagagatttctgcaatactagtatgatccaacaaaataaatttcattattgctaaataacaatgatgttgtttggatcccacaaatccaaaattattttaaaaaaacaaaatataatattacaattgtaccatacttattaatgttttcccaccatatttattaattcttcatgacaattgtaccatgcataataacattattgtataaccaaacaaaccttcttttgtgtttgtttccaggtctgcaaaacttttgaatttttttttggaaataatacgattttaatgaaaaatcgtaaaaaatatatgtcgattaggtgaaatcgagcaccctatcgaacaaccgtagttcgataggacacctatcagttcgacaggtaataaaataatttaaaaaaagagaaaaaaacattgtagcatcactgtagcatcatccctgtcgaacactgcctgttcgatatgtcctcctatcgttctttgcttgcttgatatgtctctgcgtactttttaaatttttttttcttgaccaactaccttgttaaattgccacagttcgacaaatacccgtcgatatgcagatgttcgataggttctcctgtcgaatcgtggttgttcaacagggtactaaacttgcgatttcgcctaaccgacctatatttttgcaattttccattaaaatcgtattatgtaaaaaaaaatccaaaactttcggcatgcaggagacaaataagaaaaaaaaatacgcgaaaatctgctacaggaaaaacacgcacacaattgtcatggccccgcaacaacctcaacaattctcatggcacatcagagtctccaaaatcaagaaacaaaaatagaagagttgaattaggactgcgacatcaactttgcaaagggagtcagcttcaagtgaaaaaaaagaagccttttttttgaagggttgttaatttttacagtagctaccaagctcaagaagcagtaatactctactcccaaataactcagaaaatccttcccaattgaaggtacacacaaaacgtagtgccatggccttcttttgtcctaaaactacgcagatgagcacgaattattcacaccgacgatgagaattggtagaatcaagggaggaagctcactaggttttgctcggcaattaggaaaaaaaacagagaagaaaagaagaaggacagacctgacgctgggacctggacgacatgatgatggcgtccctcaccgtcgccgtcgccgtcgcggtgctggttcctctccatctgccgccgccgccgtcggtcgcggagtcgcggacagctagggaggaagctacactctccgggtctcccagagaagacgacgatatgattattgatgacttgctggaacagccaagccaacagacagcctcctggtgatacgtctacgaaaaccaacctgaactctggtctggttcgtgcacgtcgctcgctcgctcggacgaattttgtttatctataaataatctggtggtcgtagtggcacaaatttttcatcaaagtacggaagtatatttaattatggaaggagaattagtactttattacccccgtttccactgaagtgttgaccgatacggcgcgtttcagcgtgaagaaagggagcgcttttttttgggcgtgtgtggtgtccgggttgggaagctgcccactccacaaagaacacgcgaaacaactgaaaaaaatgttacatctctgaatctcacaaaaagcgatttaaaaccaagtagtactagttaactaattaaggtcataccacctacaactttaattatcatcatcttatataaggaatatcacgttctttgtgtgacgcctggtaaacaaaataatataatataattacaagctgcaactcacaaaggcttcattgcttctggaggtgcgttgttttcgtttcattgagctggttaatgatcaggagttggcaggtgacgaagctttggaaaaactggagtaaacagtcatattatttgggaaatcaaacattaattaaaaacagtcaggcaacaagcccactatataaaatcatatcagaaacaggatggacaaaacagcaacaacaaaattaggatttcccaacaaatatggagagaatgaagtatttgacagatgtactgtatctagagagcacaggacacagacagacaaccataatagtgtaaaatcgctttgcctcttctcaaaatgaatagtatccgacttcagagtggatatgatacatggtttctagcattctcttcaatacacagctcagctaatgatgctgcgaatgtgcaaataaacacctcaactagcatccctctcttatctctaaactgactgaaaaagaatcacttgggtaatgtaataaattgtgcctgtctatttgtcaaaaatgtacactatacaatgtaaataggaaatttaagacagtttggagatcttgtgttgcctggcatcatcctgccatataaatactagattcttgtgaagcagcaaattatcacgacctgtggatctcacccatatatgtgaaaataggaattggtgtatttgtatctgactctgggggataaatatatgttgatatatgtcatctagcaagaggttcaagctggacctccatcacaccagaaggacttgattctgaattcctgtctgtactgtcaggatgcaaaagatcaactgaatcgtcttcctcggtgttacctaacacccagtgccctctagagcttgtgtcgccgctcctccgtttgacctctttatactccaagtaaagtgttataactatagcagaaagcacccacagcatcaaggcccaagtgagctcctctacattctcgctatcatacctatggcctaaatgcttcattccagtgaaaagtgccacaattccgactatgattgccgacctgcctgtgataacatgaaggtattcccagaggacacgattccaggatgaagcctccccattagctggtctcttgggccggaagtaggcatttagtggctgaagacctgccaacagcagagccgtgacaccaaatttaacatgcactgagctgacataaaaacctctgagttcagctgcagcgaaaaggacaccaaggaacattatagcaattcctgagtattgcagatagacatgtatttggtaccacccgtcacctttcaagttcttcaaataccgggcagccagtattccaccaggaagcaagatgccccaggcaacaaacatcataaacccatgaacagccagaacaggacgcaagtcctgttctgcctcagcagaacctctcaacaaaagcacacgtatggggcgactgcttgtgatagaatgcatgttactatctgtaagactgttacctgaccagcttgcacccatagcccaaacgaccttaaggggcgtggttggatcaataatgttcttacactctacccttccactacaggaaggcctaagaggacgagtaaactcaaatgtaataatgccattttctgacctacacctgacgtaggttaagttctcagatgttgggtggatgcccgctgcactctttccatcaatccagtaactcttgactcgcccaactccatcattgccaacccagccaacataagcataactgttcagcatgccactcccgaacccaacagcaaggtacccacttttcttctcacctcgagctgctatagatatagaatcatgggacagagtccagaacagagtaacctgctgatcatccaaaaggacgctgctattatacatgtcactaaggcctccatcaacaacttgaactttccaacccatcttcggttcatacaatgactggtagtagactagatcaggtgtattccgatcaggcagccaaagcagctctgtaggagttgctggtacaccatgagcatcccggctgccagcatatatgacctctgttttattccgcagtgtagcattccccccaattggatccgacgtgatgtaaagtgcaacatcatgcccagcctgcactgagaacttcactggcacacctctctcaaccttcagcagaggagcctccttcttgttgatgtaaatcaccttgtcagggtttggtgggtttgggtagcggacggctggagcagatgtcaccaccaggggtgtctttgcatccgcgatgatcctctcctgatcctccttgttgtcagcatccaatggtccgttgcagctgtccaccgtttccgacaaattcacccttgcaaacccataggttgtgtccctcggccccccatggttctgcgggaggtagtgtggcctcagagtatccggcggccgcagcttcccaatggcccagacaaccgccatctcctccgtggcactcaccagcacatcatacttggtatccccagtgtcaagcttcctctgatacctcacgaaagacactccatcccgccggtgaccgtacaccagcaatgaatcattcttcccctcatcataaaccttgtcagggcacacaccagataccggcgattcatcggtccccagcgtgcactcgctgtagtcggttatgtagtagtcctcggcgaatggcataccttcctcggtgaatccggcgacggcaacatcggaatggatcatggcgggagaattggccttgggatcagcccacccgaacgccatgtagtactcggagcccacggcggcctcgaggccgatctcgactgtgccggcggaggcattgagcgtccaacggagacggtacttgttctcggcgagagggaggcagttgtcgaacatggtgggaacaggctccggcgacggcgagggcgaggcgacgccggaatcatcggtggcgttggaggcggaggcggaggcggagacggggaggaagacgtggccgaggtcggaggaagtgtcggggtcgaagagcgcgaggaggggcgggagcggggcggagaaggggagcaggagggtggcgttgcggaaggtggagttgagcgggtggggcgagaaggcgcggcccgcggcgaggtcggcgagggagtccccccgcgccgcccagaagcgcgcggagggggaggccgcgaggaggtcgaagcgggtgaggcgcagcgcgcaggagtcgtcgtcggcgaggcggaccgtgccgcggagctggtgctgcagcatggtgaagtccgcggcgaagggcgcggtgtggttggcgtgcgggcacacggcggccgacgacgacgccaccagggccccgatcgcgaccgcgagtacggcgaggcggagggcggcggcggccatggccgcggccgcgggggagggatcgagatctggagaggaggcggcaacgcgtggagtggagggatctggaagcggagggggttgggttggttggatgagttgagttgagttgggctcgctcgcttgctcgcggctgcggctgcggcggagtggggcgaggcgaggcgagcgggcggggtggaggtggggtggccgagatccactttgggtggtggactgatggaggccgtgcgccgcgtgggaatgtgcgatgcttcgtagggaaggtcggaaggaggcagtcgcaaaccacttgaactgttaagagaagaagaccattttatgttctctcgagaaactttgaccattttatgtcctatcaacaaaagtttggtctatctcaaaaaaaaaacaaagttttggtcaatttatttgtttgtttgtttattgttgaaactgaatatcgatatcactttttacagaatgtagaaaaacaaaaaaaaaacgaaagtgataaattcagtgagcacaaaaatcgacagtagattaccttgagctagtatgtgtaaaaaccaggaagattttaatttctatatcatcttcagtcggttattgattttgactctgaggctgccactcaatttctcttatccaagttttagaagatgactattgtaaagcaaatggggtagtattaattggaagcattagctaccgtggtacacatagtatggtaactccgaaagtattggttttgttcaacatagcaatagacgtagatcattcttttgcgagagatgttctgtggctttgcacatgtcatcgtgctatgttttgtgacactagaatgtgcgatgttagaccctggtttaaactagtgctcctatatgatattgcctgtgggatgattatttgaagggcaatgcatgtgcgatgatttgatggttaatttgtaaaccttatttgtagaatagaaacggattaatccactgaataaattctagtgctcctcttgagaaaatttgaactcatgtgtatgaaataaaaatatccctaaaacaatgtaatgtgtctcaatcatggtatcatgaacccatcattcaaattttcactcgagatcgcgatatatgaatggagggggaaaaacctggtaggctcatttggcagctcgggttaccggcccattccccggatgaaaggcccacgggctaaattacacgcgcgtttggaagcccacaacagtcgcgtccacgcctgcgtcacgccgcagccgccgcgagatgccgccgccggccgggccgccggagtaactccggtaaactcaatcgattgctttggagcaaaacttgggactgactacgtgaaagattgtctgctcaattgaaaaccggtaaactctcacccggatctccatgaattggattttattttttcaggaagtaggaacttctgtttttagattggcaaattatgtttgttcacatttattagtttttatattaatattatattttcaagatgataatgaacagattccatgtagacaagttatattgctcctttttttttttgactacagacatcctatgcttggttagagtaaatcctctgatagccctgttttgggctgggacttaatatgtgaaaattttgccaaagctacatgttacatgtatatttctgtaggccattaaaaccaactggtttgagtcagagtttcatatactggaagcaatactggatttacttgataaccaatcactggaaacaatactaaaatgcatgaatatagaaggaaaatcctaaatttgcttaatattttttttctaaaactaatatctggtaactatccaggaattgaattgaatctgtgctgtggaaaactatagtcactgcaatcacatcaatactattataaatagtgtaattgctaggttatcatggcaagtttatttggttgttttacatcaatgaaaaagcagtgcaagtttttaggtcttctctttgtgacaatatatcagtaacatcagaaattgagacattaatcaggtgaacttgttttattttttttttgcagtcaccactaaaatgtaatatcagtgccgcatagaagtgatcatgcatataataagaaattgaagaagagagctatggaacaagtagatcttgtcaactagaatcgctaggtggtggttctttttaattgtttccccttgatagctaacctgtcaatgttgaagtaacattttgtatgatcgttcgtatatgtaggcctatagccagctccaatacctttttttttgcactatatgtggtgcatttcagcttcatgccctgaccattaacatgatctggttgtatgcccctcctgattgaagctagtgctataccaatcaactcccaaggattaattcctattgccactcgttggttccagtccttgcttgttatggtgcatagagcaaggtaatcagtctcataccatctgcttggtatagaactgatcatcatgcggagttcgttcttcgattcaccacttgcgctgagtaacatggactctgaaaatcatgtcaccaaattgggttattttcaggcatgaaatctgtcgtcaatagatattagaaggctgcatgtatgtattgtttgcagtaatcctgttagaacagaaattcttgatcatgtactttagtccgcatgttacatgtgcagtatagaaaactattttttttcttctttcagctagtacaataatggaactgtctgagttgaacattcaaacaattgaagttgatggctaaaatgttgtatcagaaatgtgagatgttgagaggacttacaggcttgcattgcatatttaccaatgataaatgataactcaaatatttattcatattcttatactgcctttctttccaactgaacatttagaacccaaacatgtacatgatgtacattttgcgtgaaggttaacaagcagccatatatatagctccaactgcgaggatataacaaaatcttttcacccaaagaagttaacactgcatttattttttacatgtatatttatttataacatgtaaaaactaggtcctagagacacttgtaacttgttgcacatgtatgttcatttacatgtgaatgagtttattcagcgccgtgttttctaccgaattttgtctgaatttggcatttgtacaccgtgacaagctttatagtgggacaaaggtcgctagctggcaagggcaggattcgatggattttttgttctccaatcgatgaaagattttaaaggcattctttgcttgtccaggagataaagatagaattatgccgtgttcactacattgctgatttcaacccaacaaaacttgataatttggtgttatcaaaatttaatagtttaacaaactacacaagccttaccgttatcaacctatcataattttgtaacttcgaaagttttcgctcacagaaattctgagaatgattgacgtcggtcgcccggcgcgggggagccggatcgggcgctcccccctcgcacccctccccccacgtgtgggcccgcccacttctttctcatttttccacaaaagatgtttcattcagtgtatttataatgtttcactatttatagatctaatgttgcagtgaattaaaatactttttttaaaaaaagaaacccacatattttggaaattctccattaaaggaatttggtttattttttgttccaccaaaaatgtttcacccagtgtattaacaatgtttcactatgtatagatctaatgttgcagtgaacaaaacattccattgcaacaaaaaaaacctacatattttggaaaccccctattaagggaatttagtttatttttttttccaccgaaaaatgttgcacctagtgtactcataatgtttcacttatgtatagatctaatgttacagtgaactgaaacattctttcgctatttactgaaacattatttttatatagggtgaaataacacccgatttaaatgagtgaaacattttcgatctacttagtgaaacaattctgatatatttgttggaacatcatgcaacatttaaaaataattcaataataagctaaaaaaattcatcggaatatattcatgtgtggtcttattttgaagatttaattgcaacgaatttaatggtgcaatcggatcatgatttggataagtaatttaagagaaatcagtttaaagtagtttttgcacgtaaatcgggcgctgatgtcagcgcccgatttttctcaaattcgatcgggcaaccgatcggtaggagtgccccaaaaattccaccgaaatttaaggctacgttcgttccccagggtttccaactccccaccctcattttcgtgcgtacgcttttcaaactactaaacggtgtgtttttttgcaaaaagtttctatacaaaagttgtttaaaaaatcatattaatctattctttaaaaaatagctaatatttaattaatcacacgttaatgcgaacatcgttttacgtgccggatagcgaacagagccttagctctaaaccaacttatccaatgctaccaaaatttagtatcatatcaaaatttgatattgccgaatttcggtgtggttgatttttcaataaaatagaaaagtccttaatttagacccagaagcttcacacaatctaccgtttgaatatttgcatttaccaaagttttcaaaaaaagaaaatttgaatttaccagcatcggctgcctcgccgggtcaaacgacgccgcccgcatgtgcagagccacgtggtcaaacgacgaagccgacactgtaaacataattacacgaaacttgaaggtccaaaacgcaaaaaaaataaacttctatccgataaaaaccccgggaaagatccacccgacgccccaagctttcttcctcctccgcgcgcgggtcgtcgccgtcgccgccgcccccgccgcatcgccgccgccgcgctcagatccagacccctgagacatggtctctcgccgagcgatgcgagcgccggagatgctccggtggctcgccgcggcggcggcgctcgtggctctgctcgccgccgcgccggccgccgggttctacctgcccggcgtcgcccccaccgacttcgggaaggttcgaatcgctgctctgatcccatccccctcttcgtcgagctaggaattgctgcgcgcgtgctcgggtttggatctgggtcgttggtcaacggggtgggggttcggttccatggctgggatgggatgggatctcgtagatctggctttgggtgttaggtactcctgattcgattattggtggtgggatatatatctgagcttgggattcacacggttgcaccaacaattcgcttgttccaaatacttccatttggtccatttggagtgtgtaggttgcatgcatcatcaaactcttgtagtaatggtggatttaagccaaaaatagctagtttggttgattttgtataaactttgacatcagattttggttgttctgagtagtaacattaaactacctctcgttaaacgtgtgtgtttccaacaagtattgtattggaataggtgattctgagaaaatccattggtttgaaccaaagttaagctcaataaacggatgtgcactggccatccgagccaagcagaagttccgtctcggaaaaaactcaactcacagtaattgcataccacaagatcatcttctgaagggttactcattaaaaatccattgccattacactaaaagaaggccatcgcttaaatgatctgaactgtaattctttgcttgccttcttttcctctggtgtatctaggtccagtggttattccagcttatctgattttgcctatggaattagatgatcacaaagttaacatagaacaatgcatgggcactggtttctgaaattgggttggtgagtcacccaataatgcattggttcactgcttcatcgatcataattataactattgttctgcttagttcttttccaaagaagattcatttgttagatcagactggtttggctcatcttcctgtttctttgcacttgtagtttcatgtgtacacatgccatgccgcatcttgatatgttaagtccaaataaatgttacctttaacaaggaatagtttagggcatcataacattttatttgtggccaggatttcccttataattgcctttcctgtttatctacagggtgattcacttcccgtgaaggtgaataagctgacatcagtaaaaactcaactaccctatgcatattactcccttcctttctgcaagccagaaactatcgttgacagtgctgaaaatctcggtgaggttcttcgtggtgatcgcattgagaactctccatatgtggttagtaccgggtaactcatattttgaagtttatgtccttgaagtaatatgccttaatctctgtttgccatcattctttttgtttgagctacagtttcaaatgagagagcccaagatgtgccagattgtctgcaaattaactgttggtgagaaagaagcaaaggagctcaaggaaaagatagaggatgaatatcgtgtgaacatgtaagggatatataggtaatgttgcacttcaagtcacagtatcttccaaagtgacatgatttgttttgcaggattcttgacaatctcccgctagttgtttctgtgttaaggcaagataagaacattgcttaccaaggtggctatcatgttggtgtcaagggccagtacaccggagtaagttgtgcactcaattgatgcttgcttgaccttctatttattcatatatgctctggattaacaaactgtgatatataaatgtattcacagagcaaggaagagaagtacttcattcacaaccatttgtcatttttagtgaagtaccacaaggacgatgattcagaactttctagaatagtgggatttgaggtcaagccatacaggttttctttctactttgtgctttgatgttttacttgcatatgctctatataaatgagcctaatgcatgtgttatttatatactgttatggcagcattaagcatcagcttgatgataaatgggatggcgtgaacactcgcctgagcacatgtgaccctcatgctaacaagcttgtaacaagttctgactctcctcaggaggtcgaagctggcaaagaaatcatattcacctatgatgttcactttgaggtactagttttgcatgttttgtttggattctgtttcccccttcatgtgatagttgcctattctcttaatgttaaatttattgcaatgatttccattgaatctttttccctcattgcaggagagtgacatcaagtgggcttcccgttgggacacctatctgttgatgactgatgatcagattcactggttttctattgtcaactctctcatgatcgtgcttttcctgtctggtatggtcgcaatgataatgcttcgcactctatatagagatatctctagatacaaccaacttgaaactcaagaagaagcgcaagaggaaactggctggaagcttgttcatggagatgtgttccgccccccaaccaactctgatttactctgcgtttatgttggtactggtgtccaattcttcggcatgctgctggttacgatgatttttgcagttctgggtttcctttctccatcaaatcggggaggattgatgaccgcgatgcttcttgtctgggtcttgatggggttgcttgctggttatgcttcttcacgcctctacaagatgttcaagggttcagagtggaagagaataactatgcgcacagccttcttatttccagggattgcttttgttatcttcttcatattgaatgctcttatttggggggagaagtcatctggtgccgtccctttcaccactatgttcgccttggtcctcctttggtttggtatctcagtgcctcttgtgttcgttgggagctatcttggattcaaaaaacctgccctggaacctccagttaaaaccaacaagattccaaggcagatccccgagcaagcttggtacatgaatccaatcttcactattctaattggtggcattctaccatttggtgctgttttcattgagctattcttcatcctcacctctatctggcttcaccaattctactatatctttggcttcctcttcctcgtctttgttatcctcatcatcacctgtgccgagattacggtcgtgctctgctatttccaactgtgcagtgaggactacatgtggtggtggagatcttacctcacttcgggatcctcagcactttatctcttcttatatgctgctttctacttcttcacgaagctgcagattactaagctggtgtctggcatcttgtactttgggtacatgttgcttgcttcattagcgttctttgtgcttactggtactatcggtttctgcgcttgtttctggttcacgaggttgatttactcatctgtgaagattgattagttgcaacactacagagcacagcatatgtttttaagccttctgagtcatgggaattgtatgttcgaagtggggatcaatcccctgggtttttttaaagaaattttcagtgaagttacattttaggttttagtttatgaacaatttatgtttgttatggctaaacgatacatcttactgtagtaatttggagtacaagactacaaggatagaacacattgtgatggagttgttttttggtgaaatttttttaatggactggtataagaattcaattgattatgaactgcttgtactctaatcaatggtattattgactctggcaccagtatgaaatcaatatgatgtaccagtaacaatttaatcactgttatattattagaatgaaatgtcccttttgctttcaagtactatccaacctgggtgttggtggtgtgctctgggtgtgtgacatttctcccatttttaattttgcttgtggttggaactttggaggcatcggtatgaaattgctccgcattctgtggcatgatttctcagaccgtcgggagacatggaatcaatatcaacttgccatgatcaatgtctttttcagtcttgtcgtctgagttgccctgccatgtgggcgtccgcatgttttcacgttccacggcgtgtagacggcggcgacaagctggggccagggcggcgtgtttgccgccggcgtcgagggcggtggcgcgtgatgattcaaatttcgcccaatttgcactaatccatggtaccttgttcaggccaaaggctgaacaaaaaagggtccagatttctgacacgaacggcacataaatcaaatcaaatcgcccgtgcttctctctcccctcctcttacccttccattggctccctgggttgagctcggcggcggcgcaatggcgtgccacctgctgctcgtcgccgtcgtcgccggcttcgccgtgagcctcgccggtgcgacggaccatatcgtcggcgctaaccacggctggaacccaaacatcgactactccctctggtccggcaaccagaccttctacgtcggcgacctcatctgtaagcctcctctctccatctcctcctttctttcgctccagcagcaatgatttccgacgacgagatgcttgtgcttgtgccggcgttgcagcgttcaggtaccagaaggggacgcacaacgtgttcgaggtgaaccagacggggtacgacaactgcaccatggccggggtcgccggcaactggacctccggcaaggacttcatcccgctcaacgactcacgccgctactacttcatctgcggcaacggcttctgccaggccggcatgaaggtcgccatcaccgtccacccgctgaagcacaatgccaccggcgacggcgccaagaaccacggcggcgacggagccgcacaggaggccgccgctgccgccatgccgggcgccgccgtgtggatggcagtgctcgccgtggccgccgcagctgtcgccatattgccatgattaattaatctctgcacttgtgcttggaagaactcaagaacattggcacattgtgtgttttgctcgcatttttatcagggacttgattaatgtagcaccaaaatcagatttatattcaagtattaattcagcaagaatattggttcatgatagagcatcaggattcaggaaaaaatttccaggcggagaaagcagcgacaggatggagcattggaaaattcatgcatttcacacaacccagttcgattaagcaacatggcatgtattacaggttgtggtgcaagaaaaagatgctagttgaaagaaagaacaaaccctatagtgactgtagaatagaatcccttttcttatatacaccacttactatcctttttgtctatcaccggttggaactccatggttcggtctcggcctgctacttgtttggatcgcttgggccatcatcaagctcgctgttcacaaaggtaagggctcaaattctgaaaggggaactcaggcttttacaatgcgagatttcgtgatctggaatatggtttaggtgcgacggttaaaggaagctcactttggtcgcatctcttctgaagagacagattgatttgtgcttgaagtagcagctgacttgcttggcttcttgaacttgactatgatcactgtcatattatcacagccatcaccaccggatacaggtgccaagcaatggtcaagcaacttctcgcagacagcagataggctatcctcctgtagttgttttcccagtaaattaggaaaccataacataagcatattgcaaaacacaacactatgaactatatatttttagtgcataatgtaaattctgtgaatatcagttgcttacagtgttcatttctttgtgaacaaagtccaccacttcttgacttgacatgcaatccctgtcataagataaatttacgtctcagataaactatccagtgaaactacaaagaatacagaataatccatagaagagttgacaaaagatctagcaccatttcaaaataactgcaggtataaaaaatcagcttcacatctagtatacaaagttatctggatgtttatgtatctgggatccattataaaagaagttacatatcagcatctgcacgccacacagtgcactagtacacatcatctaaaaagaattgtgaattactatctccaagggctgtccaaatggtttaccaatagaagatgatgtcatttctttggacttaccctaattacaactattgtttctttttactaaaaaaatcaaatctgctaataaactaaaactgttgttggaaaattgagttgtcaaaaatcagcagcagctacaccagatggtaaaaatagctaaaattgtttatctcaataagatattcaagagagaatgattggtgcaaaggacataccatatgccatcacatgctaaaacgatgaactcatcatcctcagaaagtttaacctgagcaagccgaataaattccatgttacaaaaaatgttgtccaaagcaaatacagtgacagaaattgtcaacaaaacccactgtgtttaattcaggttcagcagtgacaatctgtctctcggctgggagaaattcattctgcttcaattccatatcccctggtggaaaagcacaaaaggataaataaaaattatgcgtgtagctaaggaattgtttttcgatgagaagagagggtgctacctattgcccttgccaagttcaaacttccattgacccgcccagcaacaatgaaaccaccagcattcagtatcctctccttttctgcatcaagatctggcttgtgatcttttgacaggtcataagcctatgcagaagactgagtcaggacacatattctaacattttcttcacaaataaaaccagagatatagaggtctgactgacgtactcgacccttccttgagagcacacaccgggaatcaccagcatttgcaacaatgagttcatcatttcttatgatagccacacaagcagtgcttccagatgttggcccaggaaaatgagaatgaggaccctggttaagtaacttagttagagcagtttagttgaactctacattcactagaatttcacaagaacagtttctttttaggaaacaaggtcatgtataaaaatatagaactctggagctgatgtttcgtaagttacatatatgctcagtgctaacgaatggtgcatattccctttgttttccttatttgtacaaacatattttgtaataatgtatttcaccaaatgaattttagatcacatgttatcatgcttaaaaataactggacatcaccttctaatataaactagtgttgacctaagtttcagatgcaacgatcataggcactcctgactcaagagcacttctcatattttcaagataactactagagagacatcccttaaggatttaaatgggtattttaagaaagacatccctctctgcagaaaccctaatcacataacaagcaggaccaagcccccttcaccaatccacatacttaagagcagcaccactcaagacaagcctctttaaatatgaattcagaattactagcatcgaatcagtttttagtattttatcccgtcaaatgcttgttctaccaaggaataactctgaagcatcatgacatcaaagatggcccctcaattccatcatccagcaaaaatggttggtaatgaaggaacttttagaatagcagttttacctcctcagtccaagtgtcctcaggtttatctgactctccaggtttcggggaccatattatgccttctaacatgccagtaaacttttgtcccttgtcccccaattcagccagttccctccaccccctttgccctttcatcatctcatccattctgaaagggtaaaaagcggtgcagactcattaaaaccaccaagcatacgatagtttcactgaaaagcacttcatgttcaaaagaggtacatgctacatacctgaaaaatgactttaagacagaagtagccaaatcaccagatgaataagcctcatttttcagtacttgcaagtgtagatgtttcgcacaaaacttagatactgccttccctggaattacaaaggacagtttgtcaagtcacaacataaagagttttgtccatgatgtggataaaaggacaacatagaagcgcattaagttttggtttcaaaaaaaatatatgaaaaagatgaatcaatttaaacctactcaatgcacttctaccttttacaacgatcaaaaagggaatgtgaaaatgttggactgtttgattgttatttccctgttaggttactggactaccaaactcaacacagctaagtttacctaatctgcatgaatggatgagatgatgaataaatgaatggatgagattatcatcaactcaacacagctcaggttacctaatatgtgtagtttgttaggtgaaagttggcgatgcttaattgaacttgctaaggttatgccatcgaaactacagaggcaccaatcatttgcaactagtaatggataaagttgtaagatgatattaattcaatcaccaaatggtaggcattaaatcgcactcgtctttgtttagatctgaagatgcaacataatagcgagttggacatgaacagaaaatcaatgaaaaaacttacctccatggccatcatagacaccaaaaaaggatgtgcattcgtccaggcgtggcagggcagtgtgctgcaatgtaaggatgcactcaataagcgtttaaagaacaggtacagccactaattcaatctaatttcacctgaaacggtccctaatgtcatgccaaatcaatgagaactcaatgtcgaacggcactcctagtgctaatcatcgtgatcaatttatctgccctagtatcggcactggactccaaatgcaagtgacaaggcgcaacaaaaggctaccgtgagtcttatcattggggcaacagaacaccaccattggcgaacgcaattggaatcaatccacgtagccagttccccggaacaacaacttttggcggctaaccaatcaagcaaatctacgagagacaatcctgacctaaaaaacagttgcgaattccgggtcctagggtggtggcgaatcaaccagaaagcagaagccaacaataatgtaatgtggaaggggaaacagagggagggaggaaggaaggaaggaactcaactcaccgcgtcctccatggtcgtccgccatccctgcatggatgcgaggccgtagcggaggcggtcgttcccgccctcgccggagtacttctccgtcttgggcgtgctcaggtacacccccatgtcgccgcccaaccgaatccccccaaacacccccctgcatccaaccagcaccgttattacaaacgcaaaccccaatcacaatcgcaaaaacagtggcgctcccccgatccccgcgggcgatcttcgccacggaaccaaacatcgcggaatcgaagcaggggatgaggagtgggaggaggagggtactcacgacgacgacgacgacgagggaggaggcggcggcgaggcgaggagaggcgaggtgaggaggaagcgaaggggaggggaggaggaggtgggcgagtatttgtagggggcggaagcgacgggaagaggagaggagagccggagaggaggagtcggaggcggaggcggaagggaaggagggagatgaggaggggtgggggattcggggaagattgcgtatctcctttttctattcaccgccaccctcccttctctctctcgctcgccgccctgttgcaatgccctctcctcctccggtagatcaccgatccaccgttttggtggttatcaacagatacatatactcctgcctcagaatttatctctagccttttctttcttttgaaatagagaatttatctctagtaaagaaataatttcttgttttgatttgtgcttctttgttaaaatatatctgcagttattacatcacgatcgtattatcatcgaataactcttgtgagaataatctaatgtttttaacatgagcatatagttgtaagaattaatctagtgattgaatagtttgctttatttacttttccttttcttatatcgaagtttacttttacggtatacctataaatgattattgttaattgcaattagatttgagccattactgagtatatatgatgaaataatagtattctcaaccacatccatagtagaggctttactacattcgaattagattgcagccgataattatagttaatattttggttttttattacaattcaaaggcacatataaaatgaattaaatataaaaaaataaagatggattttgaaaagtatctaagaaatttctatatataatgtttcttaaaaaatctatttagttgcttaggaaacgtgcacataataattcagaagctaagaatataggttaaatcgtggcacatttatcatggcaactactagtttcttttggcaacttcttaggtgtactagtttctcgtacaatactcacacgtttattttgttccataaaaacgaaacattatgtactttatgcagcttaattaatagcttaaaacatgaatgacattgatccaaaactaccttccatcatcaaattgcaatgctacaaatgtgagtatctaccttccattgtcaccttgtgcaaaaagctttatctattcacgtggcacggaaaattacttctcatattggatgaacggaaaagtattcattattaacctgtggatacacttctgaacgaaactctgttcatactcgcaaggatcaaacggagtttgacaggatatatagtgattatctcaccgtttgatttgtcaccatcaaactttcaagccccaggtggctaaacaccacacatcaagatagattttttcttttctactttctaactgatgtctcaaaagtattggcttcagtgtatgaacaaaaatttacagctgggatgtcaagctctctgaacatctgtcaccctttgtttgattgatttcttggaggataaaattagataagctaattgtagttgttaagcaaaagcgattagatggtcacacatgtcggcatgtcaaggctacacagcctttttaatggcggcaaaaaatgcaattatgcaaacatcacaatgctttgctatcccactgtacttaacctccataatatataattaaggagaccttaagacagccacacgtcagctaatctccaacagtattctactagtatacattattcttaaagggttaattaaagtcggtacgctactaatcatgccaggaggatactctgtacgtagtatgctcctgtagcttatcataatctcttcagattcagagttcgtttttctctttcagaacaagaagattacggatcaaactcacatagctaagaacttcattaattatgttcctgaatcttcaccagaatcacagtacaatccttcatatatgcacacatccagccagccaattagagtaaagagatctcgccatttttcaggaatatttttctcctgatcatctgtcgcttttccagccattttttcagagttgagactttcagtttcagggtagttttaggttgtttcgtgtgtgcttctgcaggcagagctgggatcctggcatgtgttgccgtgttggccactaactcctgggagcctatggattaattgagccgataacattataataataatcttaaattcttaatcttaatcacgcagctcacgttgggtttgatggtacaagacgaggatcattcccaatgcaaacctgtctgtcagatttgttgtccctggatctcgtaatcttgtaatatatccgcgatcaaagcttttttagtgttcacgaaaaaaaaaatgatctgtacgtgggcactttattggacttagaatttgacattgttatcgcagattgatttgcatttgaggttgctaaatacggtaaactgtgcgattagcatgctaattaagtagtcatatgatctagctggcatgggattagtacgggtagatgttaatgcgatgcttttggttagtttacagccaattggggctcctggtttgctaggctggtcccccaggggtgtacgatggaatcggggacaatgcattttaataaaattaattaaaagagggatatgatttgtgtttttctaaacaaagaggaaaagaacaaggagagaatccgtacacgataccggtgtcgcgtcgatgatactgcaggctcccgtgtccggttttgagggtgctgagctaatcaatcaatccattaaccattgtcagatatcgttttagttttgggttatgtcgagcatgtctattttaactattatttcttataaattcgtatattctaatatcacaaagtttttatttagcataagaattcgtaatttatataagtcttaaaataaacgatttttcaaaagttaatggtaaaaatagacatagacatgtttaatccatattctttcacaattgaaacacatattttatttgtttttgttaacaagttttttaaactactaaacgatatattttacgtgaaaaactttctatataaaagttttttcaaatatcatataaatttatttttaatcttgaaataatcaaaaatcaatgaatcatactctatccgttatatattataaatattataagttgtttgacctttttaagtaacatattatagaaatacatttaatattaaatttgataaaactaatttaatatcgctaaatttttctacaaacttgataaaagctaataaaatttaattaggaaaaaatcaaacgacttataatatgaaatgaaggaagtccgtgctaatgatttctcatttttatgtctctatacttaatctttcatcggactcgttcaacgtgacataagttagattaaagatagaatgataaatcaatttgaaacatttggaataagtaattaaccatcatacaaatcatgattaagccttactcataaactaaccaatgataagtaattaaggctaggcgacgtgtcggcccataccccgtccgtcctgtaataatctcctcggcgcgacgccacgccaccgaccaacgcgacaaggcgagacgacgcgcacgcgacacacagccagcggaagcagcagcaggacgacgaggaggaggaggagatagcttagatcccgctcgcctctgatccccccggatccgatccgagatcctccacccatggcgtccggccggtgctgcacgttcctcgagatcctgctcgccatcatcctcccgcccctcggcgtcttcctccgcttcggatgctgcagcgtacgccgccacgaatcccctttcttgccctccctatctctctccttgcctccccgacgatctcccgctcgctctgctactgttcgtggataggtggatcggggggattcgttgtctcgtgtgcatctggtcgttagaatttcaatttcggggggcgaattttttgcgatctggtaggtcgattttgctcgcatccagtaataataattcgaggatactgggagtggttgcgaatccccgagctccaaacgctgcgctgccagcgctgaatcttgggtggacaactctcgatgtagctctgcttcgtgcaatggctatcctatgcaattgggcttcctttggtttctctctctaaccatttttcatctggagttcatatgaaagtgctactgtcggtttgtgatttatgatttatgttaatccttgcagtgtaagtaccctagaatttctggtaattatgcaatccctatctactgataactgatccaagagagtaggctgaaattttgtcacaagtccatataatctgcctggtgttattttattttaaactggttcttcgatgtattatagcgcatatattgtcaacttagtcatccccaggccaatttttatgctcaagtggaagtgctgcacaaagagcatggggattatgtttgaattttgactagtgataatggcatagttttcttgactctgctacatctgcctgtgttgatatcaaaagttaaaccataggcatagtccgaatgaatcagcgatgaacaagcttttttttttttgtgctgataacactactgacagttctgcattctatcttttccgcccctcgtggtaacatactaatagtgttgatatttattatgtcttaaacagatggagttctgcatctgcttgcttctcaccatccttggctatgtccctggcatcatctacgcagtctatgtgcttgttgctcttgactcagaccagtaccagagggaatatcatacccttgcttaggcagtccacttcaattctgtcgaaacctatgctctatccagaacagccaagttctgctgttgaattggtatctggtaacttcgtctgggttttttgatatggcgttgtgaatcttgtgattataaagtagaaacagtggttcgtatcaaggaggacgaggaggcacctagtcatttggtcgttaaatctccctattcatctgttttgtgctaaatgtataattttatctggatctcttgactccttatttcagtctgttaaatgctcaaactgtggtctggtctccattctgtaattttgattcaagaaaataagttgttgagggtaaatattattggtgtttgtatgtcaataccgttgcaattcttgcctatttcgtcatggaaacaatgggggtgattattttgttacaacgacgtcagtaccaccttatatgccagtctatttatactttgccagtgaacttcaatgtttggtgggtttcataccttatgcataaggtattcaagtgcttcaccaatctttgaagaccactctggatttttgcatgatggaaatgttctctgagaattccatgtagaaatagatgactttatcatacttgatctgtagagtactaacatttatccaggccttgtaggaaaacagaaaacagtcttagaaccctcgccctttttcaaaatatgatatgcttgtcacatgctgtaatgtgcaggaaagtttgttttgttcagtactctagtcctctgacaataaattaatcagtgtccctcgtttgatggatcatatcttgctgctgattgtagtaatcacttttcatttgatggatcatatcttgctgctggttgtagtaatcacttgatcctgtcacttgtgtcctctgttatctgcgctttctgaacgacatcttcatactgatgtcgaatcatagatggatattataaaatacatgaagagaatgcttgtttctggtgctgaatgttcgtgcccatgtgatattcagtgattctgttagattgtgaacgcctgatgaatagattgtgtgtagctgctcatgaagtttctttaatgtttcatttctgattgcaacgattctgtctgccctgctgtgagagagatgcccctgaccttccctgtccacttgactatgctgatcaggttgtgtatgtgcattatattcaagggtacataaactgtcgcatccgattctctgtttcgttttcttaataatgcagtcatccttaattgggttggacgttcttaattgggttagacgtcatcgttgaccaatacatttgctgtattatataaagatacaactcgttgaagagatatgaggtggatcaaagtatgtgattttagttctgaattgatataaaatgtcacgttcttggggatgtctgaaactctgaattgttgttgtatgtcgatccatcggtgcggcatccagaggctggcatgcaggtcggtatatcaacgattgatctgcatatctttttcataaaattgcatgtctcagactcagcatgctactctaccatatggaggcatggagccttcgtttctggaactgaaacggcagaaaaactcattagtcgtcagaggtgagaagaattcacgggctgcaggttctgggagctatgaacagcgtacttatgaattttgacagcaatcacataggctgtgttaagatccaaagtttggatccaaacttcagtccttttccatcacatcaacctgtcatacacacacaacttttcagtcacatcatctccaatttcaaccaaaattcaaactttgcgctggactaaacacagccatagtctacgtcatgatcagctttgtttcaatccattctggttcaggtgccccctcctcttcatttctgacttctgctccaggtgcccagttatcgacaaaggggacaaatgatctactgaatcgcagcaaaaatctgtttttcaactagttttgttcatttaaatttcaagagctattactcagaaccatggtggataactcatattcatgccaaataatgccttacacacagtaccaataatttataatcctggtgcaagtctaaattgtgatatcactctgactactactcctacagtcattttaccaaccttctcttttgtcacaatccctgcatttttattgagtattggaagctgaaactagtagtaccagtgtactaaaaaacattcggacttatcagagctttacagcttttattcaaagtttatgccactcatgaatttgttccatgggcctgtgaagacgcaatgaatgtaaagtcagcaattaggcgtctgaaattacatgtctgctttgtctgacagtcacaattatacgctcattattttccaaaacactgtgcacacatcttccaactctcattcagtcattctgtttccatgaaggcgtccagtctcttgataatgtctccatgaaaggcttcctatgctgctatcatgagtgcctcgacaccatcagacatcagtgctgcctatctgatcatgtttcattactgactgtacactgaacatgcagtgtttcactggtaccagctggtattgtcaaattcttttttcttccctgaagaaacagtatcgtcaaattcttttgcatctccttaactgaagtccctctatccaaaaaaaaaaaaagcttcttggaatgaatccggacaagtgaagatggttttttttgacggagagagtacgttctcccgaacatgagcagcaacatgactgcatcctatagtttcagtgagagaaatgtctggttaagtgccgtgttactatttcatggctcctcaaagctggcagtgaatgggaaacgtgtggttaaacatggagcagacagcagcagagtggtcggcaggtcggcaagtgtccctctactgctgctgctgctgctgcttgctcatcatcaagattcaagaggagcttgacctggacgtctcctctgctccatgtttgtggattgatcagtgggcaccactcaaccatcataatcctaggtaggatttggaggatgagtacactcttttgtgctcaccactgacttggatggcatattctccatgcaactttaaagtcctttccgttagggcaatgcatatggttttgaaaatgtggtcatcagttgattcatcatccttcatctagagaatttgccaatttgtatgcttgggctgtatagtaactatgacatgatctaagattttgcagatatcacacatagataaaggccgtgtttagttcacctccaacttccaactttccatcacatcacatcatatccaaaattttcctacactcttaactttttttttccaaactaccaactttccctaaacttttaactttttttcaggaactaaacacagccaaaaagagagagaagagtttaaatagtggagcaatcaagtgggcattgtttatgcccttgctaattgctagtagtacaaactaaaatagccaatatctgataatctgaacatgagaacggctgccccgttgtgtttcaaagaagagagttggagtacatgaaaaatcttagtactatactaagtacaaatgaactgtacctgtctctagtgtataagttttgatgggattagtacactgtacagtaatcacatcgtaccacaagccaaccctactgattttaaatccacaagggtaggagtgcatgatcagactcaaaaactctggtgagcagtgagctaaataaattgcactttttttttaacattaaataaattgcacttgtgcacagttctgcacttaatatgcaagcatcagataactgcaactagtcttgcatatacggtgatgatagtagcagtacgccagtaccatatgcttgactttctctataattattgacttccacttaactgccgtaggccgtagatgttgcaagatcccactaatggtcaaccagttgaacagaacaatgatagaggtagagtacagtagagtactactagtatactccctccgctatctatatctattataagagattttaacattttacttacactatttgactattcatcttatttacaaaattttaaaattattatttattttgtttatgacttactttattatctaaagtattttaagcacaacttttcattttttatatttacataatttttttaataagacgagtggtcaaacatagtatgtaaaatatcaaaatactttatattagggaacggagagagtattatctctgttaaaaaaactcaatctatctttttagtactgcaaatctgaataattctttattcagattcatggtacttccttttgggttattattatttttttttaacggagaagaggcagtactcggtgcagttgagtgcagcgcaggctggagttgggagttggctgcctgcgatgcgagggcaaagaaaaggaaaaaagatgccgctgcaggcggctgccgccacccaccaaccgcggacaagtggaagccccaaaccccaaccgaaagcgacggcgcgcgcctttggtggatggccgttggcgccgaggcaagcgaggcgcctgtattttcttacatttcagcccttccctaaaaacttattttacgaatgaaccttttaaaaaaactcttataaatgaacccttagaaacttattttacttttgcacctaggtccaacgctatgctgaagtcaatggcgtcgagggagttgacaccttgtcactttgtgtgagcacgcggaccggcattttggcgattgttaagatctctagccttgatcctcggtatggtgaagtgagctatggttgcgtggacacggtcagtcagcagttgtagttgtttcatgacagtccatctggttgtggccgctgccgtgccgaatcagtgaccaggatttattagcaccaaagactccggcgctgtgacgttggacctcatctttcccaaagtctaaacttgaaataaagctttgctgatggtgtctatatatgtaaaataagtttatagaaagggggtaaaacagaagaaatccagggcgaggcgtggtcagtggtcaccaaccgcgggcgccgcgactgcctgccttgctgtctcgtgcctgccgtggaaaacgagggaacgggaacccaacccaggcgcgggccccgccggccaccgcgcgcagtcgcagcaacagccagtactctctctgcgcggcggcagcgcatttcccactcggccactccagccccccgcagcatccgcccgatccgccgcgcggctgcttggctgttggctcccaccacaccttggcgtggccgtggcgcgggtgttggatccgtccggtcagcgctggcgtcaccctccactccctctccttccgcccttgcctcctcctccgcctaatgcgatccgacgcgcgccaccaccacctcctcctccgatcccgcatgcgcccggtccaccgcgcctcgcctcgctgacccacgggggccacctgctgctggtggtggtggacggacggagttgtccgcgacggtctcccactttccgcctcttccccaccaccatcgttctccttctcttctccctctcccacctttctccccccgcgcgcccgatccttcccttcccccaactccctctcgcatttcccagctcggatcctcttctgacttctctctctctctccgtctgtctctctcctctttcgaggtcttcagtcttcagtgttcttgacgaccttgctgcttcttgcctctgtttcgcctcctacttgccgtcttcttcttcttcttgctgctgctgctgctgctgctgaatttttcttcggtcagttagtcggtcaggccggtgccggtctgggagcgattccgccggacgcacgcatcaacagtggagggaggggaggggaggagcttcccctttttgatctagcaagtcgtcgtctccaaaaatacacttttttttgttgggtctttggaacaaaagggtctcctccttttgatctttctgtctcatcactaaattagcaaagctttgtgcttcgcggcgatctcttttcagctaattcagtctctgttgatagcttcgttgcccaagagagatcccccatgtcagaggcgagcggatgacaccgcaattcgggtccggttcttccgcctgagctgcagaattttaagcttcctccgtggtgccgccatggatgcccttcctgacgccgccgacgcggcgcagttggcggcggcggcggcgccgccgcagaagcgcgacgagtggagcgagagcggcattgtgcggctgctggaggcgtacgaggccaagtggctgctgcggaaccgcgccaagctcaagtggagcgactgggtcgacattgcccacgaggtgtccgcccactgcgccatggagaacgccgccgccacggggaagcccgggagcagcacggccaagacgcccaaccagtgcaagaacaagatcgagtccatgaagaagcggtacagggcggagtccgccgcggcggcgcgcgccggccccgccgccgccggtgctggcccgtcgtggcggttcttcgcccgcatggacggcttgctcaaaggccccgccggctccggccagccgcaggcggagttgagcaacagcatagacctgcgagctcctcctcctgcaaaggttgaggtcgatgtcgatgcagatttcgtcagtcagttagctgatgcagggccgggtgcactttctgaattggtgagtgcatatgcaaacggctcgattcaagagaaattggacaaggttgagaacagtgggcatgttgaggggagagctgcagagagtgatgtcaatgtgagctctccgaggatcaaggaggcgaacgaggatgccgaggaggtggacaaggtatgggacatgtccaagaagaggaagaacacggagtttgatatcgcgaagagcatcgagttgctggcaagctcattcttgaagattgagcgcgcaagaatggacctgtacagggaaacagagaggatgagggttgaggctgagattaagaagggtgagatggagctcaagaggacagagattatggcaaagacgcacttgcagatcgctaagcttttcgcaaagagattgaaggagtgcagcagcaagactggtggtagctcatctgtaacagctgaagtggacaaccatgccaagaaaggagaaaatggttagtatcaacatgacaatttgcgaataaactggttgtagttaactaacttaataggggtatatgttgttctttacattccatagctatcaaacattccatgcaatttgaagttaagtactcctacttggcatttgctatatctggagttcactaatagattaggaagttccagcctgttgagttttgtctagtgtaattatgcgctacatagtctttgagttccaaatttttggagttcggtacaactatatcgatagaagctgatattttctgagtgcatgttctgaaatacagaacggcttgattgcatgtgtggtatagtgcaaacacatgatgtttcgttagtacaagattttgattgtaggagtgcatagactaaattgcgatctgcaaaaagtacaattacgtgcgacctcagcagagcgatcttccatgttgcaaacacatgttacctgaattacctaaatgatcagaccttacattaaaaagattgtatacaaccgctaagtaataaaattgtaatgaaaatataatcaactgtgctgatggcatgctataaaaatactcctactgggttaagccatgaatagacaaaattttgctatgttctcctactctccttcaaaagcgaatccaaaattcgtataaccctagaggtgtccaattcataaaaatgaaagagcaattgcatgcttgttgaaagtgattctgactgtataatgctaccataatctatacaaattgaacttacaaatattctggagaaaaaaaatactggatcagcctatggatgtgtttaagtgcatctgtgcatatatttatctgatttgattgaatacgctaatattccatatcttatcaaaatggaccatgtaagccttttcatgcataagaggaaattagattatgagaaaatcgacacaggttgctaaatctgttcagcttagcatatattcagaatcaatcatcaagtgatcatgtaccagtactatcagggctaagtattggtttgtgctagtgcaattatgtttactttgtattgataaaaggcaaggttagcacaccaaacaattcaaggattagcatttatgccctcaagttgaaaccgatctgaatttctgaacttttaaatgcttccatcttcaaatacatctcaaaaattatcttttttgatcttcttttaagttgcttggaagtgccaactgaaagcgcggttttcattgtaatcaaacatgttgaatgatgtttacactttctatttcatcttgtttcgctgtgagcagttcttctgacttttgggcttatgaatttcaggttcagggtgattgaaacaccaaccgatcgtccagaatccagaaagcaggcttgtagtttttggtgttcttgtgcaccaaatgtatgtctttgattgatccgacttcaccatgtacgaagagatagttagctgtaaaagtaaaatgcaataaatgatatgattgtccccattcagtgggggattatagaagcagttttagaatcagtaactagcctgaagaaagttgttgagttccttttgttaatattttttgactgacagccatcgtatgtatcattctactttttttagataatggattttcattaatccggcctctagatccacaaatgatatacacagccaaatccacgaattatatacacagccaaatgtatcattattctactatctcattgttgcgaagtgttttctgaagcaacatccaacgataagattcttgcgggatattttattgcgttgataatatggctttggccgtgttaattgcaggattaaaatggttggaacttacactgtcgtttacttttatgctgtaatgtggtattccaagatctcatccgactttgtttgatccagcatacttatcactttatcagatagtgaaaccagatcccatttaattgccctctaatgactccacatccctgaatttatctacacggtcgagattttttttatatatattcatgtattacgatgttgatataaataaaaggtaaaatttatttttagctagaaacaaaaacgttaaaaacgatactaccatttttattttattattttcgtgaatttatcgtgattcgaacccctactgatacctctctctccgtttccaccggtaaaaaatagggaaaaaacagaaaaggctgttcagatttgctagaaaactttcataagtttttttacccctaaaactttcatatttgtgactatagaatcgtgttgagaactcaagatttatgtatgaagaagaaaatttgctcgaaagaaatttttacacatctcatgtgcaagatcctagcactaacaaaccaaaccatatttgaatataagttttatataagttatatcgtagctacagtatagttaaagctaagttacaatataattacacttcaattccattatattacatgcgaaaggttttgactaaaaaaactacggggcgattttttagatacttccaaggctgtttgtcgtgggtccacatgtcagttacatggtacaaattcgtgtggactctctgtgtggctcaagctaacaagcaggaaggcagggagtaattggtccaactccctcttcttcttcctcgcctctcccgaaaggaaaagaaaagaaaagaaaacgaaaaaggggaagaaaaatttctgtgtccgttccatcctagtccttggcaagtcttctcaagcaggaggaggacttgccatggtgttgatttggggcgggaagaagcatcgggctcgccgtctgctcctctgatcggcctcctcagttgacacagcaagatttggtccggggggaaggggagcagccgccatgtttgggtcccgagtccaggatgaggtggagatgcagaggaggactaccaacaggtgcgtgctgccagcttgtgattctttaatcctgtagcttccttttcgtctcttgatgcagaagaggaattcttttcggttctttcaagcatatgtaaggaggaaagtttcaatttatacggcagatttagtttgccccttttaatgtagtagcttgatccgcagttgcgaacaggtggacacaggaggcgatatgttgtcaatatgcaattctggtctaattgttaccctttctgattggaaccacccaatatttgcacaaaagataatacacattcagagataacatttttgcagtttatttttccttactgggttgtttctatgtgtaggatctttcctgatgagagacaggaccagtttaagctaccgtttcaagctgcacgggctgacagatttggggtaaacaggatagatgcaaagactactgagaagattaaagtgataagtgaaggcaacataccatggcaccgccgcattctagaccctgggagtagcatggtgctaatgtggaacagggtgttcctagggtcctgtttgtttgctcttttcattgatcctttcttctactacctgccgctagttcatgtactagatgaaagtaccaaccgttcatgcattgccaaggaccggcgattgagcataactatcactgttcttaggacatttgcggacttgttttacatgctgaacatcatggtcaagttccatactgcatatgtagatccaaagtccagagtacttgggaagggagagcttgtcttggacttaaagaagattcaacggagatatctcagaacagatttctttattgacctacttgcaacgatccctcttcctcaggtaaatagcgcagaagtaatgcttttttggaattcttattgcatttgttgatggtagatacccccagttacccatgcgcaagactaaagttgttcgaaagagtgactatggtgcaaatgtttgtaattgtgcactttattttcaccctccactacatcttttgttgctaaaagttttgtatgccacaaccatccctcaaagtacttttaataatgcccttttgcaatttactagtatttccattctttctttctgtttagaataaattcattagttttcatgactaaaaactaaatcacttcccctgagtgagtttaaagacaatttattttattatttccatgtttacttggaatattttcatgatatagttaactgctacttcgatttataattatccatgttgtctttgccaacattgttctaaaccatttttactttgcactgctagaactacatgattggcatgttattttcccccaatttccagtgtgtggttgatccgctttcccacaactgaataccgataatgtaatcaattgaaacttttgaattctacagtcatagcctgaatctcctggtggtactttctcttgcaggttaccgtgtggattattatgccttcaataaaaaactcagattacaacatccggaacaccacatttgctctggttattatgattcagtatatattcagaatgtatctcattgtaccattaagcaatcaaattatcaaagcagctggagtagttgccaagtcagcctggctaggagcagcatacaatcttctgtactacatgcttgcaagtcatgtatgaccaccttccatcttcaacttagtgttcatcatttttgtgccatgttaatttgtttaaatactaagtgttgtgcaatgtaatctacaattgaaacccaacttaaattttgcagttttttccctgatacctcattcacagtaggaattggacaaacaaaatgagcctgtctgtaatcacagcatgtagatatgttaatttggcctctctaaaaaaggaaatacatgcatatgtgcaaactcaaattggaggacaataattttaatatcacagctcttagctgcacttttttttttgaactaatacttcaataatgttcctcctggttctgcagattactggagcaatatactatcttctctccattgaacggcaaattacatgttggaatcagcagtgcctaaatgagtcttgtagttttaacttcataagctgtgacaatactggttctagcagttatcttacttggggaaagaacacaagtatatttgacaattgtgatcccaatcgtaattcaagtgctaaccccccaccatttaattatggaatgttttcaaccgcactgagtaaaggtgctgtttctgctccatttcttgagaagtacttcttttgtctgtggtggggcttgctgcagcttaggtataattaatttttaatatacatccccatcttgaatattaaactttctgtacatctgttgttgatatcttgcctgtgaactattaatctgattatatactttacttggggttcttccatgatttatccattttattcatggttctgtgtgattcaaatacaattgctcatgtttagttttctgctgctgtatgtgctctccttttcagttctagtggaaatcctcttcagacaagtgcatacatcgcagagaacacatttgccatagcaattggtgctcttagtctcgtactctttgctcagctgattggcaatatgcaggtattgtcatatcttttgttctgaactaggggagaaaatgctccaaggacaataattttcttgttactgtttcagtttactgtaaatgtagtaatgcaagattgttacgttctataatatgtgcacataagtggatgtcctatttctgtgatcaatggatgcttcaagtcagaaatttccattttcattgttttaaaatctgatgacaggaacataaaactatcactttgctcataagccattttccacatttgcaaccaattgaggttgttggttcagagatgttgcttacttcctttttgtttgtcatcttgtagacatacttgcagtccatcagtaaaaggcttgaagagtggaggctccggcaaagagatatggaggagtggatgagacatcatcagctccctgatgaacttcaagatcgtgtccggcgattcgttcaggttaaatggcttgcaacacgaggagtagaagaggaatccatcttacaagctttgcctgctgatatacgccgggatgtacagcgccatctttgtttggaccttgttcgacgtgtaagttgtggttatttacttacatttcaactgaattagtagaatgttttagtttctgaaaggttttagatgttaaattttctagtggcattctgtcgtttggatggaaaaatcagtgacaaaagtaccaccagtgctacttcatagtctagcatgttttcttatcccttcctaaaatgcaggtcccatttttctcggagatggattaccaacttctagacgccatctgcgagcgtctggtgtctttcctgtgccctgagcgcacatacatttctcgtgagggtgatcctgtgaatgagatgctcttcgtcatacgcggtaagctagagagctccacaaccaacggaggccgcagcaacttcttcaactccatcatcctgcgccctggtgatttcgctggcgaggagctgctcacatgggctttacttccaaagaccaatgtccatttcccgctttcgacgaggacagtgcagagccttacagaggttgaggcctttgccctgagagccgaggacctcaagttcgtcgcgaaccagttcagaagactacacagcaagaagctccagcacacgttccggttctactcccaccattggaggacatgggctgcctgcttcatccaggctgcttggcggcagcaccagaggagaaagctggcagagagcctgagccggtgggaatcatactcatggtggccagaagaacatccaccagctgacaagcctaaacaggagggcacttcaagcagtaccaagactattgctgagagtgccattgctcaaatgcacaagttcgcctccgcttccagaaggttccgtgccgacgataccgccatccggaggctgcagaagcctgatgagcctgacttctctgcagatcatttcgattgaggctgatgtttcctgctttaaaaaaactgttgtaaaaccactactgtgcactgcattgtattcaatagccatatagtaatccatgtgtatctcaaagatgaaaccaaactggtcctttgtgtaattcaaatatacgcattttaggagctgtgaatcgtgtgcattttgtttgcagttgaaccaacctcgagaattttgaagaaatgaacagtttagtagttttatatattgtcgcgaccgagaaaatttgcattttcccgaacgctagtgtattaatccccgtcccaggaaaagccggggtacaccacacaaacatgatataaaagacacatctttattatatcgataatatttacattattacaaaggcacttcaggcctgacaatcaaaaataaacagcagcggactagcgggcctacggctccatcttcacaggcgctcaactggggtataagccaggactccacctaagacatcttctccaaagcctctcttactgaagaggggaaagattgagcaagagtgagtacaaccacagtactcagcaagtcacaccggcagatgcatgattaatgcaagggggtacaaggggataataataggggttaagttttgcagtaaacagcatttaaaagtcacttagttgcccaaagctattttgtaaacacgatcctagagctatacaatattattaatcaaggccgtgaaccctcacgaacctgccttaacccaaggcctacgatgattcagaccgaactggcaacccgaccctgggtcccagctcgtcccaagccaacccaggctaaccattccacattttagttgttgagcaaattttaagaattaaaacactaacttgggtacattgctcggcttgcccataaccgagggcgcggctattcgaataggttttactctgatcagaggtgtacatctttacccacaagacacatcttcctcacgtgtaaccacgtgccacataccaccacggtatacggacggaagacgtgacatagttcccaacccatcctagccataaacaagagtaccgacccaaccccacctacggccggaacccccgggacaggcaggcaggattgagccccctagcagcaggacaccagccctgtgccatgacatctcgactaccgggccgcagctcgtgtagccttcatttgccctggagaatgtccatcgacccccgacttcatccatctccaatccgtgtacttttgtttataaccagactgagccacaaactaagccttacccactagacatgtggaagtacggtagtgctttgcaacagaggcccgagcttaatccttatagtggccggggtgctacttcccacaactggcatgcacccaaaccccaccgaaaaacaggttttaggggctttgaaagaggaagagaggggtatgtccaattccaccataagccaaccattccatagtgtccaaatgatatgagaattcccaaagtctaaagttataaaatcacctaatgttgcctaattaatcagcgaagcatctacctaaatttatactagtggaaccatgaatagagtacccactagttggggttttgtttattctagggtgaacaaggtaataataacaatagcaataataatgtcttaacaaaggtaaataggcatggctaaataaaacagtgataacgcgggaataaaacgataatgcattaatttaaatcaaaataattttataaactgggattcaatatgctcaaggatgatgtgacttgccttgctcagagagaacggccttccgaaccttcggcgacggccgcgaaccacgcttcgggaacctccggaacgacgaagactacgcgaagcacacaagcaaagctacaagcctaaaaagaagcaataacaatacataaaaagaaagcacacggttctttaggttatacaaacattaggagacttgaacgggtcgattcagagctcgtatgaccaagatatgatcatccgaagtttaatgctgttatatggagatttgcggattattgtaattaggttttgcaactataaaacaggtgtaagcgctagcctggaaaagacaggaaggctgcgccgttgacatgcggaccccacatgtcaacctaaaggaccgcggtagaccgggtacacagagacggtccacgggtcgacggaagcggaccccgtgtgtcaaccgaggcgagtggccgacaaacggactccactagacaccacacgggctgcacacgtggaaaccacgcggctaccgagcgggcacactaacacggtcaccacacgcacaagcgaacgactaccgacaccggtacacgggtatcggggtcgacaaccgcacaacgggtacgggggacaccgaaaggacgaggacggggcagcgagggagagggaaccttaccaccacgcgacgaggcgtgggaacgacaacgacgaacgggcgcggcggagacagacgggcacaacggagacgaacggcgaggggacggcttcggcggcgatccttggacgaaggcgagacgcggccggcacgaggcttgacgacgcggagccgaggacgaagacgatgacggggctgcagcggcacacttgacggacgcggacgagacggacgagaacggcctgacggagggacgaacgccacgacgaccgggaacgacgagaggacgacgacgacgacgacgacgaccggggccggcgaggaggcgatgagggctgccggcagcggctgcacggaggcgaggatggcgcggaccacgccgctgcgatgccgacgacggaggcggcgccgcgagacgacgagccgggcgaccgatgggacgtcgacgacgagaacgatcggagacgacgctgatggaccgcggaggggtttggatggaggggaaacgatgccgaggacgaccttgccgctgcgatgccggaggtggtggaggtgtggccgaccggtgcacgggcgaggagggacgggcggccgaacaactccggcgaggcggatggagaggtttgcggcgatgtgcggcggcttccgggcgaaaccgaggggtggacgaggtggagggctacgtcaccgtgccgagggaggggacggcagcgccggctgacgcacgggcatggcgaaaggggcagccggaggagatgccgccgaggaggaaggagaagccggcgcgggcgacggtgttccggcgaaattcgggcgaggaggaggtgatgccggggatgagggcggcgtcgcggagccgagggaggtggtggcgacgtcgaccggcgctcaggcagggagatagaggcggctggaggcggccgacgcggaggaaagggaagggcgacggcgggaacgcagctccgggggtctccgcgggaaacggagggcaagccgggcaaggggaggcagctgctatgctggaggaggcgacggcacgaccggaagacgctccggcgaggagggagaggcggctggaggcggccggcggcacgggagagagaggaggacggcggggagagggctagggaccacgggagatcgcgggagggggctaaaacgatagaacggagcgagggggttgcattttatagcggagggaagcgagccgagcacgggagagggcggaacggcgacgggaatggcggccggcggcaaaggaaggcggccggacttggcgcgtccgttcccggcgattgggggcgccattcaagggggaattaagggggaaagagagaggagggaaaggggtttaattccccctaatcaatttgggaatcccatgcttgaatcgcgcggatttgagggaggaatggcgctagggttcacgggagagggagagaggacggccgggcgggaggaggacgatgacccgcctgacgcgcgggccccacgcggccggacgcgcggtcagcgcacgcgcggcgcgcgtgtgcacggccggctcggctcggcctggcttgggcgcggcttgggccgggcggccggcccaggaggagaggagggggaggcggcctgggagaaagagggaggaggagggagtgggccgggaggggaagaggggcccaagaggaggagggagagaaggagagggaggagagggagacttcggccgcgggccgaggggagagaaggaggactttgggccagacttggcccaaagggggggagagagattatttttaggtttttctttttaataaactctaataattgtttttgttgcttaataattatttccggtgctctgaaaattcaagtaaaatttaagggctccttttagaccaaggagaatttaacaaaaattccccgggccacattcgaatttttcttgtacgcattttagtgtttgccaatttcttttcgaattttaattaattctattattccttttagaaaataatttttattttgggatgaatttatcaggacgtgacatatatcgtacgatttcacatttcagttccatctcgttttgtttttctcgatctcgggttactctagctgggctgttcttgatggctgccgattgccacacttcacaggagacaattatcatgaaattccattattaggctttcttcgatcacaatcgctctgatcttccgagaatcgtttttggagattcaactttttaatccgttgttagaaagaagggttatgcatatagcttagctaacaatagatagaaatataagtctttgaggtggtatattaagtagtttttatgcctttaattaaattatttattcgtcctataacatatgcaataattagatgttactttatttaagcaaagatcggaataaattttattattatttttattaaaaaaaaaagtaagacaacgaattacagtaagtccaaaaaaaatcgtttgaatttcgaaagagatattgttggctgtgggctaaggtgggccggtaattttctagcctgtgggctgaagggccgcagttttccctcctttccatcgtcttccttccgtgggttagatcgatcgatctggctctctcgcggagatcgagcaagacggatgatggcatccatggcgaagggccgccgcttgtggaaaaccaagcatctcacactgcgcccgccctgccacggcggcggcgatggcgatggcgatggcggtcacccagactggattctcgtcgacgtccaggcctacatcgccgaccgccggaacgccaccaccgccaccgccatgctcagcaacggcggccaccaaatccaggtcaccatctgcgtcgcgccgccgccgctcgtctcctacatctgcgcctggtcccccaccacccaccccgccgagctcttcgacacggagcccaccgtcgaggccgtcgacgccgacctcctcctcctccgcatccacgtctcgctcaaccatgtccacgacctcgtctaccaggcatccatgttgccatcgctgacgctcatgcccagccaagatccttacctgcacgagcccaactgcatcgcgctcatcccccgctcctcccatggcttctacatctccacgctcgacacggatctccgcagtgggattgggcgatacaacctctgcctcttcgactccaccaactccaaatggagccatgaatcgctctctctggatcagctgcgcaatccgcctgacaaaaacgaggtgctccatatcacggagaaggtgatcaccttcatcaacgatccacatctggttgccttcgttgatctctggcggggcatcatcatctgtgacatacttgacaccaaaactcaaactgcaagctatgtgccgatgctcaaggagatcatcaacctccgcagaacccgagcatcgtcgatcaccagggacattgctgtcgtcaatggccgcctcaccgtcgtcaggctcaccactgtctttgatccagatatcaatggttgggactgggatctgtccacatggagcagggcagtggattgtttggagcaggaggattggcgcgaggactctctggtcgaggcctctgacatcttaatcgaccacaacatctgcaacgttgagctcttgcctaagatacaggggcaacctaccatggctaaactccacgttgctcttcccactctcagcttgactgatgctcaggttgtttatgtcatgggcaaggttaacgaatccgatgaaaaggctgtgctgctgtctattgacatggccaacagaaggcttgatgcagtatcagtgtatgacgctgcaagaatcctccactactttgatgtctgctacacgcagtctaccatcttccgatattccgccccttcttcaggtgattaattccctggctattctttctacttgtttttcttctggccaaacctttggatcaattgatagtaaacctgattcgtattgttgtgtttgctgatatatttgaacacatatatgtatgtggctgttgctatagtgctaggctgctagctagacttgctagtttagtcggctgttagttggaggctagtgttagctagactgctagttgagacaacattagtgtgaggctaggtatacttttagtcgtcattcattcattcattaagctgccagattagttatagagtatggttctagataaacaaatcatgaaatgcaagcccatatggcacatgtagccagttaaatgcaagggaatgttagctttcacattgccttcagatgaaaaagaaaatgttgctgtgggtgcatgctgtatcaaaaaacgctcataaaacaaatgagccattgaacgagatggttggaaatgaaaacatcgacaagatttctgccaagagagatatatagcagaccattgtaggtgcttttgcattcttgaaatagaatgaaaacttgttgaattatgtgtaaatggttaagcacatatatgtgtaaattattttgcactaacacatttccctttgttttgctgggtgcaggtttaaatggaaacctgaaacgaccagggaagttccctatgccatatcctcgcaagcaacaggctgtaaatgagccatttcttccggatgctgggagaggtttagaaactgaagatagggatactatggactgggagtagttatgtaatttggagctgaaacctgaatagacataaattgatcacagctgtttattttgcttctagttactacatggattgctacaaatgcagctactctagaagacatcagcctgcatagagaaatttactttggcagcaacaaagagtcgaacttggctatctcaatctttgagcatctgccgtcatctcacaacaattactgtcgtgaaactccatcattaggcttttcttcggccacaattgttctgatcttccaagagattcacgctttatgtgaacacagaaccatttcagattataacgcatttgaaattaattactgacaaaaatgacctgtaaattctggtaaaacactttgactggttcggggatctggagtatgattatagataagagtattattcacatttagacatagaagcgcccatggcctaatggataaggcgtctgacttctaatcaggcgattgtgggttcgagtcccactgggcgtgtttattattttttttctcttttaagactcagaaacagaaaactttttttataatttgtaattagcaaatacaagtacagatagacctacctcattcacctctaatttctgacaagaaactagttagctagtttttgtgagaaagcaggttggagaattgctacacgtcgccgcagcccacccaactcacagtattacggcccaaccaggcctcccgtaacgggccgggctacatgcagtttccattgcgaccagcatgctggcccacggtcaggttagcgtgggccaatttgactggcccagttagtaggcaaatggactgcatgaaatgggccgtagtcctcctattttagctaggtcgacttctttttccgagacatttaacttcttgcaacttttaaaatatggcaattaattatttgtcactcgctgtatgacatgtgggtccagtggtaaataatttagcaccactgcaccactcgtaagagtggcaaatagttaattgttcttctttttcccttttaacacgagcactgctacacgtactaattttttcttactaaatctttactaacaatcatctcaaccgtttgatttaggtagatggaagttattaaaaatctagatgcactcatagcatgacacatcactgttagtaagaatttagtaagaaaaagttagtacgtatagccttttccttttaacactatctccattttttaatatatgacgttgttgattcctttacacatgtttgatcatccttcttatttaaaatttttatataagcataagaaaatataattcatgcttaaagaacttttagtgttaaataaatagagagagtaggttcaccttgaaaaaggaaaatctcctgatcatctcgtctcatctctcatgtcatctgacacattgcagcatgcaagcaaagaagttcagcagcctgtctgatgctgcagctactacgaaaggggcgatttcgcatgcttaatcactgctagaggtgctcaagtgaactggggctgtgtttagattcaaagtttggatccaaatttcagttcttttccatcacatcaacctgttatacacacacacacaacttttcaatcacatcatttttcatttcaaccaaaatttaaactttacgctgaactaaacacagtctagagtaatcagtaactagctacaaatcgatctacactactgatccatcagcgatcagtcgtcgtcaacatctattgatgcaaagcagctggctatctatcaataatctggactgcagagattaattgaattcaaccatgcgtgcatgaccgatcgattctcctcgtcatccgtgggtacggattaattggactcttgctccgaatgggtgatacactcgggtggcagctagggcacacagctagctaactctgatcctctctcgtgtttgtgttagctcacatgactgcgtatactcatcatgttaagagatcttgatcactgacttgttcagcaggaagaagctaccttaccttagcttaattagcttttgcttagcttaggaaatagccactaacacacgccattaaatcgtcttgtcatctaactacacctaaatacgtgtatctagctagctcaatcaattaatttcagctgcagatagacgaaccattttcatatagttacaatagctagctagttgggtcgatcggttgcttgcatttcttgcatcttgtgtatatatgcatgggcaagagatcgccaacagaaaggaattttttttaaaggagttcgagaacaactgttcttcaataaacagataatgcgtttttaattgcagttgcagacaatgcaaacttcatttcccctgggcagctagctgatcttgttccataaattaactggacgatgtcctgacaagctgcgaccgacgtacgagcaaatttaattacttgtcgtgatcacaagttaatcaactatgcttatcattgacgacattatgcgcaggttcgtcgtcgcagaacaagttaagtcaaatcgattctactccagcagctgcatccatagatcgatcgatcagtctgatcacacactaaaaagcatctttgaaaaaacgtcatatcatcgcaacagtggtttaatcatgttccccagttaagttgcagtttacagctgatcataccggatgcgtgcagcaggaggactttgtgtcgaaagagtaattgtgtgtcaacaaagcatacatgcactatgacgctctgtggttgggtttgttgttgggtcagtaaacatctaatcaatcaattaattcatcttgctgcatgctgatttaatcttgagctcatacttacgtgttgatatatcgatgattctaatgaatcagcagtatagctagctagcagctggtagctaattaattaattgccgttagcagtaattaggagtagaaggtaaagactcttgcagcagataaagcaatttccaagttaaattaaactggaaagaacctcatttcaagtatgcaagatcccaaggaaaaaggatatatacattgttactgaacagtacttacagctgcactcaaacagcatgcagcttggtcaccttactaacttttttggactgatcaccttactatgatgatattattctatcaccttactatattactgattattattattattattttgtttgtgattgattggtcatttgagatagatcgttgttaattggtgggaatgggcagatagctagattcatgcatgtactagtttctactagctgctaatactaattttaaacaagaaaaaaatgggggaaaaccctgatgctttaagagttgtaactaagtaaaggattaaaaaaccatgagacgcacgaaatgtcgagataaattcggcttgatcgtgatatatgttttagtgcatatagtaaagcttctggtcattctcttagaacaataaaaagaggcaaattctccttgctaggatgaaaaggaagaaacactcaaacacatgatgaacacagcttgatccaatacaagaacacaaagacatactatgcaaaggattaatccacacacaatttatatattctctggggtacctaattaagcataggctcatccaaacatgtatacagatcgatcaaggagatcaattacgtactgaattaatgagatgtatattattgaactatatatatctctctctcaaagatcagggctatatatatgaattagccgatcaaacaattgcactagaaatcaatcaatcgcggttccagagacgcaacaagtactcgatccaacgctagctacctacgacatatgcatggattcatcacgatttgattaattaattaattaattaattaattaattaattaagccgtcatatacgtaatcaggttaattagctcagagcttcagcgacaagtcgatctcctccccattccggccgtagcgcccgccgccgcagccgccgtcggccggtggcggcgctggcggcgccacgtcgtgatcctcctccgccgcctcagccgccgcggcgtggccgtacggcggcgccgtccagaagaagcccccggcgacgccgtcgaagccgtggactgcccgggacgacgacgacgacgacggcgacggcgacacggcggcggtcatgacgatgtcacggctgcgcttggcgagcgtgcgctcgagcttgtgcgcgttctggtggcctcccagcgcctgcgagctgaagaacttgcggtggcagtagttgcaggagaaggcctcccgtgggtcgacggcggcgg

SEQ ID NO: 8706 - DNA, 730 bp, Oryza sativa
ttggcaccaatgcacgatcgatcgatttatacaaatccaccaccaccaccttcgcggcggttatccacttcatcaccggccactctgcctagagcattatcatcgatcgtcgtctacctagctagcttcacttgtgctccactgcaaccagtacgccacattaacttaattcacacctagcttagctcactatatagcttagcttcgcttaagcttaagctgatctcggagaagacgtacatgatggtggtggtgataaggcggcggatgtcggcgacgccgatgctggtgctggtcgctatggcgggcggcgccaccgtgtgcgcggcgcagctccggcggaactactacgccggcgtgtgccccaacgtggagtccatcgtccgcggcgctgtggcgaggaaggtccaggagacgttcgccaccgtcggcgccaccgtgcggctcttcttccacgactgcttcgtcgacggctgcgacgcgtcggtggtggtcgcgtcggcggggaacaacacggcggagaaggaccaccccaacaacctctccctcgccggcgacggcttcgacaccgtcatcaaggccaaggccgccgtcgacgccgtgccgggatgccgcgaccgcgtctcctgcgccgacatcctcgccatggccaccagagacgccatcgcgctggtacgtgtactcccggtttgactttgttcaaagttaaacaactctgagtttgactaat

SEQ ID NO: 8707 - DNA, 2230 bp, Oryza sativa
aatttaagaatacgacttagtgtacactggtaacccatgtcaatgaaatgcccgtgtagattataataaacttctcctacatcaaataatcataaattggatctatgctaatatgtattctatcactggatcaaggaaaccgcctgattagcttggaatggttttattggtactgtattcttgtattggtgaaagatgatataattaagtgtaacaacctgatatgagctgggctccatggcctttgtctagtatatgactaacagctatcctgattgattgtgatgcaatatgctgtatgtctagagtgcaacagtatattaccctctcaagtgtttgttatggtactagtgtttactgcttgttcttcatcttcctaagaaacgacaggaagatcatgttctgtaaaagcggccaaacaaggtcctgggactacgaggccctcaccatccgatgggggtgagtgtgtcctacgtcgcaattgcttcgcgcccacccacccacccatgtgggcagcaggccctcccgcatttgttgctgcctgtgtatctgcatgcggtgaattcatccattcagttagattcagggttggatgctgcatctggagtgtgtgctgttggaattctagacgtcggtgatccagggaaggtattgttgggtgcgagcttgattgagtcgtgcgattttttttattcgcatatattatattgggaaaatggatatactccctgaaatcattgggacaattgattacttactaataatttctgttcactagtggctacttaaattacccattttttgacttgcgattacggtgtcatctacaagtttgcatcgtaaatacatttctctaaaccacgtacatggaggcaacaataacacataaactgctgtcgttctcattgaattcccattgtttcagattgcatgttagattagcgatgttgcgcagagggcatgttttttagttagtttcaatctgtcgaatgatttagtttagatagaattgggctcatcatttggtgttacaatttaatttactttgtaataggaatccaaggcatgcatcaattgctctataagtttagagtccacgggtcatactgatcctgtggtcttaaaacagctattttgggcagcaaccatgtgcagcattaaggcttgtgctgaaggattgttcttcaacagttcaacctaaggattagagtaaccatgttattttttttagtaaatattcttaatcaagtccattgaaatgactatatatgttataataaacttattttacttaattaaccatgacaatggacctttgtcaatatgtattttatcactgaatgaaggcaatcatgtgattagcttgaagtgtttttattgctactgtattcttgtatggattaaagatggtatgaattaagtgtaataacctgatagtactttggttctttggcctttgtatagcttgaaaaatagatatcaggattgattgtagtgcattatgcctagaggttatagctcaacagcacattaccctcaagtgcctggtctggcactggtgttttctgcttgttcttcattttctaaagacagaacaggaagatcatgtactctaaaagcaacccaaaataactttggttgtatatgattactttagcatgacgcatgtcttctccccacaaatataccagtgttcatcacttactgttttgaatagtgtacttatatctccagtcaattaggaattcatgctgtgagtgagctcacaaaaaatgtccaactgggcacttatattttcccagcctatcctgttaacagtatctgaatttatgatctctttgagcagtgagcaggatgattatgaagttgtcaggaaagttgggagaggaaaatacagcgaggtctttgagggtattaatgtcaacaacaatgaaaaatgcattatcaaaattctcaagcctgtgaagaaaaagaaggtagttcatgattcatgaatcctgttgtccatcctttttttccttttcccctgaacatgctcttttactggtaacatggtactgtttccatcttacacctagctttgtgtcaatggcattagtgtttattattttaaccatagttttcttttgtatgcagatcaaaagagagataaaaatacttcagaatctttgtggaggtccaaatatcgtgaaactgcttgatattgttagagatcagcactcaaaaacac

SEQ ID NO: 8708 - DNA, 12544 bp, Oryza sativa
ttagaactttggttaattatgcgacatatatgatgataaatcttgatggtgacgtggcgtgtctcctgttctaggatacaagatgttttaattctagtctactctaagtttgtctaattctatagaaaaaagtagtaatatttacaacactagtatagtttcattaaatctataattaaataaaatttcataatatatttgtcttgagttaaaaataatactactactcttttttataaaattagtcaaactcagagttgtttaactttgaacaaagtcaaaccgggagtacacgtaccagcgcgatggcgtctctggtggccatggcgaggatgtcggcgcaagagacgcggtcgcggcatcccggcacggcgtcgacggcggccttggccttgatgacggtgtcgaagccgtcgccggcgagggagaggttgttggggtggtccttctccgccgtgttgttccccgccgacgcgaccaccaccgacgcgtcgcagccgtcgacgaagcagtcgtggaagaagagccgcacggtggcgccgacggtggcgaacgtctcctggaccttcctcgccacagcgccgcggacgatggactccacgttggggcacacgccggcgtagtagttccgccggagctgcgccgcgcacacggtggcgccgcccgccatagcgaccagcaccagcatcgccgccgccgccatccgccgcctcatcaccaccaccatcatgtacgtcttctccgagatcagcttaagcttaagcgaagctaagctatatagtgagctaagctaggtgtgaattaagttaatgtggtgtactggttgcagtggagcacaagtgaagctagctaggtagacgacgatcgatgataatgctctaggcagagtggccggtgatgaagtggataacggcggcgatggtggtggtggtggatttgtataaatcgatcgatcgtgcattggtgccaagtggttggatgaactgtgtgtggccggcgaggaagaagggcatatgcaggtgacgtggtttaatcttggccgttggatgaggcaaccgacggtgcagatggaggccacgtcgtcgtcgttgtcgatatgatgcatggtccccgggcgtaaagggcagagtggtgtatatgtaggtgttgtgatcatcgatccgatccgggcatgacgtgaggttgatatgaaactgaacgagacgggtatgcacaactaactgcaccaacaaatctttcgttgcgtggatatacgtatatcgtttgtgaattaatgtgcccaatgatagcttgatcggcaaaaatgttaatccaaagaaaagggctagctagattatactcacatcgatgtttgatagttagacgatgttgttaatttttagatatatgtatacgcttggtcattcatcttatatagtacataataatttgtggaaatatgaaaattttacaagtcatgtttatcgataaaaggtaattattttgaataaaaagaatgattaaatatatgttcaaaagttgattatgatatctaaaagtacttggcatatactccccgtccctaaatatttaacgtcgttgattttttttaaacatgtttaactgttcgtcttattaaaaaaattaagtaattattttttttcctatcatttgattcattgttaaataaacttttatgtatatatataactttacatattttataaaagtttttaataagacgaatggtcaaatataagcttaaaaaatcaatagtgtcaaattaaatatttagagacgagggagtatgatgcacgtcacaagtgagccatgcaggctgaatcatgatgcagtgcatgaggatatttatgttagttactctttccgtcccatgcttttttatcaaaatcaaactcgatagcccttgactaatgaccatacgtactagctatatctataccatgtattatacatgttatatcagtaattttagattttgatatattttcatttgatgctaatttcatatttattaaaaacatagtcaaagtgtgttattaaagaacgtgttaaaaaggagtaattagcaataattagaccaatgtgaaagtgtgctattaagggcagacctaacccatagtgtccataaacagtgtctatggtaccatgtcaataagacatcacaatagaaactacaatctacaacccatggtttcttaaagtgggccattaataaatacatcatctctcttctctatcaatcatatttattcttcatctattataaagacactattctctcccaatgcaaaacttgatagtgtctagtatataggttctcgtgttgaagctgtcttgcatgagacccagtttcttcctctcttcactctctctcttaattaatatagtgtcacataagttaaaagtcctacatggcaatatagttaatgtcatagacaccattctagatagagggttggaactgccttaaagaacgtgtaaaaaaagagtaattagcaataattagaccaaggtggaggtggtctcaagggaagcatgcactagcttttatggctagcttgtttgcactccatggataggacattaggactccactgctaaaagtatatactactagtattatcttttgatgcctctagctaatggtgctcacccaaaaaacggccacatgacacaactagtggcttgcctagagatagctggacggaaacgagatgtggccgagatgatatgcctatctttgtcgatactatttggaggtggcttctggaaacacctaaaagcaattaattgtacacttatgatttcctatttttgcatatgattttgttttcgtttttttctaagaaagcaataacatgaagaacaatattgtaacaaactctttcataattatgactctcttgtgtgttccatatatataaactgtaataatagtgttcgatcattcattcactaattatttgatataatgcttaattatgtaaatttgcaacctatatataagacataattttattggataattaataaactatatagttatcatattttcttgtaaatggcctagtaactattttttctctattatgtaggcacatgcacacacactacaacacgactacagaatagcttcacgcatgagtacacgtgcaaaatgaagcagcccctaacagtacacgtgcaaggagatggaggccacagcccacacacaggagatatattgttctcatgtatgaatccaccgtcgcttctctcgtcccttcgcctcctctcgttccccttcctctctacagtaacctctccaaaatctctcccttccggcccctcttccccttcgattccgatggttcgccgccggcgagggttggaggaggggtccggccaccttcccctagtagtatttagtcaggtttgtcctgttcgtagctagtctcgtgtcctagagtttgccggtgttgcctcccatggtggcggccggtgtggtggtccttgatggcggtggtggttggagctggtggctttgtgcctctatgatggggaatcgaagctctggtgggggattcaccctcccgctttggtcccaaagggtggtgaagattccagatctgagttaccttggtggtgatggaggcggttccagcggcggttgctggaggtgccctgcgtgcgtgtgggcacacgctggtggtggcaactacgtcgcgctcggcgttgtggcggtcgtcgtctccctccgttgtacttgtgctggaggtggcgacggcgtgtacgccgcccttggcgttgctgcggtcatcgtctcccttcgtcgtgcttgcgctggcagtggcgacagcgtgtgcacggcgctcggtgccgctgcggtcgtcgtctcccttcgtcgtgctcctgtcgtctgctgcgccccagcttgcgctgcccctgttgcagcctctgcctctgttggcagcagccatggttggttagatgacgacaatctcctccaagtcaatgtctttgggatttttgtgattgggtgtttgcttcggctagattcttgtggttccaagttgcaggtcacctccttcttagccatcgtcgtcctcacagcaagacataagtcaattggcaacctctcaaatgccccattgttgatggttggctggtctatggtttggccctctcttttgtttcctagcagcagaaaccgcgtatagtttgtcattcgggttgagctcggaacccctgtgcaattttcattatcagggttgttgttagagttcctcagattcaatgacgaatcccgtggggatgcttcgctgaatccggtgatgctcgcaccaaaatctatggctcaacaattatcctcgatcttgtgccgttcccgtgaaggcaaccaaaggggatcaacggtttgtcaagcggtgtgcaattcaactgaggcccaaggtagcagtcgtcgcggttttaagacgtcgtggctctacaatcgtcacggcatcaacgcagctccctatcggcttgctcctttttctgctattttgttacatctggaaggcttccatagtttggttaatcctctttctttagggttgtctctaatgctttcagctactatcctttgttgtgtactggggtttatcccctaatatctgttcttacttaataaagttgtttgtgtttaaaaaaaaaatccaccgtcacgcctcgatctccctgttgattgttgtaagagaaaaactaattattaattaactagagtaaaatttagagaaatgcaaatttaataactaaattatcaatatttactacaacattaattggtcacctagttcattgctgcaaggattaaggatgaaattattatgtaggtaaagttgaatctagaaaaaaaaaaggtatgtaaagctccaacaagttgataatttggtcgctaaattaatttgtacgtacatgtctaaaattcactcaatggagtattaatctctatctcttctcgatctatatctatttgtacatgtgctaatctgctgccaatgaaccgcaaccttaattaattaagctttaatctcgttgtctctagcgcgatctcacgctgctaatttgtcctgctccctctccccgttctgcatttatttacttgcatgatgcatgtcattcagatataattattattcgatccaagttcattttttatgattcaagtttcgtataggtttcttttcgacgtcattttttaatgatagatgctcatgatatattaattgctcttgctataagtggttaattacatactaatggagtataattaagttcaacaaaatcaattgaagtaatttgattcttttttaaagagattagaatataaaaactgaacctaaatgattaatatttatcttagttttattttttttcctttgcaccgcaacgtacttgtaatttttctagttactataataattagtaataaatctattctacaccctgaataattcctaataactaatagctctcgtccaaccaatcgagcccatgactggcacgtctaattaataggatctttttttttggaaaaatacctaaagtcggtttggcttttctggggtttcggtttttaccgaaacaaatggagcgttctattcgtgaaaagctgaaacccgtgtgtaatgtgttaattgtgtgttactagttctcaaaaaaaaagaaaaagaaaaagaaaaaaaagaatgtgttgtgtggggaactgggggatcaactattccaatttaccaggtggttatttacgtcggttggatgggccaactgatgggctcgagcgggcgagatatatagggccgggctccaaggccctaattaattaaatagcaaaataattaagctagaatatcatatcgaccaaattatattaaaccctagatagagaaataattagagagagaaggaagcaccaccgcgtgcgccatggccgcagctgctctccgccgatcggcggcggcgaccggccgccgcctcctctgccacgcatcagatcatcatcatcatcaggtaatccagcgcccgtacgtgtacttctaccttaattaattaggtcacaccactgcctgcctcttaatttctctcgaccgatcgatcaaccaatctcttcgtctttcatagtagtatgtccctatagctgatcagtactcgctaattttggcctaattaatgaaacttatcgtatcttttttttctttctactaatacgtaatgcctgtttaaagtttattatatttttcttttatgcacgcagcaggtcgatccattgctcttgaagaatgtcgaaaatttggcaaaaaggcaattacttcgtgacttgactaagaggtacgtagtacactattatggagtaatatacatatacgcacgcatgcgtgcttgaattaattgtctctacatatctgtctaagcaacaaagcttcatcttaattattatcatagtagatttaatactatagccaattcatacaatagttacctataaatatataccacactattaataaatgattcctcaatcatacgcacattatatgttgaagtccgtacgttctgcagctgtctataaatatgtagctcgctacttttttctttcctattttatcttctcgatatatgcttatatatagttagcttatagtctgctattgtacttgcttttgctcttagttcaccgtctttcctttttttaattaagcctcatattaattaattacatctgcatgcagattggctaaggagaagcgtgcgtcttctgtagcgccaacctttagagggattgcatcgtcatggccgtttgcttcttgtgcaattatgttaattatggatggatatcagaagcgctttaagaaggattgtaagaatgcagcagcagctaagaatccttaattaggaacagttctaaattaaattagtttgcttcaatcccctggccaaagttcataccaacaacaacttaattaattgatgtgtctttctggatataactgtatatgaatgatatatacgcgtccatctcgtctgtctaaagcctataactaagaatgtaatactgtttaatttctcgcttttctctcctccctaaataaatatgcagagctccttccatcttaatttcctgattacatctcccttgacgcgcctgactgtgtcaccgcaggtgcaacagtctccacccccaatgtgtctcgggcgctcggcaacctgcatcttgctccgcagcatcagggacacatcaccctgcctttgttctgtcgcatctgatttctgttgtgcattacgttatgttgtacgtagtctatgcagcctagattctcatggctagaacctagttctcggtggcagaatttgtatcgagatatttgaacgtatcaactgtggtcgaaattgtttttgtctatctgcttcatgtgttattcatgtaaatcattgctgcagtacctataaatctgttaaattaacttattctggaattatatgaatgtctaatgaatgatatagtggaagaactgctatacccgtgacaatggaatcgagattcaggagtttctttgttgacaaataagaggcctcatataactactagccggccaacactattgtttctattctcctctacaatgaaatagaacaagtcctaaatttggcatcatgacctcaagtaccagaatttggcacccatttataccaagtcccaaatttatgaaaaaaatttggcataacctcccctacattcatggacattcataacaagcgggttataagaacttcgatcacaaaacattcatacacataatatcacatttaaccccccccccctcccccaaagaacttgaaaacatacataggcacatagcttcacatacaacacaggttacatatatccataacctacagcctcccaagtacacatcacatgttacatatatacccataggccaaaaacctcgtaacgtactccttggcttgagcccacaaaatgcaaagtgattgagtgcaccttcaaacatattttggtccaaatcaccaaaacctgaaataaaatcaacacttgtaaggttcgaattacaaagtagtccaatatagcagcctggctagaagcaaccattgttaagttgaacacggaatctaagattgctttcctgaagagctctatcaggatagtgatatgtaaaatgcagattttaattgttgtttttgttttaagtggaaggtagcattgggccgaaatagttttttttagacatagtgctagatatacaaaaggatataacacccatagagcatgagacaaaacagcatatgtgtgttcccataaaactcatgttataacatggcatttcatagatatcagattttgacgaatataactttgccaatggatagtttgcatcacaacatctttgatttcttgcaaaataaacttactaactttcagtcctctgttggaggcatgtcacgcgggccttcgaccgaagctgccgaaaccactataccgacgaagcaccggtcaacgaccaaggcgttcacctagggcgaagccaggacggttcgccatcatgcctaagggactcgccgtgaagtcttcgcttaggatgaagctatagggcgaagcaggagggattcgccaggtggttggacatcttcgccaataggcccaaagggccacacggcccaaaaatgccattcgacataattgggtcaacttggaggcccacttagggggccccgagccaaatgggcactatttaccctcataaatgtcccatcttaagagtatccggccacgtaaattcccctgtacatatattaactctagggtgcatgagcttgtactaagactataaatagccccctaggggtatgtaatagggggatcccaagaaaaattccattattcaataaattactttactattccactcttctactgtgtgaaccacgtccttcgacgtgagcagttgtctttcgacaacactctctaatttgaaatcttttgagttgtaaatatatatgatatatagaactacaatccatatatcgcttcaagtatgtgaaatctaatttgaaatcctgtgtgttttagcttgaagtgtgactatacagaaacgtccttgtgatccaattgtgctgtggatttaggataagttcattgtgtcgacatttgagattacgactacggtattttgcatagtatggggattgttggtgctagggtatatgtgagattgaagtaagagagatggagacaaatatttttgtacaggttcggaccccttatctgacaggtaatagccctactcctgttggctgaaaccggtgttgctcttattaatcataatcacttcaatacaatatttgggataacctatctaaccgttgtcgagttggcggcctagaataccataccatcacttagtcgacaatagggtagtcttcctccttgaatccatactcgacgggaccagagatagcgctagattcctcttgtcggcctccgcaggcaccggattaagtctatctaggcatatatctgatgtcgatatccggtggcatgtcttggcgcgtgttagcttgtattggtttgtgtctatcttgattgttcatgtgtccccccctcctagggggtcttgtatttatacacatagatgtccccttgtccaagtagaactagggagaccaatatggatacaatccgagtagtctttgtagtttctatatagaactccttttgtccttccttatctggaactgcttctatataagaggtctgattccgtataaaacttggtatatggtgggccctgccgagcttagtcaactactattaggcatgtggtatccataaccatgacacactgaccttgacaataaggaaaaaaacgcaggtgttagaaagtaagaggacttgccattttcgatgagttgaacttttcaatcgtggcagaccaccactgccgatggcatggctgtggcgaggatgccatcggcaggtcgatctcctgccataggaaatgtttgggggccgtggcttggtggacgacctcgtggatctccatgcgcaccaagtttccctttggctagaggaagagaaccctggtggctgtgggtggaggaacgttgggaaggtggggaacgctggagctagcacccttgggggtggcgacaccagatctagcgccccttaggtttggggcagctggatacaatccctagctccaacactgcctcatggccagctagcccttccttctcactgccggtggtgacattcttgctcatacaatgtgcgatggagctatgagaagagaagatgaaggggcacgggtgcatggggcgtcgagcgctgggagcctcagccgatcgagcacaagcatttccgacaaggataaggataaatatgaaattacgattttaccctttgaagggtttgtaccgggtgaggtgagcgtcgttaccgctagttacttgatatgtgacggccgtccgatcatcctatttcattagcccatatttggtaccgccctcctctgctagagtgtaaaaattctcataatatagtgttcacattatgattaattatctgttgcattgtttgtgaatggttccggtgtatgtcctgatttctttcgaatcgacaaatgtatgcatgaatgaatatttatatatccatcagtcatactgttccctaaaacaaattagcaccattgagtcagaggtcacagctcaaaattaactaatatactgtaggaattataacatccttgattagaatgggtacgatcggaagtgattcaaattcatatttgttggttgtagcttctttgttgctagcctccttacgggttatgtgtgtaagtattatcggtgcgtgatgaggctctttttgcttttctggcaattgccttctagtttttactctagtttttatgtgtgtaggtattgtaggtattgtctggtgttggtcattcaaaaagataaccatatttctcttttctcccccttgacatagttagaatgacacaaaaaaaatgcaaacacggaggtactaatagcttgtgcaaaatcagtacagaaaattgctcgcgagagatctataaatttccatatactactaaacaaaggagtaaattaattaaaactgtcctatacaacaaattcaaatttgtctagctagaagtcttggtcgttgtcagggctcatcagttcgatcatcttggtttggacgaagaaccggggctctgttcatctgggcggttgccaataccaaccaaacgaaagaacgctttccggtacggtccatatgcaccccacatggcaccaataaagatgctcgatgaaatggctaaaaacatgtcgcgagaccaccgaaaaccatcaagccctatctccacacgtgcgtcatagatgctacgaattcgaacaattaggagcaaatggaaataaataatattagtatatatgacatttaataatacaaaagataagacatacattacaggacataaagcaacaatatgtaaagtttcaagtactcatggatgcatatacacacacacatgatacctcttaagatgttcctccagccttccgacatctattctttttagatcattgagacacttatcaacctacaaagaaaaatatccaaattcatataaaatataaatgagtgattttatggtacttgataggtatttttttaattaaaaaatagtatttcctcagcttaggtgtagtacgcacaaggatatataccgaattttacggtaggagactatagtactagtatctcttagtacctagtactggagtatcgtatggtaaattaaatctctatagagagtgttctcctactttagccaaacaaccaagagaataaagttggtcatgccatattagtcgtcacactggtggagaagtgctttttagtcccggttcgtaacccccctgtagtcccggttttcaaaccgggactaccaatccgggactaaagatcgctatctttagtcctgggtgaaaaaaccgggactaaagatcgatctttagtcccggttgataacaccaactgagactaaagatccctatcaaccgggactaaagagagggtagcggcagtctatcagctgatccttttttttcttttttattttctcccgaatcgagtggtatgcatatcgtcaaatcaaaccccaaatccacatcacaactccacagcacgattcacagattcaccacaaattcattcacaatatccattcacatattcattcacaacatcacaaatatatccacaatattgattcacaggttcattgacaatatcgagtcacaccctcattcacaacatcacagattcattcacaatccgattcatagattcattcacaaatcaaaacatccaaaccacaaattaaaaaaaatcaaaaaaaaaatcgactcaccggccggcctcccatcccgccgccggccggccacccatcccgccgcttcccctccgaccggatctgggggaggggagggcgag

SEQ ID NO: 8709 - DNA, 10041 bp, Oryza sativa
tgcagccccacattcatattgatgttaatgaatctagatagatatatatgtctagattcattaacatcaatatgaatgtgggaaatgctagaatgacttacattgtgaaacggagggagtactttatttcttaacattactttgcatacaacaatattgtggaagccctaacatgctcatctttatccttgtgccgatagcaggctcctctattatcctttgctctaatatgtgtttgcgtgtgtgatcctcggcctttggtgcttctatgtatgcattttgcacggagacgcaaaatgctgaatttctatgtacgcattttgcatccaaatcaacgtacgtttgtcttagctcttcgtgggaactagggtagttttggattgctaccaaaatttatattgatagcctaaatactaaatagtacccactatttatttggattaatgaagccaacttaatttttatgatacccatattaaatttggtagcaatctacaacttcactgtagtatctcaatttgattatattttagtagcaaacctttttttttcgaacttgcaaaaggattgcacgtcaatatattagcagaaaaagagtttttgttacacaaagcaatcaactagactggcttatgcctaaaagggggggggggacttgaagctaggaactactacgacggttaaaaacgcaactccaaacagcgggagggggcagagccacgctacactcccaagaaatccccaaaacaagtaacaccggctaaagaccacagctggccctccgagcggatggactctagaaccactacgaccgaagcgagcgcagagtaaaaaccctggagtttcgttccttccacagctgccaggagactaggagtaccaaggagtcgaagccgctgcgaaggtgctcaggtaaacataccctggaggatgaccaccaatcctggagccagctgccacgagggggagagagggcagcccagcgaggaggggacaacacacggagccagacctgccgagcgaacacgcaatcgatgaggatgtggttcgctgtctcaagctcctgagcgcaaaaggggcaagcagagtggctatcgataccacgcttttggagaagatcggcagtccagcagcgctgctgaaatgcaaaccaaaggaagaacttgcatttagcagggcccttcgcgtgccagagtaagtcggcataggcaaaagagtgctggccaaggaagaacgcctgatactccgatcgcgctgagtagcactggtcacccgtccaacgccagacgaggtgatcctcaatacccggcgagagctgggtaggaaccaccgcgtcccagactaacaggaactgagagatgaccgggacagtgagggcgccacgtatgtcaccaacccaggagttgttcgctaacccagcagcaactgtgcgcgatccccggaagcgtggaggcacgacgtggaggaggtcaggagctatagaagctattgagcgaccatcgatccaccgatcagtccagaagagcgtggactgaccatctcccaggatagagaaggtggatgctgcgaacatgtcggagacgctccgctcaacaggggccttcagatcagaccagtaggggtgtcccgagcgctgaagccagagccagcgaactctcaaggcaaagccagccaccctgagatccggaatgcccagtccaccgagatccctaggacgacaaaccctcatccaggacacccggcactgtcccccattggccgagtccgtacccgtccacaagaaggcgcgacgcttcttgtcaatggctttgataacccagcttggcaagccgatcgctatagaaacatggaccggaatggaagagagaaccgactggactagaaccgagcgacccgccagagtggttagacggcccttccagggggggagccgatgggagactttatccacaagcggttgcagggccgcttttggcagcttgcgaactgacagtggaatgccgaggtaggtgcagggaaactccgagatcgagcaaggaaaagaggactgaaccagctccaggtcaagaaccgagcagcggatcggagtaatcgagcacttggtgaagttggtccgaagcccggaagcggcaccgaagacagagaggatgccttggatgaactcaaggtcttgccgaacgggggaaaggaagagaactagatcatcggcgtagagggatgcacgatgtcgaatagcacgatcattgaggggaagaaaatcacccaagtcagaggctttgcggagcatcgcattgagcacatccatgactagaatgaaaagcatgggggaaagaggatctccttggcgaagacctctctgatgggggaaccgtggacctggcaccccattaaccagcacccgggaagaggaggcactgagaatgagggagatccaatcacgccaacgttcactgaagccaagctaggctagcacctcaagcaagaaaggccagctgaccgtgtcaaaggccttcgcgatatccaccttgagaagaagtcggggaatgcgtttggcgtgcagcgcccttgccgcaagctggacatagcggaagttgtcatggagagagcggcccttgatgaaagcgctctgattaggcgccacaagctcgtccaggcgaggggagagacgagaggccaagatcttggagaacaacttcccaaagctgtgaataaggctaatcggtctgaaatccttaacgtcaacagcctcgtccttcttcggcaagagggagattagggcgtcgttgagggaagcgaaaccttggccgttggtcaggaacaaggagttaagagccgccagaatttcgaccttgatcacaggccagcaagacttgtagaaacggcccgtaaaaccgtcaggaccgggcgccttatcagagggcaaggacttgatcaccgcccagacctcatcctctgtgaagagacagtccagcccctcaagctgcgcagggcggaggccaagagagtggaggtctagggctagttcacgctcgacgctcgtccccaagatggcgcaaaagtgagaggaggcaagctcttgcagcgcatcatgggagacggcaagctggtcaccatcacaaaggcacgtgatgaagttcttccgcctacgagctctggcgtgcaggtggaagaacttggtattggtgtcaccctccttaagccagaccaaacgcgaacgctgacgcgcgatagtacgctcaagcgaggcaagaccaatacacttcaactttaaatctcgccgcagccaggtctccaagggggaaagagaccgactctcctgcgcaacatcaagccggaagacaagttccttcgccatctgaagctgcagacgaacactgccaatgtgacggtcactccagctctgtaagcgcttggccgtggtagagaagcaccaggcaagagcggcaagagggggtaggttggcagggggatgccaggcgtcctgcacgacttgaagaaagccgtcgaacttgggccaaaaggcctcaaaacgaaaacgatgcgctttcggggaggtgacgcaggtatgaaggagaagagcacagtgatcagaggcgatagaagaggccgcttggaggaggcaagaggggaaaagctcctcccaatccgcagagaagaggacgcggtcgagcttaacaagcgtgggcgactcacgctcattgctccaagtgaagcgacgtccgtgaagcggcagctcccggagttccaactcgtcgacgagccgacgaaaacgacccatcatacgacgattgagattaaggttgtttttatcctgatcttcgagaatgaggttgaaatcgcctacgatggcccacggccccgtgcgagaggagcgcagcgaacgaagctcatctaagaaacgaagcttgtccggctcctcctgtggcccatagacgacggagagccaccagggggcgacatcagaagagtgtcgaaccaacgaggcaagagagaaatccgcaaggtgaacatctgagacagaccagacggtcgtccgcgaggcaagcaacacccccccactccgaccgaccgcaggcaagaaagaataatcaaagtcgaggcctagcatttccagaatagtacgagaggggattacatccataatagtctcctgaagacagagaagagagacatgctcatcacggactacatcacgcacagcatcccggcgggcgcgcgagttcagacctcgcacgttccacaccaaaatgttctcgttgcatgatcccattgaggaggaccacaccgagagcagaagagaagaaaccgatcagccgcacacgaccaactcctccgcagccttggccgggggcaaggagctggagaagagcgaggagagcgcgatgatgtgctcctgggaaagtggcttggagaagagggcgttgtaagccgcgaccgcctcggccgtgaccgggcccctctccggaactaggccgagcttccgcatcaggttgcgctgggcgcgcgacactgcgtggatcggcccctcaagcgcctcaagtgccatcttagcagcgatacactcactgcgcttcggcacaacctccaccgccttggcggcgagaggcggcagcggcaaaggcggcgggaggagcgcaggagggagaggcctggagcagctggtgaggaaggcgtgaagagcggcgttgtctgccacagaagatggaagcgagtgcgccagtgggcggccatcgaggtcaaggacaaccatcggcacatcgtagaggacgccgtcgggcacatcaaccaccaaagttggagcctgctgagaaagcggcgactcaggcctcagccactccccaccagtaggcggtgtgcaggcagtcctcggcagagaagtgcctgcaccggaggcggacggcggcacaggcgataccctgggcggcaaaggcacagccggaccaaactccgcggccagggcgtcgagctcgtcgaagaagagaccagtcggctcggcgtaggaggccgcgatcccatcggccaacaacggcgaacgtcgcgagcacagcggcgaggcagggaacgccgggccgccacccgaagggccagacagcaaggaagatgcggtcggcgggtggcaggcagcaaccggtgaagtggcgcagaccggagagacgacggcggctagtgaacccgcaaccagtgagttggaggcaaccacgacagtcggcgagccgaaggcggccacggcggcagccggcgaagaagaggcggccacgatgtcaaccggcgaagcagctggcgagctggaggcagccactacagttggcgagctgaagacagccacggcagcaactggcgagtccggggcgaccacagcaggagccgtcgagccagcagcggccacggcggcggccggcatgccagcggctaccggagagcacgtggtggccacatcggcagctggcgagcccgcgtcgaccggcgggacgacgtcgaccggagaggccgtgatggcgtctgcagcagctggcgaattcgtggcgtccggcaacgccagcagcaagccccgtccgtcgtcggccaacggagaaaatgaggtggccgcatgggctgcatgggccagcgcaggcggcgacccaagcggcacaagaggtggcgactcctccaagtcacacgtcggcccagctgagtccaccagcctaaggggaggggacggcccacccagcggcccagctggcgaagaagagactgggccaggactgagcagcccagctggcgaggccgcgcgcggagagagagccaccgctgccacgtgcggagggggagccgcgctctccgcacccgccgcgctctctgcgcctgccatcaccgcgtccaaagagccagcgagcgacgtggaaagcgatgggggaatcaacatgggatccaacgcccaagcatcgcgagaggagacaaaagaagaagcaaaaagagagtggtcaaaaggagaaacggcctcaaaaggagagatggccacagccgcagacgccaggggggcaccaagtcaggtgaagccgtttgaatggtgggccccacagctggacacgctggcagcactgggaaccgcaccgccgcgtcggcagaccccgccgggcacgccgccaacgccggggagcgcgcctccgcgccagcgacctccgcaaggcgcacatcactgagaacgcctgacgagcgccgctgcggagcaccgtcgcgccggctgccatcgcgccgactacccccgtccaaacctcgcgaagaacgagcgccgaggtcgccaccaccatcgttcgcagcgccaccaccatcgttcgcagcgccaccaccctcaccgctagcaccaccgccaccggccgggtcgacatcgccagacgccgagggggccgagaggcagaccaccgagagcacgtggagaaggacccgataccggagaaggcactgggagcccaacgtcggctcgggaatgagaagaagacgagccttgggaatggcggccgggttgtgcgacgagatggtgactcgaagaaaccggtactcgtcggggcgcgccggggtgtccacagagatgagacgaccgggagcgacgagggccgccgccgtggacgcgttccaggcgtgtgccggtacaccctcgaggtccagcgacaccctgaacggcatggagaaggaggtagccatcacaagccgggtccatggtcgtagaatcagctggtaggggggagccgggatcggggaacgcgagagcgcgaggtccatgtcaccggagttagcgaagacgatgaggaagtgatcgggctgcgcgcagtggacggagaagcggcctgcggggaggtgaagagcagccgacagcgccgcggcggcatcgccggccgacagcgccatgtccaggccgctcacccgggcgaagagagcacgccggagccggccctcctcctctatgagctgcggcgagcgctcgaccacacaaagcgactcgtcctctgagcgaatcggcgacgcactgaagcagagaggaggcggagaaggggcaagagccgccaccggcgaacccacaggcgtggaggcctgcgaggccgagggcgtggcgtcagagggcgacgccgcacggcgcggaaggacgcggcggccgccctgccgctccgatggcgagctcgggctgcgaggacgcttgcagtcgcgagcgaggtggttgagacccaagcaacgacggcaacgcaccgggagacggcaggtcgcaatctggtgcgccgacgacaagcagttgaggcaccggtcctacagctccggcggaataccggtgcgcgtctccgtggaggaaggcttgacggaggccccaggacggcgctgccgaggccagcggcggcgccgacgacggcccggcttccagtccccatcctgcgcaggctgccgagcagccactggcggtggcacggccgccgcggcagcaggcgctgcaggcgccgcaggcggcggtgttggggcagcccccaagacgcccttgaagatggaggctggaggaggcgccttggcgcgtcggcgcggcgccctagaacgctggcgggtcggagacgagggagggcgcgcagccgaggcgccgcacagcgaggcctgcgaggccgagggcgacgccgagggcgggcgcgcagctggggcgccgcaccgcccggccgagggcggggcaggccgtcccgacggtgcagcaggggaggcgggccgtcccgccgtcaccacgaccacagccggggaggccggccgcgtcagaggaggccgccgcgcgacatcgaggtaggaagggaggaagaagggagggaagaggaagaagagagggagagagagacttccttgaacagggacggagtcggggagaggtcgacccgcgaggccgggctctccggccgccccgcgtcaccagaggacgtcggaacgacgacgagggagcggagcgtcatcggtttggaatgttattttcaattgggaccttagggctcctttgattcaaaggattggcataggacttttgtaggatttacaatcctatggattttttcctatgtatgtctttgattcataggaaatgaaaggaaacattccttaggattgcattcctttagttcattttcacaggaaaataagaaagaggtctgacctctttggaaactttcctggcgcgaaagaagggcgcgcccacgcgtgcgcacgtcgtcgttggcgccacttttgtgtgtttggcggtaaaccgtggcccttcgcgcttcttccagaaaaaaagagagagagagaaagatgggaacgagaacaccgaggaccacatattagcagccaagaaagccaactgtgatagagatagacagcagcttgagccggccgctgggggtgcaaggcggaggcgaggctcgccggctcagtcgcgtatgcggcttccgctggggacgccggcccaacaactagcaacacgcagcaaccaagcatagcatccatctggcgcgcaggttgggctccgctaggcggaggcgtgcggcaggtccgccatcgagggcagcagccagggccatcgatttggtatttgtctgcacttttgagctttcatacttgacttattattgacttattagtgcttctgtactttggatctatggattagtgaatttttaagctgactacttggaactagtttgtttcattggcactgtaggtgtaaatccctctctgataaggattatgtatttcttttttctttctttttttttggggttaggaaagcaatgccatcgaaaggctcttctcagatgaccatgacaaatcaacgcaatttgtccgatcgacgagcccagcaacctctatcacaggtttatgttgatgttgacagtgagcatgggactgcagagcgtcaagaaataggtaatatttgcaaattcagtttcacttgttgtttgcatcaaaccttttttgtttcatattgctgctgaaactgaaattgttaaatgtttgtcaaatttagggacgacaaagagagccagatggagtcaccagatgaagatgttccttattgagctcctaacagatcatgacgtgccaggttttcgaacacaaaatgcttggagtaaggaagcatggacaaatattgtttgccgcctgaatacaaaattcggtacatcatttacgaccaaccaagtcaagcaaaaggagcaggatttgaagaaagattatcgcagtgttaaagatttgttggatcaaagtggttttgggtgggatagtgacagaatgatggtgagtgcaccacaaagtgtttgggacacttttgctgatcgcaagaacaaagatgcaattcattggcgagataagtcgttcccatattttgatgatttagctccactttatgatggtgagctttatattttttttatcagtggtttgtttgttttgttgaaatgttttaggcaagttatgctgatcgtgaggagaatataattgtgcaggtcgttatgctgaagggagaactcgccatggtatggaccattatgcaaggaagacaaagaatgcaccagctcattcaacacaagaagcaaatgcggttgatacatatcagtcaccatcccctaattcaaatgctccaggtgaatcaggtttgcaatttccttttggtgaagaggttgagacagccaatttggacttttcacagcattcacctacccctgtccatctcacaaaagtcccacctagctcggcacaaacaccttcagaggttcctgaatctcgacctgggaagaaacaaaagatcaaatctgttagtcctgatgatggatttcatgagagatacctaaaacttaaaaaagaagaaatagatcgatttgctgcaattgaggagaagaaattggaggatccttacagcatcaacaagtgtatcacagtgcttgaaggtttacatggtctacaaataggagatatattggtggcagctgatatcttcaaaggtaaggataatagggaagttttcttgtccttttcaagtgatgcattacgcctggcttggattagaaagga

SEQ ID NO: 8710 - DNA, 13161 bp, Oryza sativa
ggtagcgcgaggcgacgactgccctgggcttcgccgtggcggcggcgcggcggcgcgacgtgctcggccgagacgccacggcggcgccgccatcgaccaccattgatcttgaattcttgattccaagaacacaaaaaaaaagatagtggtttatggatcgaacagaagaacagtagcagctactgcatcatcaaccgatcgatcgatcaatcgctagtgctgctgctagttattatggatcgatgattaatagtagtacgtgcagggttgtgatctgtgggtgtacgttcatattctccaacatgtggtgtgtgccgtacgtacttgcgagcgttagattttggtactgaatttttgtatctttttttttggttgattcgattttgccgtgattacgtacgatcaacgtatacagtatatggtactcgatcaatcgattgttatttacatgatctcgtactgtgatattttagattgcattcttgatctgagattatttgtacattcctggtataggagtatcttggattctatgcttttctgatttattgctagaaggaaatcatgtactactagtctactacaagtcctcttgcttaatgggcctgacgtgttcgaccattgtattgggccttgttaaaattttacactttaggaggccttgttgaaagaaactgaaatactagagggcgatatataccattgaaacaattttgctatatatctgtcgaaaaattttctcctaaaaatttgacagatgtaattactgtacgatcgtagtgtaactatactataacttgcatgcaactacaatgtaactttcacataattttgaactgttagatatgttttaagatttgtgtaagtaaagaaggaaaaacgtcaccgagtgcacatatatgagaggatttgttcccacgactgccgtttcaccgaaatagcatgttacggagagatttttgaaagttaaatacaagttacatgtaagttacagtataattacataacaattgtactataattatatctgttaaatttttaggagaaaatttgtcgacaaatgtataggtgatcccgtcctctattgtccaacggtatactattccttaatcttcatgcaaaattgcaaaccaccctaattttaagatttcatcctatgtcccgatttgttggaaaatcccatctaccaaacacatgtgagtactagattcggctcatttctttcaacgtggattcacagagggtcattatcatggtttatccaacgtggctatgaggtgagtctgactcgagcttgttcccaggttagtttgaagtggcaaggtaactgtgaacgatgagaggggtaagcatggaggcgatcatctgtggtgatcggtagtgaatccacatttaaagaaatggaccgaatcaactatttatgtgtacggaggtaacaatttcagcctagcagccttagatggatgtgcttttgtaacaaaataggttataaggtaaaatatcgaaactagattaacaattggagtggtctatgcaattttgccagaaagaaaagatatttcagggttcttaagcacggattacttgtgttgtttcttgacagattgatcatggtggaatcaaaaggagttcctaatcctaatggctaatggcatcatctatatgaaatgatccatcagtcacatgtatgcctgcctcgctgcctacggcacacggcgcctctccgtgacacacgcatcaaacttgtagctgaaaccatcagttcagaattgcttctccatgcttctcctaatctcttaatgttaacctcaattaatccaggaaatatcatccattcagtctggttttcatgccgtctttttcatgctagtatgtgcttatattcgttcccgttgacattaatgcattgtagtatttaacacagatgatcacatcaaagatagcatcacactctttttgtttctctgttttgctgtctgtctgttactctgttatatgcaggctgatattcctttaatttttctgtttgcttaatatgttcgtttgtgtcggcaagcaatttggtcgtatttgatctttggcagatgtgctgttctctagtgcaaaataatcatagtatataaactgcaaaattaacaccttaaacaatctgggtgtactagtatttctgtgtgtgtttgtcagagctgcaggttatcagtgatcacacgtcaaattgatcaactctgataatcagaatcagatcactgtacaggactaaaaatcatgagaatattacaaacacaaaccaagtatacacagattatcgtgtgtctctatcttgccttcttccctgttgaattctgtatggtcggcattcaactaccagtatatttgaatgtgtgatgtgacgttgatgaattttctacaaattaagaaaaaccaaaatgaatgtgctctagagtattccatgaatatcaaataacggtggttgttagcaagcctgccagtttgcacatctctcttatcctgcgttatcagagatataaataataaaattcgtccaaatcagacgtcgaattaatatattattttcccaattttctattcttcaaaaaagaagtaatttgcttgtaatcatcccatgtaatttggagaaacacaaagagaacaatacacgacaaaattaggataggaacaaaattggttttgtacattgagcataatcctagtagtaatgtacatgaatcagaagcagagcagcttatgtgtacatacaactcatgaatacatacacgcaaacgcaaatagcacatctttgctctactacctacttccccgttttgaacacgagaattttatcctttttccaagtgaattgaactgattttccatgaaaatcatccaaattcctccgttttgaaggctgcctctcgaatgttataatccaagaaggcaaaaggaatcaaagggctcctttcgactctgaatcggatgaacatttctcagaaggcgcagcagcagcaggagacaaggcggctccacgcggcggtggcggcggggcgacgcctcttcctgccggcggcggcggcggcggcgtggcgcggcggcgcggcggcgtccatggagctgagcatctcccacatgacgtgcacgtcgctgtactcgcacgtccgcacctcattccgcagcttccccaggcctgcaatcacgcacacgataccgatcagtctcgtcgtcgtcggcggcggcggcggcggcgaccaaatcaatccaagaagcacggcggcggcggtggactttgactagctacttaccggtggttcgccggaggccgaggcgggcggagaggccgagccagacacgcttcaccggcaccgccgcccggccaagcaggcacgacatgatcgtcggccgtacgtagcttcgattgcactccactctctgctctcctctcctttcgccggcgatgtctctcgtctctcgttctctttctctcttggagctcgtgaagcttagcttgatttataggcgaagtgggggtgggagaggatgtggacgcggcggaggaagaggagcgcgcacgtggatggaaggaggtctcgatccgtcgacgtcgcgttgtcttctacctcgcgccttcacttccttcccgccgcgcacggtcacctccgacggccagggttattcgtgcactcataccggcgaaaatatttagtgccaacttgaaaactacaccgtcggatcgaagagatttgttcacgttatcctgactaaattttttattcccagatttaatcagagtaaaagttttactggagtaaaaattttattcagtgtgacgtggacaaatctcggacgtctatttttttttaatatgatggtgtttggttttttttactacatattttccgcctgataccataacaattttctcacccttgatttgaaattctttttgaaacatggtcatacacacggcacacacacccacccttacgaacacacgtctggacgtattttgagattcattaagtcattactggtaggcacgtcgtctatcactaaaaaaattaataattagctataaatgggagctctttactgagtttgggaataaaacccatggtgggcagttgatctttatttgatttccatatggggtgctctttatttagtttgttttttcgttgttgttcattggatgagaaaatatactcacaacttctattctctcgtcttcccgcgtaagcttttctggacttctcaacggcatattgttttttcaaatattttctattggcaagttgtttttttaaaaaaaatcatattaattcaattttaagttctttttaacaaatacttaattaattatgcaataatctccggctctgttttacgtgtcgaggaagaagggttcccaaccttcccaaaataacactaccaagaaggaaatatatttttgtcagaaaaaaattgtttgaaatcataaattcaaaaccaattttgttttgtattctataatcttaataggcagtggcttaaaatagaacactactctaaaattatacgtttagcaatgttcgaaatgcgaaatagacatggacgatggaaaaatgggtgatggagccagataatttgaaatgtcgttttttgtgacaaacaaaaaaaatgtgttcgtacaagtatctgtctaaactctcaaatcccagttgttatgccaaattaaataaacactcccgatgtggacctcttaatataaagaataaaaacaaagcacaacgcgacgtcgactttcttataccgaataaaaaatgtttcttgaaaaaaaagagacggctggagtaaaatcttttagcagtagctctcgcatatattactgtcacaaattaattcatcctagagatgaaaaccaaaattaataaataaatatcctattggcctggcccaaatgataagatatttaccagttaccatcaggtcatcatctaaaaaagttaccatcaggtttcccttgcatatatagaattgccaacttgttcatgatcagttggtgtcaaatccgtgttagaattaacagtccatctcttcttctgtctcctgctgtcatacacatctgacgaagtagtagtaacagtgagtagtattgagccattttaattaatcagctaaaatattcagctaacagccgccttagcagcaggattagtgcctgattaagcttatctattcctgagctcctaacacgaggcagcacatttcacatttccatttcttcccttgtaaagattcctatattaaattagattggttgatgatcttccttgtcatcttgcaagagcattattgtgggccaaaatcttgatgattgatcacaatctgcatgaccatacacggagaacttgggcaacatgtgctcaaatgaaatactactacatggtattttcctcttcctctcgtgtaacacatgctcatttttctccatccataatcatgttcatataactgcaaaaatatggtcatctgatattttcagaaatcagcataccagcctttatatgtaactgtaaattcagagttcagacatttacttggtagtaactgcaatttacagagttgtggatagcactgtcattcattcgttcaggaattgatgcggaaactaacaggacatgaaggttcagacgtaacagtcagaatcctgagacgcccaattgcagttgcagctttgtcagacaagaacaattctctattccaatttcttggaatggaatgaattttcaggcgtgagtgcgtgtgcaccgttaattagtggaattcgatttggccatcacatctctttctctttcagggtcgcagtcaccagtgtgtacaagccaagttattttttattatttattttgcaaaaaagaatgtaccaatatgccaactttagttttgtctgttgctaatctgatacatacgtgcatgcactgcgacatggtttgattggcattgacatcaccaggttacacagttggatccatctcagaggaaaggaaggaaagcataatcaagttaaatttttttatttaatttgaaggataacacgagattaagttgtgtttctatttgtgttggcttgagaaacagtcgtgcttcattagctagacctgatctcattcattgcctgaaaaatatttcagtcactcgcacccacactgaaagtctgaaactgaaattttcagagttagctgtgtcaattttcaatcttctttttgcatttaagtttactacagaaagtttactcaatgtgtgtgatgctccaatactaagtcactggatcatcacatccaactctctaaattaggctctttgatgggccaatggatgattacactgacacactcacaccccactctgaattctgaagcctgaactttttcaccatatatatataaataagaaagttccaagagctcttatgatccactaatcttggcactttaagtgccaaggaaaagcacattaggccagttttggggggcctgcttagagattgacacttggagcaaacgagtggctcctctttcagattcggtgtagattattgatgatgatcttcatcttttgcccaaccaaagcttgcaattgttggggtggccactagaacaaaaaaaaaaaagagaaacaacaaaaggagattttttttttcagattatcatccaaagaatagcaaagcagtgcatgcgcaaatgcaactatcagagaatggagattggcattccttttgttgttttgggttcctttctaaattctgatgatggtgtatggatgtcatgttaggatataaaactttacttttgtggcatgaaagaaacataagcctaaatgtgcactcaactatatttgcttctcttggactaaggacccccatcgtttcgtttatcctctgcttattcataccgcttattagaaaaaagaaggtataagtaaaacttttatatacttatccttagtgatacaaaagtaaatgttgtaaaataaaccacaattaaaaaaaatacaaaatcaacttcaaaattaggttttgaaattaaaattttggtttattagcataatgggaccattagtacttgatttattcattccatttgtgcagcataccacaatgatcttttcctgcaataatacgggtcgtttcttatgttttacatcctccatttcataatgtaagtcattctagcatttctcattatctagattcattaacaccaatataaacgtgagaaatgctataatgacttacattgtgaaacggagggagtagtattcagttttggtcttctgaccatgcagatcgcagaggctgtttgctctgcacgactagccacttgagcttgacagctgacaacaaaagcgcgttgattttattttattttactttggtcgtcgttagattgcgttcttgttgcataataaaacgacaaaaacagtcttctctcagttcactgaatttgcagtttttacactgaaattatcgcctcagtttagtcagttatcaatcgatcgcagacaccaacacgaacactgaattttccccctattttccaatcttgcaatgccttctctcttgggcccaaagcccagttactgcttacacagcacaggcccacccaagtaatttgggctcaactcccttcccctcttgagcccaaggaccatccggcccaagccccaaaacccaacccaaccagggcgacgactgctaactcctcacctccgctgcccgaccatggccgtacctccggtcctccgccggcggcgacgggctccaattacgccggtgcagaacgccggcaccgccgccgccaacagcttgcgtgcgtgtcccgcgatcgataaagcctcctcttttctcattcgggtgccgccctgcactgtaagtacatggagagagagagagagtgggacaacgcgcggccgcacgccaactgctcggcgaaatgcccaggccaccgcgccgcgggcagcgcacggtatggacacaggtatgttacgtatgctcataaaatgtctgggatccaaaaactggtcacttggcattggcacccacctgtttgcacaaactgcactatatgcacattcacaagctatgtgttgccgaattcttcctttattcatagtattgttgaagtgatttcagcgagtgccctctgttaggctaactactttgtttatcgtcatttattaatttattattattattagctaaaagagcataccttggaaattttgcatgatcgtctaccagtatcttataacctagcacaaaatgctcaacagtaagcaggaaaacatgatggaattatgtatgccatgaaagaacctcatgattgcatataaagggaatatgtataagcagaattagacaacatcttcctccttatttagatgaacaaacaacactcacggctaaacacgtactagtatcttgttgagatcttcctctcacctaggttaatacacaactatgcccgttgtgttcttttgccaaggcattggacgttgccgccttcaaagtaccatttacttattcttcagctgcttctcttgccaagcttgaccaacttacaaccaagaatacgtaaactctatcatacagcttgtcaaagagccggaaataagcaatcctccatatcttgttgaacagcaggacacaaaataccacccagatccccaccacaagtcctataccgaaaccaaaataaaatgtcatcggtttgaattcttgcttgctgctgtggatgaatgtataatttcttgaacagttcttttgaagaggaggtccacaaagtccttcatttccaatatacattagtgatggatcatttgcactgagggtgtcaagttggcggcctgagggtatcattccagataaattgttgtaggacaaattcaagtagcttaggaatgccaaacttgataagctcgatgggattccaccagaaagtttgttcttagagaggtcaagagattccaatgactgcagggtaccaatcttgttgggaatttctccactcaactggtttgaagataaatttaaatttattaatgcatcaagagaagtgatatttggtggaatttcacctgtcaatgagtttgttgataaatcaatgcccacaaaatattgaagtcccccgccatatggaagttgtttcccttttgtagatattaataatatttctccgaattgaccacttacttcgactgtgaccaaaccagaactcatactagcaccagaaaaaggctggaagcctttcattgtcatgcctgtaaggttagatagatgccacggtatagcaccagatatgttgttatctgataggtccaagtactggagagacaaaagatttgtaattccagctggaatgctcccagaaaatgtattatgacttagtcgtagaatttgtaaatctctaaagtctcctatccacgcaggtaagctcccaaagaacttattccatgcaagatccaaaaactgcaggcctgtgcagttctgcaaaaaagccgggaattttcctgataacgtattgttgcttagcaggagaaaattgtagctgatctcagaacattgtgggatttcacccaccagaaggttgcctgacaaatctatatctcccaacagttgcaattcgcaaatagattgcggaatgttgccaccaattcggtttgaatacatgagtaatgtttgaagctctggagcttcaagatgtggcggcagtgttcctgagaatgaattgttggagatgtcttaacacattgatttttcttggaaaaggaggtattggtccagtgaattggtttgaactgaggtaaagttgttcaaaagccatgtcacctagatgcgctggtaagctaccacttatttgattttgcgacatgtccagatatgtggcctgggaaaatgttgaccaaaaccaatcaggaatcttgcccattagacctgtgcttgaaatatcaaattcgatgattttgtgctgccactgaagccaagatggaaacagaggcccaatttgacaagatgcaagccatgcagactccagcctgaagggtggaagccaatctgaatccattgaaaacttcaaataattggaagacaggtctatgttcttcaagcttatcagacctgcaaagtgttcttccctgataacaccactgaaagtgttattgcgtaggaccaaagaagtcagattagtaagcacaccaatctcagcaggtatgcttccacttaggcgattgctggagaggtcaaggctggctaagcttaacaaatgcataacctctgttggtagatgtccagaaatatcattataagagagatcaaggctaactaaagacgtcaagtctccaatccctggtgatatacttccaataaggttgttagaggagatgtcaagcatgcgcaagctcgtgaatcttcgtatcgaatttggcaaggctccagtgaaattgttgtaactcaaatgcaactccagtaattttttccttgcagcacactgtgacgacaaaccgtcaatcaacattgtcatatctccagttatctccatgttggtgagatctagtatttccaaactgcatagattgttcagctctcctgccatcactagtccttgttcagattgttgtatgaaacatcaaggacttggagagatgtcatgcttcctagttgttgtggaaattttccaaccaacccattgtaggatagatcaagcatctcaagttttgtgagattgagatgacaagtgactggtttgcattttatatagtagcggtaaattatgaagtttactacattgtttagcaaattataattaacatgagcatccttttagactaaaattgataacaacaattaacccacacatttaattaacatgtgattaaaattttaatattcacaataacaaatatataataatgtcccgtgcaatttgatcacggctgattatcagttaataaagttctactagcacataaaaatgccatattcaatgaaaaaggggaaggtgaaaagtataaaaaaaaaatttcatttactcccaaaaaaaatgtcaccagtgatcttaattctatttattaaataaagacgcatgtaggaggaaatacatcaatataaaatgtacgcatacagatcacgtcccgcttgttttagtgccatctgatcaatgacactttcacgtacaaccatatgaccttggtacgtggcaacattggcaacgatgtgatgtttcactttctagctgaaaaaaaaaatacacgccattcatatatgttggccagtggccacttagcttcgaccaccaagtggagatgatgttcatcagttcatcactacaccgaggtatcatagcattaaagaactttatgaccaaccattttgattgtagtttacatgcatctatatatggattgaattttgcttatgttttccctttacatttgtgcaaaagaaagcaataatttgaaaactggattaattaagctcagtgtaagaacaaccatgtagatgatcatcagttaataattaattgagcactgcacaattgcgacgaatgttgccttgcgacccggtcttgaccccaacccggcccaacttggtcatagccgtgacgaaggcctggttgaaggcggcgctgctctgggcccaagaatccacgatgggcctggaccgtgggtccgagtacagcacctggtcagagcccagaaggcccatcccgttctgcaggttcttgaagtactggttgtcgaaggcccgcggcgtcaccgggtccatggtcacggcgatccgcgggtccacgttgggtgggcacgacctctgtagctgggctgcgtatcttgggctcatcgttggatccaccgacgacccacggatccgacccaagaatgtgttgcagtgtgcgaaccccaccgtgtgccccgctgcacagtttaacatgacaatgaggtcaaatgtatacatacaaaaaaatacagtaggtttttgaagtagcagtgagtaacaccacactactacaaagcggatttgtactggggtagaatctattttcgcaagcggacgaagcgtccaccatattggctagtgaaaatcgatgaagtgacatctcggttttttattttttattttagtgacagtatgtaaagatatgtgacagctgagtggctcagattgattctacctacttccttcgtaaaaaaaaaggacaacctaggagaggaagaggggatgtgattcctcctaattcaacgaatctggacaggtgacacgtcctcttttagattgcctttttttaaaggatggagagagtaggtccaaatcggaatgtcgtgacagggcatgttgctataaaaaaaacagctcatgggcaagcacatagttttgtctcttcatgttgggctgttttccagagatgggcttgggatcgagtgatctcgatggatggaaggatttgtacggttgtttgtacagttgtagcagatggttccaaccacaggcaagcatggttggtaggagttggattgtgtgcaagccagggaatatttacttagctacagagatctggttgcctttatctctctctcagatgcaacaaaagctagcaatatgcatgcatgggagatgtagtaactatgcttaagtaggagataatacttagtacacatgaacaagttgcttttgcaattaattggttgcctaatcattaaagcacaagcaatcagtaattggtagtggctatttctcagagtcactgagtagatatgtactgatatattatcaatatagttgccttcacttggaagaccagaaataattgatataattattttgagaaagtgttttcatttttttagggtatatgtcacctaagtacgtagttttttttaaaaaaataagatagattaacataagttattcactccacaaacatatttgatttctaagagataaaaaaaatagatacataatactagattcagtttaatttattttcgaatttaacctttgttagtatataactcataaatctatatattttcttaattttttcaatgatcatccctcgagaggaatgagaaaaattgaaaaaccatcgtcgaaagattttgattaagtttaattgatgggagctgttcataactaat

SEQ ID NO: 8711 - DNA, 21724 bp, Oryza sativa
agggggtgagagaagagcaaggggagaggatggaaggagaaggatggaaaggatggagataaggaaggagaagaaaaagagataaggatgggagatggagagagaggggggctgcacatgcgcttgtgcgtgggctggtggactggtgcatgcgctttcttcccggttgatgttaccaaccgggactaaagatctcagagggcctgacaaggtctgacagatttagaaccgcatctttagtcccggtaggtaacaccaaccgggactaaagatcaaatatgcccgctgtagtcaccaaccgggactaaagatgatctttagtcccggtttgtagtggaactgcgactattgtggatttcggccgaccgaccaaagatggtttctccaccagtgtcatcagccataatatcccccgttaaacttatgaaaaacaaggagaaaattaattaaagggctatcaacaaactgatgtaagtattttaggtggaaaactttgaaatataattctagtagagtagagttatagtgtaattacactgtcagctatacaatagttaaatttaacttttataattttctatataaattaaaaagagtaaataatttacataactttctataactcttacaaaggaaattttacatagaagtaacaatgctataatgtaattatattataattatactaatatggttacaacatagttacactataatatattaattgtactataattacatttgaaacattttcctcttttctgggggaaagatccactactagaaaaaacgattttctctgcaacatatatatgccctagctagatatagaaggggtgtacgtatatgctgcgtcgatctcaccttagagaccggatcccacgacgaagagaaggcgcggtggccggcggggaagtgctgccggagggcaaggggatgagtcgccgacgctgacgcggtgcgacgacgaattagggcgcaggcgagagatcgccgcaggcaattagccatcagatcgatcagatgaattagatttagggcacaaaaagcttaattagctagctaaaagaatattgaagctaattatatactgtatcatctctctcgtacgtctcttctcgatctgccctccacacgcggatcgacggctcggattaactatctgcatatatttttgctatataattaaatttgtctagggtgtagtttggatattgatttattgatagtaaatcccccctgtcacgcctgcaagtgggggcccagtcgtacatatgatcaactcgtactcgtgtgcttttttttttaactagttattatgtacccatgagttgcaatggtataccaactgcaaattatatcgtacgggatgatgttaaataatttaaatgatggtaaaaaagagaatttttaaatgtctattggcagaaaattaggtcaaaatattgcaaatttctaacattaggatttgcttcgtgattcatgctctgacgatccctggtctttctcctccagcttcaccaaccggtgatgatccggcgagttacgattcagggtcccgggttggagtgatgatgggaaggggggttggggagagaggggagatcgctaagcttagagggatgatcgtgtgaggcggctgcaggcgtcagactgggcgctgccgcgtggtcgagaatgagcggtggatcggtattaaatgcagaaaatgtaataatgacacctactttagggaggttgtagtgcttgaagcaccgtcgtcgtcctcatccatgggatcctacatatggattagtttgacccgaaagttcctgcaactatacatcgattttgtacactcaaattgaagttgttgccaacacacataaaaccaatctccaaattaaatgaatttctcttggaaacatagcacacgttcgaatttaaccttggactaccagtccatcggttcgatcgcatttaaattatagccaataatataataggcctatattaaaatgttgtcgttggagaactgcgcctagcgcattaggcagggtctgcggtggtgcaccctacagcctctgttcaaatcccaacgaatgcactcactactctcttaatatatatcgatatgaaagccctttcttttatatccaacgtctttttaaatgttgtcgtttactgtcttatgaaaaaaaaacctcaatcctaaaatataacaagttctgcacataaccatttaatttgtcaagttacagttattattatcttgatcagcattgttagtaataaagaattacatgacaatatattataatcaatcagtactgaaggagagagaccaattaaacgacgacttagtgaatctatagcacagattaattaaagagagaaattcagaagcttttcgatcgatcgatctggactcgtcttaattcttggtctcctgagcaggtgattggcgttgaggagtgatgtacttgtccatgattcgttcagtagaggaggaggcaagcaagaagccgacacagaacatggcggcaatgttgatttcccctactacctcctctctgaacttccccttgggcacccccatagctgtcagcttactgcatatatgcatacatgtattgacatgtagatttgaagaatgtgatggattaattatgtattgcaatgatgcatatatgcatgagctaattactatatccctcgatctgtataaaaaaatgcaaggcatgcgtctatatgttattgacacgtagtacgtctccaatttaattaattgagtgatttactattcttatgaaatttgcacataaaaattttggtatctattgatatctatttaaaatttatctaattaattactttcataataaatataattaacatatacgaaattaatgttatatgaaaaatatttttagatacgattatattagtggtaccacatgggtgacattaaaaccagatgaatactccgccgccacgttgctgcggaaaggaaaattaagttgcatagtatgtacaaacaagatgcaatatgattattaaaaataaaaataattaatatttataaattttgatcctaaaaattgagatcacatagcgttatgagagaagatagaagagacaatttaaactatagatctatcattcaaaggatagaaataattagctagggtgatgtggcttaataagagaagagagaaataacattaactaaacttagtgaggatgaactatacaagtatatagtttatcatagatatatagttagtttgatacttaataatgacgaaaagtaaggacgtcgatcgggagagagagtactacctccatatgagatgggaattaaaaatccgttatattttaggacggagtagtatgtacgacataccagttgaagaagccgtgttgatgagaggaggtgtgagcgttgatggcgtggaggttggccgcgatctcgtcgtcgagtttggcctccatctcccgcatcgtccggagcatctcctccttctccgccccctgcagcttcctcatggctgaccagcaagaacagccgggcttccattgccgccctagcatcatcttccctgggatggatcggagaagacaaagataatacgaccaagccatggcgccgatcgatcggatcaaggatcgagctagctagctaggacggaggtattaatttaatttctgttaagttagctagggcaggcaggcaggcaggttaattaatttctttctgattgattgatttcatatcatatcttatcgtatgggatacgtacggcccatggtacgtacgtacgtggctcggcccaaattaaaccaaaaatcacacttcaattctcctagtataaagatctggtcctgaacgatcgatcaaaataaaccctagatagctagagaccagagagatcgagaatactaactaataataactcgatcgatcataaaagccatggccgcagctgctctccggtgtcgcttggcagccgctgcgtcgcccggccgccgattcctctgccgccgcgcctcaggcgatcaggtattcagctcaggttcacccccaccaattccacagtctctccatctcctagtccatctactgctcctttactagctacctacgtaccattcaaatcttattttaactatatatcttgacaagtaatttaaagattagtaattttccgttcgttacaaatatttttcatccgtgcgtcatatgagctgcagccgtcccaagatatgaaaatatatacaaaatatgggctttcagctcagtccacgcgcaaacaaaataaaagaactacacatgaaaatcccaggccgcaagttcagacgcgagtcgtctcatccttcctcctcctgcaatccggtggcttttgatgtttcatatatcagttttttcatttaatggcacatgtaccaaattaaaaaaattaaaggtgtcggttttttgtcggtttgcacctataccacggtttttttgggtttacacctataccaaattaaaggtgttgtttttttatcggtttttctctacaaccaacacctattactttacaaatgtgcccgtttttaccgttggtgcccccgctgtcgttcgtgtcacaggtcattgcatccacacatgttccttgcgtctctcccttgctttaaaattagctccatcggttatactccagccaaggagctaagataaaattaggctacattatcactggcgttgttgttgtacatacttgtatacgtgctattgatcgataagaaatcatctgcatgaataatgttcaaatcatgaatataaaatcctaattacctaaagtttaacgtgattttaatatattttccgttgcaacacatgagcaccttttctagtagttataaaaattagaaaaaaaatgataagtagtgcatgcttaaattattttgacttctacaagttaaaaaaaattattgtgaacaatacacatatactggttagaattaaatttattatttttgttataacttgtggagatcaaaactgaactttcttgtttgtgtattgctgtatcacataattctatattgtcaaacttttttgaatcttctctaaaatgggtcatttttctcgagggattcgaatctattttcgctattataaaataatctgatgcagcagcaggaaagggatgcgctactgaggtgttgcgtggaatccaaattgcacagctacaaggcgactatggaatatgctgatgaatttaacggcagtctaaggtacatctggcattattctagatcataattataactaggtgaaacaccgcgtgttgccgcgggagtttagtatgataataagaaatagaaataatgtgtaagatagctagacgatagaagcttgcataagttgatatggtttatcataatttaaatagtatatagaatgatgacccaaatttaaaagtaatatgatgtggttttatgagagaagaaaatgagagagataattccaaccattgattaattatttgagggctagaaacaattgaggtgatatggcttaatgagagaagaaagaaatagcattaactaagtgagaatgaattgtataggtatatagatattatataaaatgatggaaagatatattaaaatattttgagaattatgtggaatgatgatttaacatgcttggatttttttaaagctctaaaatttaagtaagaatgaactatataggcatataggatattataaaaagtgatggagaaatacattgaaatattatgtgaattatgtgggatgataatttaattaacatgcttgcattttaaagctctaaaacttaataaattagcatgcttgtatgagatttgagatgtagtaaatgttagtggatgatgtggcatctttgcatgttaagctttagtatgtagtgggcctgaactttatagaaagataggactagttggcaccctgcgtctttgccgtgggttatgtagttttatcgtcaaacaaaattatagttttaaatggttaggtgcaactctatgtatatacaaaacatatgataatatggatttatatatgccttatgttattacaatacaattcatactttatttttttcaagcgtcattgtatattgttataatatatgaatattattttcatgcgcaatatgtgtatcgttatagttagacaatttgcatgtctctactttgctcaagtttttttttctggaaatagatttaggtaaaggtacctaataattatatgatatcttatcatgtataataatacataacaaatatattaaacaataatcacatattaaaaaaataatttgagttgtattaggaaaatatggtgttatgcacaaaatatataacagtgttttgtgtgaatgtgaggtggagcaaagggatgtgaatggataactaatgaatgattggattggatgaataagtagcttcttgatccaacgggtattatctttgtactaatatgatctaatggcttaaaattgttgatgatgtgacttcttgcatgtcttactttataggagtaaatacatcttagtgggtaccaattacataggaagataggattagttgattatattatatattgatccctgtttctcacttattcctgtctactagctactagctagtacctggatctatcgatatctcttgtgatgtaattcgacatgtggtagctgctgcatgccttaaaatcaaattcgtcatgtctaaatttggtcttattaatttgtttcaggcgtgcaatgttcggcatgaccgcgctctccgttttgtgcccttttgttggactagtcagtggattatgggcatcctcgattgcccttacagacgacgacgacgatgattagcccttgcagacgagattgatcgacttgattgaatacgcataacagcatatatatatatatatatatatatatatatatattcagttttcatacttaattaattattagcctgctcgatcgtgccatcatatatgtatggattaaatttgttgatgctatatatatgtatatatatatatatatgtatatatatatatatatatgtatatatatatatatgtatatatatatatatatgctcctgttgactggacatgcgtacgtgcatgtcggcatgcatgctactatctgttttgatcatcgatcgattctctgcggaatagtatattttaatcaaatcctgttttatcatgataaaacatgataaaaaataacctcgagaaaataatcaaatcctatttatgatgatcactagaggcaccatggtcaactcccatggtagtaggcgcgcgcgcaccaagttaaagaaaaccacatggaattaatccattatgagtttcttccatatggagtcatcgaggtctaagcattttatcaaacacataaaggacgtgaccttggggaggaccttggtgatgatgaggaggttgggtcctacatgaaagcggttaatctcctctacatgtattccctcggacgtgaccttggggaggaccttggtgatgatgaggaggttgggtcctacatgaagacggttaatctcctctacatgtattccctccttgtctatcttcttatcgtggctacttatggtgaatttggtggaggatttggtgacgattttctctaggaaggaaggggctcagatgccaaattattaacgaagcaaatatgtaaatgtcaacaatttcaaaaggaacaaatatcaagtgaacatgggatattttagaggttaaagatggaggaatacaaggggcttagaaagttgtagaaactaggaaatgtggaggtagagggaataggtactcaacgaggatcctagcccggatcttaagctgccaccactctgctcgcctagtcgccgactctagtcgttatattgccattatttttttaggacaattgcgtttgtaccccactttcgatctcaattgtgattttactcttcttttttagggtttgcgaatttgcctctgcttttttcaaacgaagccaccgtttgcccctattatggatggcagttaagtaggtcccataaaactgagttgaataaatagaaatgaagaagaaaaaaatatttcaaaaatatggtacctttctacccccaggattatatagtaaccaatcttcatctggcttcagtacactcaccattccccaccattccccatcgtcaaaccgatgagatacattcctgccagctgacgcggcgtgagggctcatccagcgtcctggcgcattgagcgagaatgcgagctcggattgatatactccgaggtattcaactcccattgagcaaaaattttatgtaaatgtataagatataaatcacacttaaagtactatgagtaataaaacaactcataacaaaataaattataattacgtaaattttttgaataagacaaatggtcaaacacgtgagaaaaagtcaacagtgtcatctgttaaaaaacggaggtagtatatgcctccgtttgtccaccatgaacagccaccacgtgtgacccggctgcagtgctctgctagctgtgctggtacaaccttgattaatttcttctgcagggatgtggccaagtaggggatgaaggacatttgccatgtctttcaggctctccatgcctcgctctagctaggttatcactaacgcttaccgcttagcaagcactgggttatcgagcaacatgaagcttaatttgcaacaacttgatgtattatttgatctgtgaagctttgcaatagttcgatcatatataaattatttcacaaattttcagttcaaagcagaataggagcaaaaacacaactaatgtccgaaagtaggggcaaatatatatgcaatggcaagtaagggtataaatgtacttttgtgctcaaactaacaccgtcaaactaatcatcgactaggggcaaaactcttcttcatttcaaaaacacaggggtaaaaacgcaaaccctaaaaactaagggtaaaaccacaattaaacttcaaagtacgggtaagaatacaattgcctcttattttttcgatgaatccttgatgttatgctgctgcggggaggtctaccgcatgagtgactgtacgtgggctcgaacacgcggtcaagccatgtcgtggcggcactccctttttttccgttatgctcccatagatggtttttttaaagaaaaaattaagagaagaaaaaaaattactaatagaagcaaaatgatgctgcttagctagaaatattcgtgtgtataaagtttatacatattcatacattaaaattttatacatataaactatatatgtacttttaatcaagcaaaattcttataaaacatataaatccgaatccgcatttgcatccaaaatcgtgcttagaatcgtaaaggctagcctatctttggctggtactaagggttgcatcagagtttcagccgatcttatcttatatgcatgtttcttaatatgttttatgtaaatttgccacttatatagaccgatctttttatagcattgcatcaagcctatgtcgtatcggctgggacaccaaaattgattatcggcttattcttgataccttgctatagattggtctgcctatataggtttgtgctagagtattagctgacacgttatctttatcgctccaaatatcatcttatcggcttattcttgataccttgctatagattggtctgcctatataggtttgtgctagagtattagctggcacgttatctttatcgctccaaatatcatttataggtttgtgctagagtattagctaacacgttatctttatcgctccaaatatcatcatatcggctatcttccttagtattgtcttaagctccttctgttaatctccatagacaatattggagccggtagggcatgtttaggggtttttatctaccaagtctgtaaccggtttggtattatccaattggctagaaccaccaacgatacgctatcggcctatcggctatcggctgactaaccctatcttttgtttccttgctggttacaggatcaaaccagctagcatgcccttagcacctcgaggcaagccttggacctgcactggagctaagtagatctcacagaccgccgtgttttcttgtgaacagtgctcttggtctacaaaggattaaacgatattgggcttggcggtgcctgtttggtctaatcattgcaacataattactggattatccttccaccttaattaagtaaatgacttaaatgaccatcaaaatcaacgatgggatttattcttagttaggctgtgtttagatccaaagtttagatccaaacttcagtcttttttcatcacatcaatatatcatacacacacagtttttcagtcacatcatttttaattttaaccaaaatccaaactttgcgctgaactaaacatacagccttacactactactacatccaccaatggtaggtactgtaaaaatacctaatagctaggcacacctttacagctgtggtgttgacatctcctgcttagatttttggaagccctcgaaaagggacctctcgtattggtagttggcatatcttcctccaagtttgcagctgaagaaggtgataacggctaaaccgaataatctacccctgaaacaaataaacaaacaaataaataaataaagagcaaagtagttagataggggactttaagggtaaggacttatgtgttacccctaaaagtgtcacattaaattagatgatgaggtggagatcgaagggaagtgaaaagagaacataacccaactctcatgcaagaggcaaaaagaaagtggaatagtgtgagagtggaccaattcaagaaaatgttaggatttgtgtactaaaagtaacataatatgcatgttacatcttaataaatttatagatgacatagctaaaattagatgtggtaatcacatccgctgtaaaacttgtcgtcttgccctaatgtagcagtaacagcaattactggtggttgtagagctagtatataggcagtaggattacgagcatatatatctcaccagctgacgatttgcacttcggaattcacagtcgccgataccacctccgtcttcgtgccgccgctgttctttgcgagcttctaatggaagaaatataatcaggcataaacatataaatacaccatataagcaggtagattaattggttacaataatcgatcgatccagtgaggcggacctgatgatgatctgacgccgcgttgcaaatgaggcggcggctgacgatgccggcggtggttgccgacgagcgactactcagggtcgtcagggatcggagaacagtggccatggcggcgagcgagcgagcgatcgacgacgtcggtttcgtctcgtttggtgatcagagtcgcaacgggtttctgaccaaaaatatataggatcaatctgcgatgtgttctaatccgactcggagtggacggtattaggcctctacgtccaccaagacggacatcaacaagactagtagttgattgaacacacaaacatatgacgatggacaacctataacaaattatcactactacagaaatacaaattagagtcgtttgggaaccccgcatagatatcagttttcccaaccagcacccaacaggtgacacttatgagagaaattaaaggtgtcagtttaggaaccgacacgtttaacacatttgaggtataaaaaaaagtggatcgaacagaaacatcgagcaattgataccaatcaaccatgagatccctataatcaaccatgagtacacgtcgtccgttgtatttatagtaccatgaacggcccatgtttatccgaatgtactataaaaaaagtggatttttatagtcatcacgagaggaggtaccaaatcctgtacgtcaatgtaactagatctgacagctgatgatcctcagtaccgtgaggtactggagtatccatgcggtggtacctcccgtccgcccgcatgcggttagcaagtgaaagggcaaaagtggattttcgcatcgttttcggttgcgctgagtcgctcctttcccgatcccctccttggaacggcgcatccctttcctccaagatcgccggccggatccaagaagtcaacgacctcagcctccctcactaccacctatcgctgccaccgcccccttcttctccttctcctccccctccacccttctcgtcctagtcctagatccagaggccactagttcaactcccccatcccattcacatggtggacgcctgatttgtccatggtgagggaggagcatcagctttggtccatcatacatggtgctggagatcgatccacctgaattttggcttttcttttcctcacccaatgatgttcctgtgtccaatttttttcttacacgatggtccatggcaacggaggagctgatgctatctagttcatggtgatggagatccggtgtagattagttcacggaggagtttaggagctcgtccatgtccatggcgaaggagattcccagcctggattggcatttactcctgtgcggcacttaccccaagctcgccagcgaccccctcttccgacggtccgaccggacgagcatggtggatgagcagaggatgcacggtttctgcctcgcggggagggggaggacctctcaaccgttgttcccatcgtacccttttagaccttttagattggacggttggattttacttggtacctggaagtaccagttgccagaggtaccacctgttggaccatagcaaagctcataaagaaaattcaaatccatgtacctgttggaccgtagcaaagctcataaagaaaatcctagttatttgtttaataggaatcttatgtatctctaaaaatcttatttgatctgaaagagaattttctcattgaaagaaaaaaaagaattggcagctatatatggccagaaaagattatcagtctacaggtgctaaaatctattgcatacctgctgaataccatctacggcagaaaggagcaatatgtgagaatttgtaaactaagacaatttctgcattataagtaaaattcacccacgaagtacatcggtaaaaaggttggaaaaacatgattagctcagaaagctaaaattctgtggctgtcaagtaggcagacatggcatatttctgtaggttggtataaaacataatgaataataagattttcatgaagcatcataggcagttccagtgaaaaagaaaagcatatccatattcaacatatcaattccaagtggacttggtcaagcatataaggtgcaactgatacacacaattcaggctagatcacaaaaatgtcaaaactaattaacaagtaattgatgtaaactatcttttgcttaaaatgaacttgatcagccaagattgctccctgttttcatagacaggaccaaaagaagtcatagcatactgatcgactcattcccaaacaaatatagagcggattatcataatgcgaacagttatcctaatatagcacggctcagccacagaacaaaagatgggatattcatagttgtcggaagttgtcagacacgttaaatcattaactaattgttcatatgaaaggggggcaaatcattgacaccaaggtgacaatgcctctaggtatagattagtattacaaaacaccaactggtctgatccctacatgcatgcattaaattgacatcatcactttggaagctctccctctccattgagaatctcatattgttgtccaacttcgaagctgaagaagctgaggaggaggcttagtccgaatgctctagtcctgaaataagtagtgaccaaattaaattaattagaagacttagcagcagctagatagaagaagaagggattagaatcagggagtaaatagtaattagttagtaccagaaattaggattggcatgtgcatctccccagtggctgctgtgcactttggattccagagaattcttcagtaaagcatcacttccctgctgctgatactgcatagttgaattagggaatcaagcagagcaggaaggcataaataagcagcacaaagcagatagattagattggttacaattgataggaaacttgaagaccaaatgtaataagatgatgaggagatggagaaattacatctatttatccttattcttgcagtgaaaaaacaaaggtggcaatagaactaccttgtccaaagtcctgaggatgagccttcgtagtggcactttgaatgatttaaaactcatattcatatccttttctagttccttcacaaccatcccaaattcttgagaaaatgtcttagtgaaacccttttgttttggaacatcaccgagcgacctcacaagcgaattgataaggcgccttactctagcttcattgtgcttggcatacacctcattccagatcaattcttcaagcagtgcttcccgacatcgctgaatgtaatgaagaagaaaagttagttactctatcactgcagaaatgaatgatttcttattagcagaactagagaagcgctattattgggataaatcataataggttaagcttgaagtgagcaccttgaccatccaatgttcgaatatattctctaaacgcttcttgctgtctcgaaaccagttatgatatttctactcaattcctttaacaagtaacaacaatccagcagatacccgtaatcaatagaattgtcacttaatcggtgttagcttgtacacataaattagtactttaaccataaagttaggaacccaagaaaaatgaagaaactgattggttgtacgctggtgctctgctaatctatcgtcagaccatcttagccgcgtgcccgctatccggagatccccgaactagcaactgctctgtgccagctacgtcaaatgacaattttacagcagagcttgatcgatcgcttgctccttgcctctgtcatcactcgccaccgtgacaacctacgaaacattcagcatcgttgtttagcaggggctgttcacaccagaagctaggtatggcagctgccacaccttgccacaagggagggtccgcccatggctgtcatgccgtcagcctcgagctttattcgctttttctcctgagttttttttttttcatcacacatgcagttccctaattctagatgtgagcatgtaaggttaggagttctatttctaagcagcatgcacatgtgaacaggtacttcggttgaactgatggcctgatgcccaacaaaataactaggctatctatttaattaaatgtcctatgcagttccaaataccaaaatgaaaagcaatatctgaactcaagcaaaatagtttgctgaattagcagagggagaagcaacggaggtcgaagaaaattcaaggctgatagcaagatggcagtcagcaagttgacctattttactcactctcgtaatggttcatctatcatccttgatcactaggtagtttgactaacagtggcagttgggctatacatcgatttaccggtgcatattagtttgttggattaagagttcgatggaacaatcagtgcacacgtgagcatcatgcctacagatttaacttctggatttgtgtgctcacatctagaattagagtgttgcatgcgtttagatgaaaaaaaatcggccttttctctgtcctaatccaccaaaaagtattgtttgacttagagaaatgggaagtgcggcgaccagttgaaatgtataccatctgcttggatcgtcaagatcataatatggagtagcaatcttgatttgtttcacataaaagcggcatcagcaaggagaggaaaaaaaataacagggtcagggtgatgtaattgtaatactagcgatatctgttagtggatcatttgctttgtactattgtatacctactagtttgactagaaacagaattcaggacactgggtaggtgctcacatttggaattatttgtgttgcacgtgcttggatgaaaaaaaaaaagggtagaagaagtgaaatgggaagtcatcaatcattactcttgctacaaaatgcaagctgttcttgttgccatcttctcaaacaaatgaaacaatcaaagacctgacaagtaaacgttgttgatgctttgaccacaaaaaaaaaaaaagaactactccagatggaagaggtgcacaagtgttgtctcacctgaatggcgtgtttggtgttggaggcggagaagtggccgacgttgggggcggagaaggagcgcgcggcggtgccttggggcaggaggggaagggcgcgggcgcggcggaggagagccccgagagccatcttgccctagccttccttcttcctcgcctctctctttctctggtgatggtgatggatttgggaggagaagccgaagcggaggtgggggagtatctctctcgccatccatctccgttccgttgtgttgctcccgttctccgttccgttcggctgcctctctctctctcaaggctgtgttcggaaccctcgcttcccggcacgtaaaacaaagcagcacttaacacgtaattaattaagttttaactaatttttttaaaaaatagatcaatatgaattttaagcaactttcgtatagaaaccttttgcaaaaaaacacactgtttagcagtttgaaaagcgtgcgtgtggaaaatgagggagaggggatgagaacccctgcaaccgaacgcagcctaataatgaggcctggaggcgcatgtgaaatctcatctctacccttccacctcaaccctcaaccattcttcctctaccgttggatgccacggatgcacacatggcaggtagcgagagagatggtgccgaccaccgtaggatgggattgagatcctctaacttaagtcacatgactttgagtcactgacatatgggttttctttgctatgaacccacatgtcagtgactctaaaagtcacctaacttaaggtagagaatctcaatcaccggaggattatgcggcaccggacacgtgctgcgagccctcgtcgagtgggatgttgctctgctgccacctacgtcttctccgcatgcctttgccaccacctcctgctcttttcccgttgaccgaagagggacggagcggcgggtaaggaggatgtcgccccctgcttccggctctccttcctgcggtctctcatcccttgcgctcgccgccgcgagggatggtgagaagtcccgtcgacaccgcagcacaccgctaagcgtggagtgtttggggaaaaatatagaggggagaaagaggctgacaagtgggcccctttttaaaaaaaatctaatcacttgcatgtcaagtgggggccaccttctgtcccccttactatcatatctcaccctctctccacctttcttcttatcggtggggagcggcggcggcggggctctcttctctttctcaccctggccctttcgggccgacgatggtgacggagtggccaattgagagccgggatgtgaggcggcggtggagaagacggcttggaggaagaagtggagaagcaaacaagcctgtcgttcgggagcacgtcattggcgagggcctccttggagttggcttacatatgggcctcacttgtattttatgactagcttgccacatcagtaaaaaaaggttgaccaagtcaaaggccacgttagcgaaactgtcctccaaaaccgtcgaggaatcaaattgcattgattgtaatagttgggggggtcaagatatccgttattataattcaggattcgaattagatttggccactagttaagagaatcaaagtggacttactacaatttttaataagagtgaaggagagatggactggctggcccaaatacaaaactagtcttgatgtgtcgctggcatgataaaaaaaaattcggtccagagattccaattccaacacatatgaaaaaggaaaaaaaagttcaaatacccggtagcgctaatccacgcgctgcgtgcggaataataattcgagcgccgtacaacgctccctccttccggttttcctaaagcttctgctgctcagaagtccttcgtctccacatccatgtccctcccgaacctgcacaccagcatgtcggagctgctctagggatatgtctctgtatggctccacctctacttgatttccttgtagatgaaaaggatcggcacctccattgataaactaaactcgattcgactgttggaaatagctagtgacttggatgtttggttggctttgtttggacctactataacaggcatacagctccatcacccggcgacggcggcgttggagctcatgccctgctagtggcgacgcaaaaaggtgcgagcgaaggcagtgaagtttcgagtcgtctgaatttaatgtttgtcttctggtgtatttaatatcgtatcatttatatacttatatcgatgtaccccaatactctcagaatatgatctatgtatatccccgtcgacagattaagctaaatattttattaatacaaatatcatagctacatattttattaagacaattactatataatttaagtagtcaaatttgttccttccatgttgaaaaccaaatacaaatttatagttactgggctaaatagtttattattattattattattattattattattattattattattattattattattattattattatttataatttaagttcccagtttgatcaaactaaaataaatttaaacagaccatgtgatattttggaaaaagaataatagaacgagtagagtcgagggaggataaatagaaaacacctaaaaataaaaaaaaaatagaaaaagcattgaaccatcgtgctaggctgctagcaccactttgtttactttaggagcctgcataaaatattttggacgagctctcgtgatgtgacaatttcattgcggacgttgtatctcagtgcccactttgatgtcattttttttaaaaaaaataatcagtttttgatatttatttttgaaataagttgtataaaatgattagattgtcaaaaattcgagaaggggacaatcgatcaacgcctgaattgtatcggtgtttccttttatcgtcgttttgtttggttgaaactacgagtactatacatgtaccaccggtggctgcgtgtacgtgcagaggtgcagccatatcgtaggaacgagagtttgtgaaacttctttatttaaaccgcatggtgttactataaagatacgtagcacaatttggaaaacgtactttaacttttaaaattaagttttcaaatcccttctttctatataaagttaagacccaaaactgctatctcctgcctccacgtcaccagctaattgaatccgttggatcaattcatatcagctactgccaagcgtaatattaagcaccatgatctctcttcagatgcactttggaggcccatttctcagtttaggcccaattgattgcgagctcagagcgcaagagaaccttcatctctttgttcgaggtgcctgtggctgcagcctagagcgacgacgcattgtcttctctcaaatcaatggcctcgctaattaagtccgttcaaatgcatggcactacactaatctacctcatcactacagttgttttgtgtgctcatacactgattcaataatccgaatagccattttttttctttttttccttaaaatgattcaattgaaagaaacttgcttttatagtttcattcataagttcacagggtctacagtataatgtttgtgatgtgcaataaactgacctaacaaaagaaaaaaagatgtcttcgtgcatgtctgggattgcatgcactttggcctgccaacacaatgcaataattatatatgcattttgtgaacgaatgttctatacatcctccccatctctcacaggtaatttggctatcttgatgacttactctaatggatcaacatgcaaatacaacttcaagttctttgtgtcatatcttattgatatcttattgctttctctttattattattattttttatttttacaaatatacttctttagtttaatcaagagaaaatttggcttcaatcaaatccgctctaattcctgtgccaacgtttagtgtccaaattgcctgcctctttcttcttctcttacgaaaccaaaacaacataaatttgtcttcagatgattcatctatattgtttcccttccttttcctctctcataaagttacatcaccttagttttgcttagttttgcttttagttgatcaatctataatttaaattgtcataaaccgtatcatctaaattgcttatagcttttttcaactatcaatcaaagatgcaaattttataaagtatataaaattatgttgtctagctactccctccggtttaattttaattgatgttttggacaatggcacggactacaaaatatatctttaaccttatttttctatcataatatatatattaaataaatacatgtttacttttgttatagtgctttgaaagacaaatctatatatatattgttctagtttctttaaactaaatatttttaaagttattaatggtcaaagttataaaaatttgtccctaatcttgtccaaaatgtcaattattataaaaccggagagagtacaaaacaaatcctaccattatcatgcaaaataaattctgcagcaacgtgcgggctttcatttaaattataaccgccatttgtaagctggagggcaaatgacggggagtcccctaaaaagatcaacaaccttgctacttgtacagtcaccgtcaggtgggccacgccactcgctcggatccagggccccacctgtcattagcactggccaatatccccaacttttcttcttttttttctttcccctttccctctcagaaaaaagaaagaaaaaggaaaaaagattcatctcttcctcctcgtcttgtccccttccctcgtcgaaaccctagctaggctcgccgccggcgacgcccgcctcgccgatgcgctcccccacctgaccgctccgcctcgctctcccgggtcgtcgttgcctcaccgctgtgcccgcccacccccacctgggcagcgggcgggatccagtcccagatcggcgccatgtccaaggccagggtctacaccgacgtcaacgtgctgcgccccaaggagtactgggactacgaggccctcaccgtccaatgggggtgagtgcctcccactcctacctcggtacctcgctcttgcttccaccctgtgttgtcgcctctgcatctgcgtgggtcagtttagattcagtgtcggatgttgcgtgctgatacgtatgataaagctttttagttacccgtttcatgactttgcaatcgccggtgttatcatcaagttattaggattgtaaatagaattgtttgtgaatcaactgctgctcttgttgttattggagttccattgtttcaggttgcatgttagattagtgatcttgtgcggagagctgtcaaattgtttagtttagatagaactcggtcttatttattgttacagtcgatttcaattaattatttgttatactccaacaatacaagccaaggattatgcaatatacagagctaaattgaagaatacgacttagtgtacactggtaaaccatgtcaatgaaatgaccgtgtagattataataaacttctcctacatcaaataatcataaattggatctat

SEQ ID NO: 8712 - DNA, 9434 bp, Oryza sativa
tagttttaaccattagatctccatctaaaaggaaaatgaaaaaaagtggtacccacctccactgccgtacgtatgtacatccgtgctccctcccaccctccgatcctcctttcatctcctctcctatttttagctaacttatcatattttctaactaacactcaatatattaaaaaataattcggaaatgtaaataatcataactctcaagttacatttattttgttatttaaaaattagatcatgcgaccgttctaactacaaatgtctaggtctgatggtacctataagcgctcttaagtcatcacaatgaactctaataaattaaaaaattctataaatatgagtgataaaataaaacatttaaccatcgattttcacttaaatcgatggaccttatatggttagatctatctttaagaaaaatcgcaaaccaacctccttccctcccccgtaccacccatcctcccgttcctctctccctgcccttccttctttgtttttttcactccacaacaacctctctccatgacctttcttctttgtttttttcactctacaacaactaaaataaaaattatctttacgggcaaataaactcacaaatggacctatacctaacacatctagcgggctctccctctattacgtgattttcctctctttctcctctacctatagcacggctctccctctatcacgtgattttcttctctttctcctctagctgcactgtagaaacaacacaaattagactttaaaataatcataattctttaaatcatatatacaatttatgacatgtataaactactgtaaattttaattaaatcaataatttaacatgcgtattaacttacattgtggaacatatccaccttcaggcctccactaaataaataaaatactaaaatttctcactaaaaattaaaatatcccaccttttttaaataaactggtcaacctattatttataccctactagacatctaatgactttctaccaactctttccatttcagattataagtcattttaaatttggtcaatgtcaaactcttaacttagtttataaaaatacatagtacattttcaacgcaaaacaaacatattataaaaatatattcaattctgaatttaatgaaaactaatttggtgtcgtaaaaaatgatatattttttccgaaacagaggaagcaattaatttctcttaacatgcatataggggctatttacttatacttgatcttagatgtgcttttgtgaataaattatcttttaggagataaataaatgttcctaagatgatcatagcatataaattatacataagatatatggtgtcactaatagattagagaaaaagcttttgattatatattttttagtcgtaacgtgtaccctgtgtagggtctatttgtcatatatatagataacagattgaaaataaccaacatcgtgcgttgaacatcatacaagatcgtagcaaacacatgggttgtgccaattatagcagtgaaacagccatatatatcaaatcaattatatatagaaattaaagaccatgtatatttgcatatttatttatttggtaaaacttgctacactgcattgtaaatctagaaacactccagtttagtggtagtttagttaaaaaacattatgactgttattttaatatttcatacttaattggagagagaaatgttgaaaggatgccattaccccatgccaagttgtatgaccttaacccacttatattttcattccaaattgcagagatcaaaacatttaaagaatgcttgacggaatgaaaatctagaaaagaaatttaaaaaaacatgaaataaaattgaaaactgaacatttattttttctaaatctaacttttttttgggaatttgaaacacattctaaatagcaaagttcaaacattttagaagtactaatataatgaaaataacaaaaaaaatcctaatgaaatctaacagaaaaattgacttttgggggcattaatttggaaataaaatctaacatactttcaattcgaattatgcaaccctaaactataacttgggagcgataaaagtatccttttctaatatattctctgtttgagaaaaaacatttacttctaaactttagttttctactgcaatactatattactacaatcaataaatcaacagttcaacatatccacgtcatttaattagatgatgtggtcgtattagccatatttttaatagaaaatattttcaattaatatatcctaaaatccagaaagacatatatagtatacaagacaaatgttactcacagtttagaactaaatattaaaaaagaaatgcattgtgtacaactccatcgtgacacaatattttcttataaatttaaaactaaaacagttttaagtaatttagtttagaattcatacgccacattggtaattaaaaaaaatactagcactcaaagaaacccaaaaaattattggaaaaacatgtttacaatagagtaatcataaacattcgtaataaaatttcaaacacattaaataagatgcacgcataagtgtgcgggctaccttcctagttgagttctaaaaatacaacaaaaatacaaaagatatgtcatatttgcatgatatataaaataatatagataataattatattgctagtgggtgatgatgcgataaacttgcatgtgatttaaaatactttagataataattgctagtgggtgatgatgtaatacacttaggggctgttcactttgacgccattttcaaccataccgtttttttttggcaaagttgccaaaagaaatcctaccaaaatttgataatattgtcaacatttatttacaaaatttgataaggtttattttgacatcaaaagtgaacagccccttactttaagtgaattaagtgggtgatgatgtgacacatctactttaagtggagttgtgtattataataatgtagtatacttctctatgtatgtatggtgactcagagaagattaattaattgatggcatgcatgctgactgcagcttcaatattcttatgaaacggttgagattcgttatgaaggcagcagtgacttcttcacctcggcctggtcaaatgcgatgggcttgttgaagagcccgaggggaacggtgatccgtattgaggttcttgtggtgttggctgcttgtatgcttatattcctcgccgtgtttgggtttctccgacggcgatgcacaaatcccttgttccagacggctgtcatgggctcctatgtcctgtcctcctccctggtaacatacacgcttggttcaatgcagtcttctgctgccaagagtggcatgtaccccatttgggccttgtcactctttatcctttctgggtgcgccgattcagtcacggcatatagcctcgaagacaacaatcagatacagagacagacatacaatgcttgcctctaccatgcttacgtcctcctgatatctgcgaccatcatcacgcaaggtgccggcgcaggactacttattcatccacaggattattgcatctcagctggcaagcgtgtcgtggaacctgaacaagatggttgccgattacatgcatgaggagcacgccaatcatccaatacgggagtacgacgcaggcagcatgaagggttaccgttacctagtctactggcgattggacaagacgtccaagattgaagctgcgacatcatatgcagcacgcgtaacaacaacagatgatgatgcccagatcatttgcatcgacgacatatggctccgcagcgacaagtcactgagcacggacctgaaggatgcctgtctctccttctctctattccatttgttgcggaggcgcttctttgggttcacatgtgctgaatctgcacaccccaagactagtgatttcgtcttcaagggcctgctgcagttgaagaatggcagcacaggcactgtagactacatcagagctttcaaggtcatcgaggttgagttggcttttatgtatgacttcttcttcacaaagtatgctctcatctactacagttcaacctctgctgcagtttggtcattggtttcagctgccttcacagttttaactgcatattccacaaccaaactccattggcttcagggtggatccactgttgtggttcagggtggacccactgttgtgggcgacaacaaagctgacatttttatcaccatgctcctgcttgtatctattgctttgctagagctgcttcagccactgctttactggaccaccatttggggcagagtatcttttgtttgtcagtatatcagacaacaacagccattgcggcatggcttcagctgctgcatgatgagagttaaggagcttctcaccaagatcggtctgcgtgtgtcgtcaaatgggagctactggcaggacatgcttgggcaatactcgttgcttgcatcagtcagccgcaataaaccgattaagcagctggggagaaaacgtagtagatttattaagtgtatgaatcttttggactacagggcacttaatttttatccagcgattgcctccttcaagaagaagaaccctgtagacaaacctatcaagttgtccccacaagtgaaggaggcagttgccaagtccctgctgcaacatgctgctgctggtcatggtaatctgacgaacggagtgtcatcattgaagtccaatggagctcatcacctcttatgggcttgtgacccagacccagctgcacgcatcttgcagaatcagacgccctctattttgatatggcacatcgcgacatgctgctgcgagaagaaaccgcccaactaccagcatgaagaagagctgaaaaatttccaggtcgccactgcgctgtccagatactgtgcgtaccacagcttcttcctgggcaccactatgacacagcgtgtgtgctgcatgcggtcggagaggaatccgtgcagtttcttcgtgaacgtggaaaaaaggagttcgacgccatggccctgcaaggctatgagccaccaccggagggcgagccaactaagggcatattcgagagtggcttgaagctggggaagcagctggaggagatgccagagaagatgcgttggaaggtcctggccgacttctggcctgagatgttgctctacatctcgccgtcagacaatgtcaaagagcacatccagcggctcgccaagggaggcgagttcatcacccatctctgggctttgctctcgcacgccggcatccttgagcgtccgaagcaggagcatcaccccggaagcagcgtatgaccgagtaatataattaccactccctgctctgcatatgtatcgctccctccgtttcgtattataaatcgttctgacttttctcttaatcaaacttaattttttaagttaatttgaccaattttaacaatattttcagcacaaaacaaacatattatcaaaaattttggtgttttggattgctatttttttttactaatttgatgaaacttaaaggtgttttggatgttgctaatttttttttacatattcgatgaaacttaaagaaatttgattaagaaaaaagtcaaaatgatttataatatgagaggttatcaaacggagggagtaaattgcatctcttgtcaccttcttgcttggaccattgcatatatgtatatatgctgatgttccatcgccatgcattctggaatattttctgcatacctgtgttggcttgttccggtggtatatttgtttgtgcttcaatgtttatttacctcttatgacgttcaatgtttcatatataatatattgtgtgaataatcaaagaaaagggtcaatatcaggatactggtatcattggtatctatagatcatatatcatgaatatatgtctttgattcagtatttatttacgccacgtccatgtttatatatatctctgtatgtaaatgtgaactccatgaatgtttcctggattaatttcgtataccattggtttgcctgtaatataatgtgctggatattgtgtcatgccttcattggattgtttttgcatgcaaggtgtgtttagttcacaccaaaattggaagtttggttgaaattggaatgatgtgacggaaaagttggaaagttttgatgtgatggaaaagttggaagtttgaagaaaaagtttggaactaaactaggccgcagtttcataacaagaagggcttttctttgtaatataagttctaatttgtttgtggaccttgctttgccaagctggcatcccagagaggagtgatgtgaaactggaatggaaatataatgtgccacagtcccagagtcatgaggaatgcctgcaacttttcattgagttttgcagaagaaaattttaacaagcattgagcttcgcagagaaaattatgcacataattctgtcagaagtaagtgataagggaaaaaaatacttgaggaactgcaacgttttcaattacaagggaaatggggggtctcagttttggaaggggttgcaggcttgtaaaagttggctctctaggatggtaacaaaaaagatccatgatggtagggatgtgagtttctggaatgatgtatggtatggggatgtggctttgaaagttaagtttcctgagctttttgagttaagctacaatcaaaacattttctgtccaggaagtggttgaattgagcaattgggacatggagtttagaaggcatttagatgaacacagacaaaatgatttgggggagttaaaaggtttggtgggggatattcagttggaagaagggagggataaaagttgctggccttatactaaggattctttgttcaccacaaagtctatgtacagaatgcttacttttggtggaattaaggatctggcaatgaagggtattggatagtataggaggagaggaatacaatgtaacgtggattgattgtattgagcctcaggggaccggtatatataagattgcattggaaggagataaagaaggattacagatatgaaaggagtccatacaaatcaatcctatcctaatatgactctaactaccatatactctaacacaggggttatggaaaagcaaaatacccttgaagattaaacactttttgtatctagttgggcgtgggagattgccttgtgctgagcagttagtgaaaaggaagtggagaggaggggatgatctatgtaaactctgtaaaaaaaactgaaactactaatcatataatcttcaggtgttctctggctgtgtttttttggtgtgttttgaagaaagcttttcagcttcagtctatacctagagatctttgagagtgtatcaatcttgtcaagggaaagggagtttccataatttgggtttttctttctgcttgtctctgttgggctttatggatgactagaaatgattgggttttcaatgatgtcctggtgaaattacctttgcaagttgtttacagagctttgtctttttcgcagaagtggagcgtgttgctaaaagaggaagaacgcacaattctaacagagtggcgtgatgctgtgctggacaagctaaagcaagtgaaggctcaaaatctacctaactcaatctagctttgctgtcatctggttttgataggcgtctcttagttcttagactggttttgctggctgattgctttacagcagcttttggtcctgatcttgtaagctggtcggccccagcatttgcttatgtgtgcctgttgtttttgcgtttcagtataatactcagtatgtttaactttggctttctccccaaagccgggtcaatgcaattgatatgttctaaaaaaaatatctgtcagaagtttaatgccaaaatgtctcctttttttttctttggactcatgtatattcttatcagttattttggtcgttggccgtacatcagtcatcttccttgtaaacccaataactctaaagtctgaaagcaccttgcaaactgtcatccaacctcagctacatttagttaaagatcagtatggatactctgaactagaaacgcttttagccctctttaggtcgctcagctgaatcatttgcccttgtaggctactgtacttcacctgtttcaacaagattattggaagaaatgagttttcctacagagcatatacatatcagaactgaatcaaatcaagctatattatgtcctacttacgtgcatcagtgctagtgtggacagcaactctctgcactgcgccattagaacctgttcttgtctggtaattatggacagctgagacaccaacacatttgtcctggctagctacagaaagaagcagatgacttcaggataactcacataattaaggtgtagagtagtttataatgttcacttttacatatcatcacttcagtagatctcaatgccattatgtagatttgatttgtgctttcaagggtaaaaggaaacacatgaatgattcggagagaacggcaccttaggcagtagataactcattgagtttctcattgtctgcatgacatcaactgcagagccaacagcatttttgacagactgaaaatctgcctgcaaagtatgagattgcaatgccaaacatcagatataatcaaacttgtatgaaacatggaggaaataggatcagtgttttgtcaggtttcaaaccactgctccatcagagacaggaaggcgaagaacggtagcattcagagcttccactgttcctgacagcgaattagcatacttgttctccagtaaggaccactcttccagatatgccatctgtatagtcagtgtaatgcttaattatcagaatttcatttgagttaccattcataatggctgatctatctaatgatctgggacaaatcatgacctttcaactagtctgcctagtacacgtgtacagcttcattagtccatatattaggtgtaactactgttgaaatcaagtgataaagagatgattattttcagctttacaactaggcttaaccacaaaccatgtgcttaccatttggacaggcaagtaaatctgcatgtaaatggcacggagcaactactcacagtcctgtaactacctgaaagaaaagtgttctggtgcagactgctgagactaccagactactaccgatattgttcaaatctcaaaaaatgcattttcttagagaaaaacatgacgaatcacaatagatgaattccactgaaacataaaacagagggtgaaaattttgccaaatagatgaattccactgaaacataaaacagagggtgaaaaatttgccaaaatagcagaattcttacttggcccttcagagtattcatgactttacaattttgtctcagtaactgtagctccaacttcttgagcgcaatcgatttgctcatcccgaggatactaacccatgcaccacacaattgtttctgcaatgaagaaagg

SEQ ID NO: 8713 - DNA, 42127 bp, Oryza sativa
aatctcgacctgggaagaaacaaaagatcaaatctgttagtcctgatgatggatttcatgagagatacctaaaacttaaaaaagaagaaatagatcgatttgctgcaattgaggagaagaaattggaggatccttacagcatcaacaagtgtatcacagtgcttgaaggtttacatggtctacaaataggagatatattggtggcagctgatatcttcaaaggtaaggataatagggaagttttcttgtccttttcaagtgatgcattacgcctggcttggattagaaaggaaatcgcagcattagagtgagtacttttgtgaaacatatggcatgcaagtagtaggatagtacttttgtgaaatagatggcatgcaaatagaaggatagtacttttgtgaaacaaagggggtacttttgtgaagcagatagtagtaggatatacttttgcttagagggagtgcatgcaagtagttacttcattaagtagaatgtgacaaacttggagtacaagactagtaattgaccttgaatgccatggtggtcaaatgcaatatattatttccttcgtgctacgtaatggttccacatccgttgtgccatgtcatctcgttttctattcccagcttctctagagttgttaaattcttgtacatcaccattatagttctcgtctccatttggcacatcaacaatatgatctggatcaatctctaaacgacaattacttggccacaccaaatctccattatgcaggcgtatgaagttgtgtagagcacaacaggcaaccgaaatatcaacttgtttatgagctgggtggtgtgagccggtctttagtataggaaatctcatttttaatacaccaattgctctctctatatggtttctgagttgtgcatgccgaagattgaataactccttataattttgtggcttttgattagctctgccctgttcctttaaatgatatcttgtcccacgatacggtgctagaaactgtgttgtatttgcataaccagcatctacaagaaaaaatttaccaggaggtacttcaaaaccatggtttagtgcatcttgaagaactcttgcgtctgaagctgatccctcccagccggcatgtacatgtacaaatttcagatcgaagtcgcaagctaccataacattctgagaaattgtttgctttctattccggtatggttcttgctggtctagtggaagtatcattggtacatgtgtcccgtcaatagagccaacacaattctatacaaatacaaatataaccttgattaagtctttttatgtacaatgattggtttaactcaaagtaaaaaaaaatcaaaacatgaatctgttcatacctcaaaaaaggggtgaaattttggtcttctcaagatatgatgggggtgtaggaaaggtggccgtatatatacacatgtaagttgcttaactgcatcaagcacaaccccaaaatacttgcttattgtttgcccgctgtgttgaaactgatcttgcaaggtctcattacttgcattttttgctagtgcatacaagaatatagcaacttgttcttctactgagacatctcttgcatcagcaagtagttgtttctcacgcaacttatcgactaaagctcgaaaaacattaacttccatgcgaaaattccttttgcttaggctctgatgacctgttaagatttcattaacacgacaagcccctgaaagttttgatgtgtgcatcggtttcctactagatgatggttgtgacgaatctccttcgatggtagggagaacaaaaagcatgaactcatcttcattctgtgaccgtcgtcgataacttggatccatgacaatcacaggggaaatcaacaacaaataataaatctgatggtttggtctaccaatatatataggagagcagaagcaagcaaataagttgttaatccttacatacataccaaaaagaaaaaaaatcatttatgacttaccaaatgaattgccacgtttgagctcttgtcatgcttggccgatacaatcgaaggtgaggtgagctagttttgttgatgtccagttgcagctacagcaatatatataaggacatgcaacggctagtacttgctttgaacgccaacggctatctgttcaaattcaaaccggaagagaaatcctgtatttttcctatagcactatcaaagggcacctttcattttttcctatgtttttgattcctgcgggattgaagaatcatactacttcaattcctgtgtttttcctattcctgtgtttttcctatcctgcgaatcaaaggggcccttaaggtatgccgttttctgctttttttatcttagtagcaaaccaaataagatgaatacaaatatttatcctatcaaacaatttgtagtatcaaaacttaattacctatgctaattttggcaccaccctagagatatctgaaaataaatgaagcatatataagtttgttttagccacacgtaccgtgcttctcattttcttcccttgctgcagcccgatgtatatgggctacgtagtacgtatatgtttcttcctctttgatctgcagcactcgcgcccgctggtgaccggcccggtcgatgtactgaacaaccaccccttctctctatgttttcagtgctatatatacggcaaatgttgagtagatcgaacgatgtgattaatactatatattagtgaaggatgggatgctagtagacattaattaaagagtaaagtttagaaaaatcaaagtttgcggaaaaccacatgtattataacgtgtgacacataactagagatagcaatgggacccataactcgagactcgatggatttttactctattagaagctaatcatgttctaactcttatagctatgggtctattgacggacggaaactcttacccattggatacgtggtatggttttattctttacccacccgtacccatagcctaaaactatgagcaatataagtctcaatgactactaaatcagcataaaactcatttcacataatcacatcttaagaattgttctagactagttatatatgaaattgttatttgattcgatcgccagcgagtacatacctcctgttagaatatatgattagatgcttaagatcgaatcatacctactgcactatacaattaactgtttggaaaatcagagtatagtatagtacagtaggtatgattagttgttgtttgtgcaatcccttccctaattgtgctgctatcccattttgcttgccttgctagtttgcttataaatctaagattttcaaaaatatctgaaaaatatttggaaatatccgaaaagttcagcttccatacttacttaaaagttttaaacgcctattcaccctcctctaaacaacatcaagatcctttcattgatcctcctccctttcacttccatgtgttcaactttgtgtggaaggtccttcaactactggaaagggcttgtgcatgctcctcgtctcacgaggatgattaagaaagtcacccagttgactcacaagttgcatctcaagactgatgtttcatcaggggctggtccttcctcttcctctgcttatccgagtatagtatagtacagtaggtatgattcgatcgccagcgagtaattaactgtttggaaaattgatgatccactagtgtagtttagttagtatagtacagtagttggagtcgctcttgaccgacagaagaaagtctgaccctttgaccgattaacaacatccacattgccattaattatatattacaatccattggagcttaattactctcaaaataacgtgttcaactaccggaattaggcagcattcatcgcgtatgtaaccatccgaaaatttcacaatttggcccttttttaaaacttatttcaaatttggtccctaccgaaaactatcaccagatttagaccccgagctcagcgccagacccgatggcgctgaggtagaacgcctcagcgccaaccgcatcggcgttgaggtcctaacggccatctaaaagcggtggggcgaaacggcccatgtggcaaaggtcagcgccaaccgcatcggcgctgaccttcgcgacctcagcgccaagccgccaacaggcctggcgctgaggtccccacatatccctcggggccgagccggccccaggccattccttcttcctcctcgcacctcttggttgagaaggcgtggcgccctcctctctctctcctcctctccaaaatcgagcaaatatccacaaaatcttcgtattttggagggaaaatcattgggggacatagtgccaaggtattctcctccgaatcttctcgttatttgtccattttttgcttggatttgctcattgagggatgaaccctagaaacacgatttggggtttattttctctaattagtttgttctctacattgtggttgtagtagttgttggcaatgcaatgattagatgcgcatagaaccgttaaatgtaggactatggtgagggtttaggcatttagggaagaaccctaatttttttctccaaattatagaagaaccgtatttattttattttaatcataatgtgagagttcaaattaggaatggatcctttgaaatggaagtttgtgtatgcttagatattaatggacaatttcattgggggacttagttgtaggttagaaaaggccattgtttttactattgcaaatttagcttttaaataagggcaatatgctgatatgttggttaatgtggttggtgaagattccatatggcatacgatggagatattgtgtgcgtatgtgatgcggtgtcgaatttggaaggagtctaaatttggtatgattggagtttgtaaattttgtttcttgtacgcgaaggtttcctaggtggattagaacttcttgtatgagtttggctcgtggctttaggctgcctacctcaagtataaatagagagggagcgtgaggtttcccggtatcacttttgagagtattgagttgtgagtttagttagggtttcgagtttagtcgagattttcgtgaggagtgctgttattgcactttgtaaacacagagaggagtgctgttctaggatttcactgttatgttggagggcttcctctagtcgcccattcatccttcgccgacatccaattcctctccacttcctctatatctcgggttagtttattttcgaaatgttcctcgttgatgatgttgagattatagacatataatgatttaatctattccataaataaatcatgacattacagatgaaaactagcatgaacgcatcattagatctacacatgtaaactacacagtataacatgaacagatcaaatatgcgcaacatattgaacacgtaccgaggtgacggaaagaccggctgcttggtcgaaacttttcgcaagtgtctacgaaggcacgaaacacgcgagcgaagaggaaggcgagccgtcgcgaacgaacagggagcagtcgcgcgaagcgcttcccaaaaaccttattgccgccttctcccggtgcagaacgtcgaaggcagaggttccggagacctgctctcccgatcgccggtgcacgccggcgagcgggatggagtagtctacgagcgacggcgcagtacagagtaggaagcaaaccctagattgattttgcgtatgttgcgtgaagacggcaggtcggtttatatagagaagggtcgcttgatcagggcgcccgcacgatctctactgcgcgtaaccgaaccggataagtcgcgcgtaacttatccggactccacgccgtttgcacgcaccggatcttttggaacgtttccaaaacaaaaacgaatccgaatttgcaacaaaacaaaactgcaaaaggaggctgcatctgcgcaagggtgaggagccaatttttcggaccattcgacgtgcacgcgcgccgcctgccctgccctgccctgccctgccctgccaggcgaggcgaggcgagcgagcgcgcgcgtgtgtttcccctcttctctccaccacacatgcttcaagcgactaggagggcatcctcccttttaaggaggtccccctctcctagaataagcaaggtggtactaaactccacatgcatgccatcccatgaggtgggcttttgtgattttccaaagaattaatcttcgagtgggctaaggcccattcattaattccaacaatcccccaccaaatctcaaaatcccactgagatttgccttttccaatgtactgtttatataccagcggttcgatggagaccaattaaggttgaacatccacctagaactccaagctacacttactcacaacttgaacaatggactacgccttgaattgcaagtcttgtgcaagcaagtttcactcaaagtcttatctggtactagaccgtctgtagactacccctcgggtggagcgtataagtcatactcctaggtctttagtaagcttcctagaagattcacccaaaatcttcatagactgcgaccaacagtcaagctcacaaaggtgagttctttcaagaatgctctgcaggacaacatctttgctaattaaagccaacagaactcattaaggcatagccaacctgccttgcagctcacgagagtatatgcatcttcacttggagagggtatatatattggtactctcctctagtttattaatggtttgttcttcccaggatctaattcacgggatctccgatcacatagactgggttaccaccatagtataactcacatgggtctcaaacccatctccttcgatgcattgtctatcacatttcgtgatagtcccttcgtgaagggatctgccaggtttctcgctgtttggatgtaatccaacgttataactccggagtttcttaatttcctgacagacttcaatcgtcttttcacatgtctagacgatttcatattatccttagaactattcactttgacaattaccgtttgattgtcacagttcataaggatagccggcaccggtttttcaacaacaggcagatccattaatagatcacgcagccattctgcctcaacagtagcagtatccagtgccgttagctctgcttccatggttgacctcgtcaaaatggtctgtttgcaagacctccatgaaacagcaccaccacctagtgtgaaaacatatccactagtggctttgatctcatccacatcagagatccagttagaatcactataaccctccagtaccgcaggacacccagtatagtgaagcctcaattccacagtacctttcagatagcgcattactcgctcaagcgcacgccagtgatcatctcccggattagaggtaaatcggctcaacttgctcacagcaaaggagatattaggcctagttgcactagccaggtacatcaacgagccaatgatttgggagtattccagttgattcctagcaattctcttgttcttgcgaagcaacaagctaggatcataaggtgttggagaaggcttactatcaatgtagccaaagcgattcaagatcttctccacataatgggactgcaagagtgtaatcccattctcacctctaattagcttaatgtttaagataacatcagctactcccaaatccctcatatcaaaattttgagacaagaatgatttaacctcatttatcacctcaaggtttgtcccaaatatcagtatgtcgtcaacatacaagcacaaaataactccctcacccccaccatggcgatagtacacacatttatctgcctcattgactgcaaagcctgcagatgtcaatgttttgtcaaatttctcatgccattgcttaggagcttgtttcagaccatacaaagacttaaacaatttgcacactttgccttcttgaccttcaactacaaacccatcaggttgatccatatagatctcctcatccagctctccattaagaaaagctgtcttaacgtccatttgatgaacgagaagaccatgtgaggctgctagggaaagtagcacacgaattgtggtcaatctagcaacaggtgagtaagtgtcaaagaaatcttcgccttctttctgagtatagcccttagcaacaagccgagccttgtacttttcaatagtaccgtcaggcctaagcttcttcttgaacacccacttgcaccacacaggtttacacccatagagtcgctctgtcacctcccaagttccgttagcgataatggaatccatttcactacggacagcctccttccagtagtctgcatcaggagatgcatatgcttctgaaattgacttaggagtgtcatccacgaggtacacagtgaaatcatcaccaaaagacttagccgtcctttgtctcttactccttcgaggagcttcactgacatcctcctcagagacaagttcatgtgtatgttcagtttgttctggtggtgtgattgaactgggaattatttcagagggttggttcgaaccactatgtgtatccttcattgggaaaaagctctcaaagaagatagaatcacgagactccataattgtaccaacatgcatgtccggtacctcggatttaactattaaaaatctataggcaatgctatgatgagcatatcccagaaaaacacagtccacagtcttaggaccaagtttgcgcttcttcgttattggtacattgactttcgccaagcacccccatgtgcgcaaataagaaagtgatggttttctaccaatccatatctcatatggtgttttgtccttatttctgttaggaactctgtttaacacatgatttgaggtcaacaatgcctccccccaccatgccttaggcagtcccgcggtgtccaacatggcattcaccaagtcagtcagtgtgcgattcttcctttcagcaatcccattagactcgggagaatagggaggcgtcctctcatgtatgatgccatgttcctcacagaataagtcaaactcgttcgagaaaaactctccaccacgatcagacctaagcctttttatctttctgtcaagttgattttcaacttctgccttataaattttaaaatagtctagagcatcgtctttcgttttcaacaagtacacatagcaaaatctagtagcatcatcaatcaatgtcatgaaatatcgttttccacccttcgtcaacaccccattcatttcacaaagatctgaatgtaggagttctagtggtgccaagtttctctcctcggcagccttgtgaggcttgcgaggttgcttcgattgcacacaactatggcacttagaacctttgacaatggaaaacttaggaattaaacacatgctggaaagccgagacatcaagccaaaattaatatgacataaacgtgaatgccaaacattagcctcatcatccacactgccacaaatatggttcacagacttattgcagaaatcagaaagggaaaagcggaacaggtctccgcactcataacctttaccaataaaatatccatgtttagacatgactactttattagactcaaaaaccaacttaaatccgtctctagtcagacgggagccactaacaagattcctgtcgatagaagggacatgctgcacgttcttcagctgcacgatctttcccgaagtaaacttcagatctaccgtgccaacaccatgaacagaagcatgtgacccattccccattaggacggtggaaccccgtgcgacctgataagaagaaaacaatgagatgtcagcacaaacatgtacattggccccagtatcaacccaccaattagtagattgattaactgaaaaaacagtaggtaaattaccatacccgcttccatctccagtgttgccaatggtcacattagcagacttagaagtctgccctgcaggtgccttcatccccttgcgctgtggacacttcctagccagatgaccaacttggccacacacaaagcaagtcctctcatcctgattaggattggtgttgttcttcttctgcttcttgaagttggtggtctgctgagctttgtatttccccttgctcttgttctgggccttgtgcacaacattggcactggactgcccaccatcgcccttagacgcggcatctttttcccgagctttctcctcaacatcaagagacgcaatcaacccctcaacggagtattcctgtctcttgtgtttgagtgcagtaccgaaactcctccaagatggaggtagttttgcaataatgcacccggccacaaatttgtcgggtaagacacacttaaggagttcgagttccttagccatggtttgtatctcatgagcctgttcgactacagaacggttgtcagccattttgtagtcatgaaactgctccatgatatacagatcattgctagcatcagtagcaccgaatttagtattcagtgcatcccacaactccttagcgtcggtcatatgcatatacacctcgaccagacgatcgccaagaacgctaagaatgcatcccacaaagagagtagtggcttcctcgaattgcttctgctgttcagcagtaagaactccttcaggtttgccagtactcacccagaagcatttcatagctgtcagccacagagtgaccctgatctgccatctcttaaaatgcacagcggtgaatttatccggcctcagtgcatcggcaaaaccagccatagtaaaatcacagtgcctataataaggtttttggattgttgagattatagacatgtaatgatttaatctattccataaataaatcatgacattacagatgaaaactagcatgaacgcatcattagatctacacatgtaaactacacagtataacatgaacagatcaaatatgcgcaacatattgaacacgtaccgaggtgacggaaagaccggctgcttggtcgaaacttttcgcaagtgtctacgaaggcacgaaacacgcgagcgaagaggaaggcgagccgtcgcgaacgaacagggagcagtcgcgcgaagcgcttcccaaaaaccttattgccgccttctcccggtgcagaacgtcgaaggcagaggttccggagacctgctctcccgatcgccggtgcacgccggcgagcgggatggagtagtctacgagcgacggcgcagtacagagtaggaagcaaaccctagattgattttgcgtatgttgcgtgaagacggcaggtcggtttatatagagaagggtcgcttgatcagggcgcccgcacgatctctactgcgcgtaaccgaaccggataagtcgcgcgtaacttatccggactccacgccgtttgcacgcaccggatctttcggaacgtttccaaaacaaaaacgaatccgaatttgcaacaaaacaaaactgcaaaaggaggctgtatctgcgcaagggtgaggagccaatttttcggaccattcgacgcgtacgtcgtgcacgcgcgccgcctgcccggccaggccaggcgagcgagcgcgcgcatgtttcccctcttctctccaccacacatgcttcaagcgactaggagggcatcctcccttttaaggaggtccccctctcctagaataagcaaagtggtactaaactccatatgcatgccatcccatgaggtgggcttttgtgattttccaaagaattaatcttcgagtgggctaaggcccattcattaattccaacagatgatttggatttgctagctccccttagcgagctaaagggattcgacctgggggctgagggcaacatgcactgacgcgcatgctccggcagcgatggctacctcaactacaacatccttatcctccagctgcaccaggttcctcatccagtcatccacttccatgcaactaggctagctgaaagttgcctccattgctgttgtttgtctgttcattgagactgtgcatgtcctctggccgtcttatatgaaatccatcagctgggcagctcccttccctttcacacacacataaaaaaagaatatatattattttgaagattttgcatttatatacatgattttaaaatattatcgaaaatattccctggccacgacttggggatggcatgggaccgttgctatgtggtaccgcggtttacccgtgccgcgacaatgcgcgacccactcccggtcacttaagcgcggcaccaccgtggtcccgcggctcggccatgcgccaccaacaagagccgaccgtgttccgaaatttatgtaatttggatccatttgaatctttcatatctcaattcaaattttaaaacttccatatcgaaattcaaaacattcagctgaatttttttacaaaattaactcacaattcgaattttgagttgaaagtttttaaatcttgagttaaaattctcaaatttgagttgaaagtttacaattcttgacttgaaagtcttcaaatctaagttgatagttttcacatatgagttgaaagttttcaacgagggaaggggaaagagattggataaagtgtgcgctacttttcttgtcatcatgtatgcactaaataggatgggcgagcaaatcgtgaataggaggtggggctaggaggagaggttgtggttgccgtcgtcgttgtcactccggtgtgaccggcaactacctctctctggtttgtatctagtgatgtaccaatgtgagggagggggaaattcaatggtgtattgtaaatgtagaaaacctggcgtcgggtaagttcataaaacttaccgagtggatgctgggtataccaaaggtaaggttataccagagttcacaatcttctttgttttcttgtcggtctgaccgccaagaaaaaaacttttcctcatggctagcagccaagaaaattagatttcccttactctctagacttggtggttcgccaacaaaatatatcgccttggcggtttttttttaacgactcgcacgagacggtgcgaagttctattgatagagcaggaaaaaaaattacaagattgcaaccctggagggtcgtaaccagaaaaaaagaaaaaatataggttttgatgttatccttggcggttttagctgccaagaaaattcaggtttcttatagtgtacgtaggtaaggtttaatcgagatgcatattttagatccaatgatccacatgtttccaaattttcatataggtataggtctcaactacatatttgtctcgtttattacgattcgcaacacaagcaggcaggtactgaggtacatttgtgtctcgcttgttagtgcaaaaatgacaaattaagaaagtgcattaccacgctgatcatcaccatcatcatcatatagtgaaagaagaattgatgttaacccacccttggttttttaccttgtgaatcacccctagcctttggtcggacgggccaattaatttggatcgctactattgatatcaattaaattcttgatgagccgtactagctgtaggcctaatcttttgcattctggagacatcgttgtttaacttttttttctttttaaaactttggagagcatcctcagccgtgcatgtcattactttgcttatgctttgttgtattcgaaaaccctcgcttgagcaaaactctctttatgcccttcttctgcagcacagaatatgagcgcacgatatatgtacacgcactgtccatgctatcactgttctcaatttaatttgaagctagctaccgtgcctgcatcttgtcaatgtgatttcccctgaataatcccacaaaccgcaataggtgtgaaaaaaaatccccttcaattcctctctatagagattaaccgaacaagatctaattcaatttggagagaaagacttatctcaattatgtcgattcccggagagacaagattcaagcatagagctagttaggagagatatcagaaggccgcaacttatccttcaggtatatatatccgttcgtatatatataaatatagttgacataggattgtatgcttacatttcaataattaattgccagtaatgctttacttgcaaattaagtatagctaatagtgcatgcatgtattatgtgcatccttatctcctaaataagtaattaattaattaatactcttaagaaaaatgtccattctcaacatttaaaccatttccattttcttaagaaaaatgcatattcattcttctcaagctagaaaagtgagaaagatcaatctgcctattgatcttggaaaggtggtttagatctagcaaacttttgcagtacaatatgttgccactatatattggtagtatatatatgggtaaattaggaattttatagaaaattagaaagttgatgagttaatccggtttaattgggactcgttcatgcatgccaccgccaccgcttggtctcatttgtgcacctatgagagatgatggcacatgttgcgacgacatgattcctggccgattctaatcttaattgaaaatctaaaaagtttacaagtgactaattaccagtcaaataatgtaagttatatcatatatagcatatgtgtgtggaaggccttacacattttaaatcgtgctagctagctaggttaacacattcatacaacctgacgtgaaaccaaatttttttttatctagattagctactttctttttaacaaaaatgaccccgcggaataactgcaagaaagacaaattaacccttcaattttatactatgatctatataaatgaaatatcaaattaaatcgtttatactaattgtaccgtaaaagttctctagatctataacaatgtagggattaattgtattgcatataagaaatacaacattgcaaaaaatgtacggaggtgcacgtgcgcgatatataatcaattgagtaaaatatacggtcggttcttaaatttggaccgatatatgaataagaagaaatgaagaggcctgtgtccgtttgcagttttgtagttcaggtcaagcacaagatttaattttgtcacgcacgaggaattaattaatttcataagctcacccttaattagcgatcgaatgttatcacactgaaagtcaatttttttttattttaaactaaaaaaatgcccgtgcgttgcaacgaatgaaggcaatctttctatcatttatcttcttccatgatatatatataggcatttaaaattagagagtttatttttttgccatcaacaaccacctggttctacgaattgtcatcatcaaatgctagtatcatcacgagctccgttagcccttgtctaaataccaatttacccttgtaaactatagaacctcctctagttatgatagtttactcaaactgttccaattacaataaactctcttttattcattcataaccaaaaataaaatcagcatcatatttttcatcgattactgaatcaaccaaaacatatattatgacattaaaaaaaaaccaatttcaattattctacgatcacatcaggatacagattacaaaaaatggaggaaaaaaaataggactcttttcaaaaaataaaagaagtgggacagcagcgtccatatgtccattcagatttcagaccatttatagctccatacatgatatatacatatacaaaaacaacggctggtaagttgttcaatccttcaaccctttgttgtacgtgcttctctcagattgatactgctttgcaagtcgacataaaaaaaaacaactcaggagaactgatagaaccttggtctgaacaaatttaccaaaatatattccaagatgtttctgatttacaagaacaagtgactgaaaaccaaagcatatataaaagcacaaagaaagcatggattaattctatagaccgagctaaaataacgtaaggccttctatgcatattccatagaacaatagaagtaaataacaaaacctggttgataaaggagaaataaatcaacgatcacatagtcaataatctagttaagggggcaaggtcatcctcatctcatcagctcctactggttgaatctccttaaattatatccgtcgtcccgtccaattatttgattcctcaaaccgttaaaatacagcaaagggtgtgcatgcagatatgaagaaagaatccaataagggcctgtttagttcgcgaaaagaaaatttttggatgtcacatcggatgtttgaccggatgtcggaagaggttttcggacacgaatgaaaaaactaatttcataactcgtctggaaaccacgagacgaatcttttgagcataattaatctgtcattaacacgtgtgggttactgtagcacttatggctaatcatggactaattaggcttaaaaaattcatctcgcgatttccatacaaattgtgcaattagtttttttatctatatttaatgcaatttaagattcgagttgaaagtttcgaatctgggtttaaaattttaaaaatttgactttagatataaatttcattttcaattttttaattaaaaatatcctaactactaccatcatttatatctaactgtaattatactactaatagattactaacagccttagcgcggaaaaggagggtggccgcgtgcgcccctggcgcgcacgtgccgagtaggactcccccgagacgtgaacacaaaatcggacgcgccaatgacgtaccaaacaatactgcaaaatctttaaatcccgcgtcatacagggagggaatcggacaaaaaaaatcaagcgttatacgaggatgacgtactaaatacctggcaataacattttaatctattaactaactagagtaaaatacccgtgcgttgcaacatgtaaactaaaattataccaaatataaaatattatattattagggttgagttttccatgatatgggcctttaagaaaatatctttctagagaaataatgaaagttcaaaaaaaaagaagaaagaaaatgcctctttaaagtttagacccgctggtatgctagggcattcgcacgcgctgcccagcagtgttgcagcccggggagggaggccggcccgacgcgggatcaacctgagccgttcattttcatcgatggctcgaattgattctgatttcatcaaaaccgccaaccctaaccctaattcactatcccctttccttccccactgcgagccgcctcccccctctctctctcggtgccgcctctccccctccgccgctcctcctccccctccccggcggcatcgctccccctccacccaccgacggtgacgctccccctccacccacttgcggcgccgctccatctccctctcttcctcccgaccgtccttcccctcgccctctctctcgcctctcgtgcgatggatccggcaacagcgaccacgggtggatccaaccgtggtggtggcggtcgaggacggattcggtggcggtggctctgtccgacccctctcgcctccctctcgcggcagatctgacagcagtagcagcgtgtggcgacgcggccgggaacgccggtgaactgtaacatcccggcctagggcttaataggattaatagaatactcatatcaacaagttgcaacttcttttccggaagccaatctccaaagaactccagggttaagcgtgcttggcctggagcaatatgggatgggtgacctatgaaagctatcagatgtaagtgggcccggcctggaccgggaaattcttcctgggtgcacaagagtgaggacaaagtgtgctggagcaatatgggatgggtgacctatgaaagctatcagatgtaagtgggcccggcctggaccgggaaattcttcccgggtgcacaagagtgaggacaaagtgtgcagaaaagatatgtgttggtctgtgagggcagtctatgacctatgaaagctatcagatgtaagtgggcccggcctgggggaggcgggacgttacaaaatggtatcagagtcgactctcgcggtttcacgggcgcgtgtgtcgcagttgcgcaggcatggtgcgcatggctggtgtagaccgggagtggttacatagcatggcacatgccactggacacatggacgtggccaagagatgacgttcctggcctagggttgatcgacgggggcgtcgatctctcttaagggggtgagggtgtaacatcccggcctagggcttaataggattaatagaatactcatatcaacaagttgcaacttcttttccgaaagccaatctccaaagaactccagggttaagcgtgcttggcctggagcaatataagatgggtgaccgaccgggaaattcttcccgggtgcacacgagtgaggacaaagtgtgcagaaaagatatgtgttggtctgtgagggcagtctatgacctttgaaagctatcagatgtaagtgggcccggcctgggggaggcgggacgttacatgagctcgggagtgacgatgggctcgagagccggtcgcggcgaaaggcggcgatgcggacaacgttgaaagctatcagatgtaagtgggcccggcctgggggaggcgggacgttacatgaactcgggaatgacgatgggctcgagagccggtcgcggcgaaaggtggcgatgcggacaacggcaacgacgacgacggtggcggcgaccgcgaggagggcggctgcggggaggcggctagggttagggttaggctgaggaagacaatttataaataacttaaattcaaaataaaaaaacaaaatattgaaaacgaatttagagtccttatagaaatacaattagaaataacagattgggagttagaaatgtggaaatattagaagaggagtctacggtccacacacaaaggaatttatagaactaactgaaatttagaaataaaaaaaaataaaagtagagtttagagtccatatagaaatacaatttagaattacaaaaaatgaaaataaaaagctatctattatcttattaaagtaatagaaaaagaagccatcacgtttgctctcacgccctaaaaattcccatattaatcggagaaaaagaaaaagtagagtccatatagcaatacaatttaaaaatagctgaaatttagaattaaaaataaaaaatattgaaagagtagactagagtccatacaagtatacaatttagaattaattaaaattcggaattaaaaataggaaaactaaaagtagaagttagagttcatatagaaatgcaatttaaaattaactaaaattaaatattttttaaaaaagcaagattaggagaagagtatagagtctatataggaatatataggaatacagtttataaataacttaaatttaaaaaaaaacaacatatcaaaaaatgaatttagagtccatatataaatacaattagaaataacatactgagaattagaaaagtagaaatattggaggaggagtctacggtccagacacaggaatttagaaattactaaaagttagaaataaaaaataagaaaattaaaagtagagtttagagtccatataaaaatataatttagaattaaaaaaatcaaaattaaaactaaaacatattgggagaagagtctagcatccatataagaatactatttataaataactgaaattcgaaattaacaaataaggaatattgggaaaaaaattctagcgaccatataggaatacaatttagaaattactgaaattaaaaaaataaatattagaaaaagaagtctagagtcaatataggaatacaatttaccaataattgaaattcaaaattaaaaattaagaaatattgaaagaagagtttagagtccatatagaaatacaatttataaataactaaaattcagaattaataaaaatgaatattgaaagagtagtttagaatccatataggaatataatttatgaacaaaggaaattcgaaatttaaaaaaaaataagggatattaaaagatgattcttgagtccatatagaaatataatttataaataactatcacatatatacaatacaataaaaatatcacacatttgttagttcaaccaagaatttaaaattatgttgtcattttaatatattttaataataaaatgtgaaaatatttaagctattatatgagaaaaaaaatctaatgaggcaagccgcgggccaccatgctagctaacttattaaaggaatagaaaaaagagactccacgttcgctctcacggcctagaaattctcatattaatcggagaaaaaaaaacagagtccatatagaaatacaatttagaaataattgaaattcagaatcgaaaaataaggaatattggaggaggagactagagtcatatagaaatacaatttataaataactgaaattcggaattaaaaaataaagaatattagaagaagagtatagagtccatatagaaatacaattaggaaataatagaaattcagaattaaaataaagagtattagaagaagagtatagagtccatatagaaatataattaagaaataatagaaattcggaattaaaaataaggaatattagaagtagagtatagagtccacataggaatttaaaactaactaaaaatcagaataaacataataaaattaaaagtagagtttagagtccgtataaaaatacaatttacaaatagctaaaattcaaaattaaaaaaaacatgggaagaagagtctaaagttcatataggaatacaaattagaagtaactgaaattcgaaattaaaaattaaagaatattgaaagatgagtttagtccacatagaaatacaattagaaataataaaaatttagaattaaaaatgaataatattggaagaagagcctagagtctatatagaaatacaaatttacagataacaaaaattcagaattaaaaaaaaatattgaaagatgattctagagtccatataggaatataatttacaaataactaaaatttgatattaaaaataattaataactaacacgtatataaaatacaacataaataatacacattagtagtttcgtaaagttagtaaaaagtttaaaattatgttgtcattttaatatatttgtataatacattgagaaaacatatatcctattatataagaaaaatataatgatgctagcgcgcaatctacgcgggtcaccatgctagtttttataataggcaaagatagtcaatctagtctctcaagttttatccaaggcaatttgatccttgaggttttattagcattctcaaattaattagttggatctcaccttgctaaaaaaacttacgaatggaaaagtgtgcacacatacgtacgtacatacaaattatgtgtgtaaattcatgatttgtttgtgtgaatcaactcatatgtaataactaattactgtatgcaaaaaatggacgatcatatgcagggcgggtgcaggctagctagatagatagaagagatggagcaacatgtggaacggaatgcatcaagcgcacaccacctgagagatgtgtggctgagcattggagggacggtggtccgcattgaggtgatggcaatggtggccatctttctcaccttctacgccgtcaccttcggatcctgccgccgctggtctagccgatggatcatccaaaaggttttcctggctgcgaatgcgctgtctgtgtccctaggaacatacagcatagggctgatgcagtcatcgctggtgaagagcaagatgtaccctgtgtggtcggtgtcattgcttgccctctttgctagcattgactccatcaacacattcggcctcgactatagtggccaattcctgaagctgttgtatcagctcttcctctactttgggtatgtgcttgtgatcagcatctccggcaataccaataatggcatggtggccgctgcgattggcatgctttgcagcgtcaccctatgtaagggattccataggctgatggcctatgtgctcccgaccaggctgcggagcatgaacaaagagattgcagatcgtatggaagtggtgaagggggggccaaactttaacgcggccatcatgcaagggtatcaatacctggttgataagacttattatccatccataaccctggaagaattgtggaagcctgacaatggcatggacaaactaggaacagatgctgatgcctacaaggacatatgcctctctttctccctctgtcacctgctacagcgacgcttctttggttttagttgtgctgagtctgaccggccagagacccgtagctttgtgttggaaggcttgcttcaacctgtagcttcaagtagttcatcatcacaaggtactggtggttctcgtggtaactacgagagggccttcaaggtgattgaggttgagctagccttcatgtacgactacatctacagcagcaacgccttcgtccattactatgaagctggagcttgcaccgcctgggcaatagcttcaatcctgaccacatgttttctatgtgtggctgttgccctacagcaaaaagaagccattattgcatcatctgcggtcactatgttggactcggaggtaattagcacaacgatgacaccagacattgtcatcacccttgtcatactggtgtcccttgcttccctccaagtgttgcagctggtgaactccttgtcgtccaattgggcaagagtctcccttgtctgtcatcttttcaggagaaatgccaacaacctggagccatcgatgggcttgaagctgaggttgttcctttccaggatcaaactattggacaaataccagtggcagaacaagcttgggcagtacgagagctcatcgtggctcaagaaagctctagggtttgtcagcttcaagataggacaatgttgctataagccagtgtttcatttcatgctctactgcgtgcggtgcatgatgcgatggccaaccatttgctgcccatgctatgtggtgtgctctccgctctgcaactgggtgttcaaattgcagcctagttggcagttgctcccaggcccttgttgggtgatatactccgccctctacaagttgtttggcctgcagtacattcaacaggtgctgacagacatgttgggcattagcactgcaagctccattcagctgcccattgaggtgaagagtaccgtgattgatgccctcgttgggatcctcatgcccaggcccaaccatgacagtgtcgtgttgtccagtggatcaacatcgctagccaagaatggcttgcaggacaagttcataaggcagtacgcttcgacaagttaccatggcggtagcgctagtaccattatccccgaatcaaagggcaatcaagccagcatcatcttgacctggcacgctgcgacaggttgctacgacaaagactatgagcaaaggaagaagatgaaggctactacagaatcgccgctacagcacaggcagtatcgtgttgtggccaccgctctatccaagtactgcatgtacttggtagcttatgtgcctcagctgctgcccgggcagcagtcctacacaacatctgtctacaacgattttgtgcgctcgccgtcctacatcttgcagagtggtacccagctgaaagatgagctctgcgaggcggtggtggaagatgaactgaggtggaaggtgctagctgatttctgggtcgagatgttgctctacctcgcgccttctgacaatgtcacggctcacatcgagcaactcgcacaaggtggagagttcatcacccatctctgggctctcctcttccacgccggcatcctgtaccggccgtacaaggaggaggaggagccagctgcagccgggacagtgtgacgaataaccacttaattattaattatcttgtgtttagcagtttgtttccatactttttatgtttgtagatgcatgcaagatgctgatttgcctgcgggaatcccaaaaatattgcaaaaaggaaacggataattaagcaagtttgtagtctcttctgtccactctagcactagcactgaacactgatgagatgtagggatgaatcgtgctgcgtgtcgcccgcggagagggggtggcggacgctccgcgcgggagaccgacttttccgttttttttttctttttctgtgttttccgtttctgttcggttggctgttttttttttctgttcaaattggttttccctttttttttctcttctgtttttttcggttttttagatgtatgaatacaaattttgtattcgtacatatacaaagtttgtatacatgatgcaatttcttgttttttttatttttttaatacgtatatatataaagtttgtatatatcgtacacaaagttcgtatacatcgtatacaaagtttgtatatgtcctaaataaactttgtatacatcgcatataaacttgtatatatgtatatatttttatgcattaaaaaatatttataaatatatatacacacgtgtatatatatatatatatatatatatatatatatatatatatatatatatgtatgtatgtatgtatgtatgtatacgtatgcatatgtagtatatgcataagtatagtagatacagagaagagactagagggggggggcgaactgaccgtgcgcgtgccggggcgcgcggctgattgcgtatcagcgccacccatatatgtctactccaatccatcaaaaatctcacggatggtcgcctggtcggttttctcccacgatgatcagtttgttggagcacacacacacgccactgaaataattgcatgccaaagcagagtaacatcagagaagctcccggtttcagtttgcccctcctccacagccacatcatgggccttttactgttacaagcccatatgtatgtattgattgtttgcaaactcggcccaactagacgggccgcacattcctcaaattgccgttccggcccaactagaccgtgctgttggacaacatatggcaccggcaacaaagcgtttccgggagttttgaattatactagaaaaattacccgtgtattgctatggaaagctaaaattataataaacaattgagtagagttcaattttcatgatccaagtgctttaagaaaatatttttcatgttgcgtgcgaacacaatctcgtgtcaatgtctagacaccaggtttttttttcaaaacaatctatttcacattacaacgggtaaattattttatttgtacaagaccgtggcacaaaaaaattgaatacggacgtactgttacatacagacatgaccttagtggtgcgcaatcatttctcgcaaattgtgttcttcactcgagctgatcttgaagatgaaagcattgtggatattagagatggcggtgtaatcaaacatcgaaacggtacctcggatataggaaggttgttggttattgttgaactagatattcagaaggactagataagaatattggtaagggtttattgcaaagattattatacttaacttacaaagctcgcattcctcgcaacagtaaaatcataatcacaagccgatcagacaagattgcgaggttaggaaccacaccacctctcagattacagctccttccaaaagaagcttactggtacttcttcaaggtgtgcacatttgggagcatggatgcttcagagcatcctgaaattgcatccgtagccatggagctagcaatggagtctgaaaggagcttcatggttgccaatgtctttggtagattactgaggtcgaataccaacacgctttactggagattggttcttgcatccctaagagagttcaagaagaagattcgagttgttctgttaggaggtgctgatcagcctcaaggaagatttgatgcacttggatggaaatcccagatagcacctaactatagctacacgtatagctgtgagatacagaggccaatgtgtattgttagtagataaaccttgtgtgtttgcattttaaatttctgttatgcatgcgcgcgagctccggtttgtggaagccgtgcgaatagctgtcatgccgcgagaatagctcggcgtggcgctagcaacggggagtgcgcgcgtactgcggatccgtggggatggacacgatcaatccgcgacgtgggaacgtttctgaagcccatgtttctttctgttgcatacctatcccctgtattgctctgttcttcattttcggatcagctacagtgcgtttgcaaagtgttcgtccaggtgttcgcgtgtgttccactcgccgattcgttgggattttcctgacatgtatggtcgccaggaagaagaaaatgcagaggaatggcggctgaatggctgaccatcttaggaatttatctgatgcactctagtattgttacatgtaggaattgtgtctttatatgtaacctctaatatgtaaaactttttccgataaccaaagaaaatactccaggcctctacatcccaagtatacatagttgttctcttgtggtggagcctattcatccgagttaaggaattaggtatggtgctcacgtttaaggctattttttttaaagtagtaagtaaagtacccattgacagcaatgcgtctgtgataactttatcaattgtaatatatgttggcccaatatctgaaggtgcttatattgatatggtttgcgtgtgtacatgcatttgtaagcatcggcatttgaactgtactttttattaaaaaaaaaagtataacatatatagctagagctaatattcattttgcatcacattcaaagtgagttttttattatgaatggttattataattgttattttctggaaaaataatattatggttgttttaatgtattctagtactttctcttgatgataaaagaaacttgacataaaatgagtgtcaaagagaaaaaggcacaaacggactacttcctgcatcttaaaataaatcaatctaacataaaatgggagtttacttagtacatgaatatagacagatgtctatctgcattcattattatataggtatttccattctattttaggctcgcttattttgggattgggacggaaggagtagtagagaaagatgggaagcacactgtattgaagtgctagaagatatgattgaggtgagatcttgtagtggtaaaaagtaaattgcagtattggaagaatacacataaagtttagagtcaaaatgttgaacttttaaaaatctatagcgtttcaattctggaactgagaatatttatcttgtttttttctgaatgaaaccagcacaagattgtgcttattcattaaatatagcaggagaaaaatacagcccctaaggaaaaaaggaaagcaagaaccgggaaaagctgtacactattcaaagcgcggaatagttgaggtttgaggttgcggcctccttgtgctcatatatccaccagtttcgctccatccaaatttcccaaacaatgagaatatttatcttgtgaattacacatagcaagaaacaaatgtatttgtttaaaagaatcaagaaacaaacgtacaaaagatattttcagtaataaaattttttaaaaataaaacatgtaggtatgatgtgaccactggcatgactagtctattttggtcaaaaagcttgcaagagaaacatataaagtcaattgaccgacctacattgttgtttctagaaagcgcaacaaaaaactgcacatgaaaatcaaaattacccatccagtagttgactgattcctatacatggaaatcaactttccatataactaactgcattccaagtcattcttccaaatctggctacattaagacggctaattatttcatttaatttgtggcagtcatctgcgcaggggtatacaagactattacactacagcttcgttattcttggattaagataaaaattttaactcggtttgagttagtgcttccgaaattactaaacaatctagacattgcttgataatattagataaatttattttcaaatttaaatttattaatacttaattaattatgtgctaatagttttttttcattttatgtctggagtttgaacgggacaaattaggggcgtgttcggtaatcattcctttacgctgcagtgcttgtgttgtgcggctgcagctgcagaaaataccagccgaataggtcctaagacaccaaaatccagccctgcctaattggattgggcttatcaacacgccaggccttacacggcccattacattgtttggaatgcgtgaactctacttttttttaaaaaaaagaaagaaaaatgatgacaaacaattaattcacttctagcaggagcgtacattttttttaaaaataaacacaatgcaaacatagatgcttaagtgcatctccattctaagcatgatgatcgtacttctgaaaatggtaaaggaaaaatacaatcatccatggtcgtcgtggttttggcattcaccatggacaagagcaccctaaaatattaaatgtgagaggaaacgctattaataatattgttgtgtggtggaattatatatgttgtccataagtgcatttttagttggtactggtagaaagtagaagcggggccagacatgggtcaacttaggcttgagcctcaggcttgactcgaaaaactccatataaatcctttagaaattatatagacatttcaaaaatatataatctctaactaaagttgtcatatttagtcttacaaatattttttgggctccacaaagaccataagtaatactccatatttttatttttttacaaaagagacttatagtgaagaaaatagaaaagtaattaatgggccattcaatctttatcatccatccaaacatctaatccaatacctaaaaacccatcagatctttcaccaaaagatacccaacgcccatctaatccaaccgcacgtacgagagcactaattaacaagttttttttagcatgatcaataattggggtcatcacaacacaatgcacctagccatcaatacatgatggaacatctaaaggtaacacactccaattagacaaatcacattagccccatatcatggaattaattaaaaggcatggcactttgtttttactagtactaaactagaagctactactaccaaaaatgggaggtatgttggtgccaggtggaagacaggtgggcccccaccaacccctgcaaagggcaagcagacatgatgggcctcgaaagcgtagctccatgccagtttgtgggccaggcctcttcttcttcttcttcttcttcttcttcttctccattcgccggcaaaaagaagagaaggcgacttgcaatttcagctccaatccgaaatggagatggccaatcaagaaggttgtggtgggcccagcatgtggcccaaaaggcctaccaagattaagaaaagaagttgtaaaagaaaggaaggaaaaatgaaagagaaagagcttgttcactttgatgaaaaaaaaccttaccgaattttggtattaacttcctttcaaaaaaaaattttggtattaacaaaaaaaccttaccaacttgctaaaattttgacatgatttcttatatagttaccaaaatttggcagcaaactaaatgtagccacttttttggcaactttatcaaaatttggtaaggttgaaaatgacatcaaaatgaaaaggcccgaaatttactcaacagcaaggctaataaagaaaagaagagatttggtttctagagagagaaagagaaagatgtctccatgatctttgctctagatttctgttgtaatatgatctctcttttttaaaagggcaagggtgttggaaaatactagtgattcttttatttcctttttcttgcacttatcaagcagcctgccacgctgacctgagaactaccggaaaacaagtgttgtcaaaattgattgcttcctgcactaaatccatagagactttttaaggtccaacagtactttacggtactaaatcttggtcgttggatctggtccgatccaacggctggtagtgtttggtaccgcgaggtaccaaatatgtccctattgcggtacctctcgcgtagaagagaggtggaagagcaaaaatgtaactttgtgtgcgatagatgggaggaatagacgggcggaaccaattttgtcacattttacatcctcttctgcgttgccgtcgcgtttctcttccccccgccgccgatgtgttcctcttccgccccaccgccgccgtgttcttcttccgctgccgccatgttcctcctccggcgccgcgacttcgatctgggcccttgcgccgaagcgagatcgattgcggcgtgcagggttgtcccctctcttctctgggattcgtggtcctccgccagtcactgcctggattgatgccatcaacgccgccgccgctaccgccgcctagacgccaactccgccgctgccgggatcgaccgccgccgcctcctcctggacgtcaactcggccgccgctgggaacaacgacttggacgccaccaccgccgggaacgacaacttgaacgccgcatccacccttgctcatcttttttctcccgctcctacccatcccagattcaacggttagatatcgatgtgttttggtaccgagcagtaccagtaccgaccggtacaacctgctggactgtaaagacgctcaaatctataacttaaacatcgcgatcagagtctacttagtgagtggacaaacctgttgtcgcagacatatggccacatatataggtggcctttttatttttctctctttttctctattaccttaaaagagggagttttatatgtatccgctacctttccctatccacacgacgcacaacaataatattagattatattagattgtatgggacatgttttgttgtttcatagcaattcataggtagactaattaaatgaaaattaatatttattttttatatggcgcctgccacctggtgagggggagaaggcatgtgttgctttctttttttttttggttttgtctgaactgatgagactataatactcttcatttctatcactggaaatggggagcaatgctctcctagtttaaaaaatatatttttttaagataatggaaatgagttacatatctaacctctgtaagatagggacataaccatagtattcagttttctaataacttgtatagaaagtatttacatgaaaattgctgcgcaactataactatgcagactatatatgcatgcacttccggaaaaaagaacaaatatatgattgatacccatgtatacataatgcatatggtgaaaccgtgaggagtcaaagtactgtcaaacatcagtttctcaaattcctctgaaactgttgagccatctgaatacagaaagagggagagagaaaggacacacagtactaccactgataagggaaaacaaaacagtagattaacgaataagcactgctgatgcaacttctgcaatcatcatgtccagggagctaaaacgaccttactacccttgccactattggccgccatatatcaatcaatccttttctctcttttgtggaagaagaagaagaagattaagatgctggtgttgagtcgtgtggcttttgctactgatcagattgttcagttcggaattcagataagaaactcatctcaggatcagacaaacaatgggtgggtgccagttcagaaagagagaatatatacggcagcaagtcagcaaccatatgcagaaaagagcagcatgctaatgtctttacaggatgcgcataaaatcactctttttcagttcttttctagcctagtaaagattttatgccttggggacagatgagattattattgagatcagaacatcatgctaaggatctcatcttcttctttgagcatccgaaatataagtctaaataagctagattccatattttaggactagcacaaagcttagactatatattcctaggatttcacttctccatgccaagtaaaaagcacataatatatacctcaataatacatctaaaaaaaatatacctatccaacatagtaggatttttctgggcattttacaattctcccatatcagtccagatgttaaccattttttctcttgaattccttcatttcaagctacatgtgcatatataggggaattaatctccctgagttaattttgaagatagtattttgtagtaaaataaatattaagtaataagatatgactatgttcatggcatgatgcagagtttgagatatttttactccattatttatttttgaatgaaccgatatcggcatgtctatttcattaaatatagtaggaaaagaaaaagacatttacaggtgtaaatagaaaaaacatggttacactgtaatatttgccaaaggactaagatatatagaaaggtgactttaccattctttaaaaaagtatcaagatgtatcatattttctagcgtaaaatttagtgcttttggatactaggtaactcgaggttgtaaaatttaggtttctcaataaagaaccgtaaaatttatcaagatagaaactagtcgctttgcgccagccatgcatctttttactccattatttaggatgtcaattattaatagctaagggaatttcactacttgtgtgatgcattcgatctctccattaacaagatggatgtggacctttgatgcctatgcaaacaccatgattgagtgtgtccatcaagtagctagtcggttagctaggtcaatatcttcaagttaaacacgtacaaatcgatctatctagcttcatctctttctttctcttccacagtgtcaaagacaatgtgtcggcatggcagacagctaccgtccgacttgaaagccatatatattactaattgctttcttcttacttaattattctatcctaattaaagtaaagatcgagataataaacagattaaaactattgtcgagatggattatattccctccttgggtaatactattaacatgaaagagaaagagataattaacgatggagatatatatacatacggatacacttgagcatcaacaatataatgcaagttcatgggcaactactacatatatagctgactaataagagcaagttcaatactatagccaactactagctccaattcatctatagccaatctaatagctcattcatacaatagttatatactacactattaatacctagtcccacatgtcatagacacactgcgtcttggagtccgtgctacagctggctataaatctgtagcccgctgctcttttctctcctgatttatcttcttaaaatatgtttgcagctggcttatagcctgctattgtacctgctctaatagtttaaattatttggttttggaggagtgtgtgtttagctttcgttttcccgggacttttgctgcaacagattgcaagggcccccatgcttgaggctgacacgacggctgcaattggccaaattcgagtgtctctctcatggcgcacgcttattagctttgcattgttgcccactaattaattaatctgatccattacatgagtaaaaccaaattacaacttgtgttcaatttatccaagtcgatcgatcattgattaattaacggcttgttcgatcttcatcgatccattttaaatccgctagttgctaattattaataagtttcatatgcttaatatacttttacttagtgcgtgctttttgtttatttgtcttatatatacggagagagttcaagtcgttttcctcattgaagctattttgtatcaacttaaagttttttgtacattctaaatacaaagacatggaatgtaactgatcatcttttaatttaattcttacctaaaagtatctcaatcatcgtaggatacacacaacccccatttgatggaggcactcaacctaattaaaaacaaatcaagatgtatatatatactagaaactaatccatcaatctaccccccatcaagccctaattaacttgtcacttaattgccgttaccgatcaatcaatcaatacaaataaatccatcgtccatgcattgcaatgtattgcatccatatatctcgattgcgagtggctagctcgacgataaagttaattaactggtcgacgccatggcatggcccagcaggtctctcgatcaagatgttgaaatggaagttgaagggcaccatgaacacaataaataaaaatccccaatttgagatgctgaaagagacttcataattagcggtaactatgatagcggcacactatgtccatcgccgtagtttgtttttgacttttcagtgccctattcattaccgtcactatatactagtacgatttaatgatattcccggtgataagaataataaataaattgcatatgattgttaatatatactccctctgtcccataaaaaaaccaacctaatactggatgtgacatattttaatactacgaatctagacatacctctgtccaaattcgttgaactataatatgtcgcattcagtcctagatttttttttggacagagggagtatatgtcaattaacttatatgggaagctcgttgttttcatggatttccaccaaccaaactatttggtgagaaaatgatcattcctaacctcttaacataaatgtgtaagggttcgttttccttccttcctaccttcacctctagtggagatgacgtaatgccaaacatcggtgccttagggttcaaaatgaagagcaagagttagggatcatacataggtgcagattgatatatagtgagattgtatgataatggcactattgaagctatcgacgaggaagctaatagttggtaggctctacaagatctataagaatgagtggttttgaagcgacacctaatggtgccaacagctagacattgctaaataagatgacgaaagggagctagtaaatggaagatgcatgtttgtccgcaatgagagggccaacaccaatagtaattttgtcgaaaatgttcgagtggtttctaggagaggatatatataggtggtcgtggctagaagtaggagagggaatggctagaattgtatagggatggagtggcgggcttgaaccattcgataacacaaattcaatgccccaaaatttaatatagttctttgagaaaatcaaatagctgtaacataaaatccgatatatatatatattttttggtgcacgattaattgatcagttgtcgcagttttggcactattggaaactccaagtagaatggcatagctcacctccttattaaatgcatattactgtgcacaaacatgtggtttaattgtgcaaatcataacacacaccacctgcaacatgctgatggtcaagattctatttcatgtctcagatgattgtgcagttgcacaagtacaacacacctgttgctctgatggccctactaaaactcttgacactgttttgctacatgcatgtaaaacaaacagctgcaagattttaaaattagcttggaacattccatttccactagaacttcgtttacacaaaaggaggaaaaaaaacagaggaacatttcactaaagcatgcaaagacaaccaagatcacaccattaacacaaataattaagccaaacatatatttataaaagtccattggtatattccactgatgtaagtatgaacacatcattaattacaccctcacaaaaaaacagcgaaattacacaaggctcccctcgacaaccctgggccgtcggatgcgtgatctacggtagaattagcatcaaagctaaaactcccttgggtctacgaagatggaggttcccggcggcgccttgctccagtcgccgagcgcgccgtcgccgtagccgtcggccagccgcttgatgcaccagaggtcgtcggcgccgaggcgcggccagtgcggcacgccggcgcggagcggctcgcacgcgcccacctcggtggccaccacgcgcgccccgccgcgccgcgccacgttgtgggcgtgccggaacagcgcccgcgccatgcgcgccgccgcggggccgccgccgccgaggccgtagacgaagtggaggccgaacggctcgaacaggttcgggatggacgggatgcccagccacggcgcggcgcggtcggcggcgcgcgtcgcgcgggcggccgcgcgccacagccgcggcgcgccgcgcacctcgaggcggaacgcgtctttgcagttccacaggctggccaccgcccacgacgccggcggcgaggccaggaacccctccacgccgcgccaccgcgtcccgcgcggcacggccaggaacgtgccgagcgacagggcgttggagagcacggcgtcgatgtcccgcgggaagaactccacggagccgaggcggcggcggtacaacagctcggcctcgcgcgcgtcgaggcggacgacggcggcgcgccgcgacggcgcgaggtcgtggccgaacaccgggtgcacgagcaccgacggcgtgcggaacttggcgtagccgcaggcgccggtgaagaggcgcaccgagggctcgttgtcgcggtcggtggcaacgtaggcgtactcggcgcccatctcccggaaccactcctccatcctctccaccagcctcctcccgatccctcgccgccggtggcgcggcgagacccggaggccgagcaggtacgccaccttggagaagagctggctgcgcccgcacgccacggtcttgacgcagccgcgcacgacgccgacgatctccgtgccgagcgggccacccacagcctccgcgacctgaaaaccacattccaatacccgatccagcaccagtgtgaggtctcgcgatcaacaatggcggacaagcaacgccccccgacgagacgtacgagcatgaggtaggccggcgagtggcggacgcggcagagcgggtcgccgaggaggtcggtgaagaggcagagcttgccgccgctcggacccacctcgcaggcgcgctcaaccagttcgacgccgggacggtcgcggccgccgtcgaactcccgcaccaggaccacctcgccgccgtcctccggcaaacaagccaccgccatccttgctccgatcaatcaatcaatcaaatccccttcttcttcttgatcgatcgagcggtgcgttgcaatttatagcggcgatggagtggcgggagaggagaaggcgcgcgcgatcgatggagatggaggtagtggcgcgagtggaggagtgggggagtgataggatgggggccacgtccccactttcccgccatctgtacacctctctctctgtgtgctccgggtggggcccacaccccaagttaaactgccccttctgctgctccatgctaaaactggatcgacttgctaattatttgtgtgatttaacaatgattagtgttgttggagtactatcatttttggctcatcagattggaggagtaagagagagctagataatgtaagattcgatagatctttgtttgctgctgtccgatcttgtcatgattattagggtaattaattagttgtttggaaattatctcttttctattatcatactcggggggatttaggagaagttattttctttttctatcttaattatattgaatgacctcctctaatcattctcacataagttatctttttttctagaaatataggagtatatgacatgttgaaattttgtagccagtattttggataatctttttccttaaaaatgaaaatgtttcacatcttccaatagacacatgttctaaaagcccaataaaaagaacttttcaattagagccagaaaacctttcaaaacaataggaatacaaaagaaaaatgtatatatcacaataataagagactctcggttatcctctatgtcgtaatactatatatccaactaaatataaactcaccacatgagtacaaaattaaaaccgacggctaatgaagtcagtcaaacacaacagtgcatacaatgactaaattatttggttggttagtctcattctctataatcggctgttatatctaaacgtagtcttgtcgctcgtggagaaagaaaacacatcgctacttttaatattgtcgttgccaatcaaataggaaaatataataattaagacgaatgctttaaaaagcaacaagacgttgcagcggcgatcggtagctaacgcaaaacaaacatttggtctgagttatcttttttggaataataattaaaaaatggttcaaatatttggcctatgctaaataattacccatgttgtaaatgtcaaatagaaaactcttaaggttatgggagttaggaactatctttgacacaatattagaaacatttcaaaataaagaaaaagagagtatcataataattagaaactctcgatgatccaaattatccgactgaatataacctcaccacatagaagcaaaattacacagctatatgcatcacatgatgtagaggctgagatttttatttgactatcttaaatatattgagtacaaaattgcaactatatatggactaacgaagctagtccaacataacaatatatataggtactacatcgtcatttggtcggttaatattctaatcaagcaggtctcactccctataattctatattatatccgagcatatcctcatcgctcgtagagaaagaaaacacatcgatacttttaatgttaccgttgcccatcaaataggaacggataataattaagaggaacaattaaaaaagcaacgatgaggacgacgacgaggaccggcagctaaagcgaaacaagacattcggtcaatcggctgctaatttcctcctgtaggtcgatcgatcatggggaagaagagaactgtgcatcgaccatgacaacaaacctatctaatatcgatcgatcgatcgacaaaattatcggatttatttatactacacatggtggttcgccatttttctgttgatcacacctgcaggtgtagtgtgcacacgtcagcattcgatcgggtggccgcagcaaattaccccgctctctctgtccccttcttccggaagatctcgtccgtccgatcagcagcggacggcccggatgacttgatggagtgagtccgggtggggcccacaagggggtagtggtgggcccgcgagagagagagagcggcggctttggctgcgcggcgacagcggtggggcccaccggagtatcaacggtcgggaacgcgacgacgagagccacttgcggcggcgtacgtggcggcggcggccgccgtcgatttggccgccgtacgtcgccgtcgacgtacggacacgcgtagcgtagatccggcgcatttggcgccataaaattaaatctctctctctcggagagcagtagagagatgatggatatggatggatggattggtcgagaaattgaaacgatcgatatcgatggagttaatgattagtagtgttgatgacgatgattaaaggcgtactagtgattgatcgagatgatggatcgagtgtagtacgggtactggtactagtcaatgtgagagcaagtttaataatatcacccgctgttagctgcaatttctttccatgtcatctgtagccaacatacatactaatatatacaatagggttagctatgtatttatcctccttttactgtagcaaatgatatttaattgcgttgcgccaagcatctcctctcccgcgcaaaacggacgcacttttttcttggagtacgcatatcggcgggcgactatttagtcgccggcctgtactctctctcatctgcgctcccggccaagtcatcaacagaacttacgtggcttgtttatcgccggcttttctacccctattgaacctgctctgatgcaatgcaaaatggtgtgttatatcatttattaattgcaggaatatgatggagcaggacataacgtgtatactccctccgttaaaaaaaaagacacacctagatttccgtgtccagcgtttgatcgtctgtcttgtttggaaaaattataaaaaaaatttaaaaagacaagtcatacataaaatattaatcatgttttatcatctaccaacaataaaaatactaattataaaaggatttcatataagacggacagtcaaacattggagaaacccatagtttgtctttttgtaggacggaggatacgatcaatgaaaagacgctccatcaaacatactagtatacgtatacacgacacgacgggatcggcctgccctacatcattattttgctgctttctcaaatcattataaagacaacttttcatgatgaaaaagaaaatccattttactccactacactatttaaatgatcacttaatcacacttgaactatttttttctcagtttacccttaaactattaaatatggtttactttacatattaataatgtttctcttttcttgctcttcatatacgttgtattttaagtttattttttagagctatagatgacatcattattaaagttcaaaattattttcaaaattttcttggttgtttgcttcaactttgaaattttaatatttaaattaaccttaagtgctttcgaactacataaatagttagacaaatttacaaagatgttcagacataagttccgaatgcatatgcattctaccgaattttcagtgcaaaatatgatttgtacagagtgaaacaaaaaaaaagagaaatagtgttatgggagttaactgaaccgttttcaataccgataaatagtttaggggcttaagtgatttggtggaatagttcggaagagtaaaaataaactttttcctttcatagaactacatagtttcatttctaccagcgggccataaaaaaggttctacctatattttgctttctcaaatcattataaattaaagatggcttttcctgacacgtaggtttaatttctaacatcggaccataaaagaatgattttcgtagcggtgattatttttcttaagtagccatgaaaatttatgaaagggtcatcatgaaaccttatggacgacctctctctctctctctatatatatatatatatatatatatctcttttcttgcttatatagttggtacccactatatcatttattgctataaagtttacaccatgttgtgccacatcattgtttattatgagccgttggattgttctacgaatcctcagatcaacgatatcgctaagttgggccggtattggctcagctcccgttggactttttagcccagcccacatcacgcatgcttctactgtgatggaaaaaaaaaaccaaaacacatctgcatcatcagcgatgcttgcgagggagaaatttgtgatgaaccaggatgagtacggcatgggagtggggacgcgagcgtgcctgttgcatggtccctattggctttccccctcattggcccgattaattggatgtcactccatgtcttgccttagtttatgtctcttctttttccttggaaactgccttaaaaattcaccggatgaaatccgccacctttccctcttcccctctcattttgttaataaaaaaattgataatttattggaggatatacttttagtccaagtagagtgagaaaattttcaaatagatgagaatcgaatgtctctgggcgaccacatgcttctaacatagtgttggaataagaatttaaaaattatgcaactctaaatcttccatcactatcccaaatatgttacttgcatgcattatatttcatcttcactctaatactaagttagaagacatctttggtcttagggatatttttgtcttttaaacaaattcttatccaattaggttgaaaatgacctgtaacaaattatcttttttaggtgtcctttatccgcgacacttttttacaacgtctactagcaaattacataaacttaatttgatcatcctatagcaaaatttacctcactttacgcatgcctaaaataacttatatatgcttgtttgatcaaaaaaaagagtgagagacaaactagggagggaacgtacgtgttgtgccaaaagataatcattttccccaggccctagaaagctaattataagcttaactaatttcagcgtcaagtcggtcatgatcagtaccaatgattaattagccatcatatcaatatttagcgcagctagcgtaattcacataattaagctaataagatgtgtttgcctatcccttctaattaagctaacgtagtaatcatatatatgatccacgacatgtaggcccagttcttcccttgggattaatattttagctcatgaatgattaattatatcaggcatgg

SEQ ID NO: 8714 - DNA, 7881 bp, Oryza sativa
  unsure (1)..(7881): unsure at all n locations
gggcttttagaaatccagtggatatggatgtggatgcggatagtatgatgcggatgcggatatggtatctctaaaatccggcagatgtggattatccgacattttggtcggattatccgataggtcgtttgccaaataatccgaaattatcaacatatgcaaccactctatctattgtataaacataagttggtacatccaatgggctaattcatcaattaacatagtttttttagtctaaggcttttatcgtctcatatcacactcgcgtagctactccctccaggttgataatacttgtcgttttggacaaggacacggtctccaaaaagcaactttgacaattattttccattataatatgtatgaaagtgttaacaaatatatgattttattaaagtactttttaagactaatctatacaagtagtcaccatatttgaaagacaaatattttgaaaatgattcataatcaaagattataaagtttgacctcacccttatctaaaactacaagtattatcagcccggagggagtatattttatattatggacatcatgtatgttgtttagcacttaatcatataattattacgatgggtcatttattgattatagtattattgttccttgcattgctaactcgatgttgcattgattgcatatacacgtaacatcagataaatttaatccatttcccaaattggatcttggcctcaactgggggaccgcaccaaagatgtcatgtgtgttgaacaccatgcaccacaagaaaaatgctttgtagaaacatttttcgagtactatagacacacttttcaaattcctttacaatactgtggaggcattttaaaagtgcccaataagtgccttatggtgaattgtctctacaaacgaagatgcattttataaaatgtctataacatggtagaggcattttctagagacattaaattgtatcacaaccatatgaaaccaatgtaaaaatgagaataaaatagtttcccttgtttttgccaatccttgaactcatgacctgttaaacaaatcattcttatcttcaaggcattaaccaactcaaccccatgtcattcattgtatgtttgtgccttaacttacttatatatttagtcatttagtatatatttttattctaagaagtatctctacatagtttaaagtgtctcaagcaaatgtctttacatgttaagcacattttaaagtgccgaaagaatgcgtctacaagataaaatctaataaaatgtgctaaaaatatttctaaagtgtctctagagtaaaagttttctagacaatttttaaagtgtctctacactataaaactcctgatcttagaggcaatatgcaaaacacctctacaaaagtgtctttatataaggttttttgttgtagtgatggccaccagcgcaacctcttggcccttgccaccgccacttccagatgtcatcatcatcgtacatcatggccaccagcacagccttgacccttgtcgtcaccattgccaccgagaaggaggaattgggagtgtgttgaggttgcctgcttttcccccgtcagatctagataacaacctcatctcctgcacgcccatgatgaactggggctgccactccaaagaggggctcagtgactggtgctaccgtcaggagaggagctcgctatccatgattgctggtgtagccatggccctcgccgctgtcatcgacaaggaggagaaagtgagaggtcttcgaggttgttggctttgcccccaccagatttggatgttgagcttgcccacgacgatctcgggtcatcgctcttgacaagggctcaccgcctagggctaaggagaggacgacgatctcatctagaaaggagagagagggtgtggaaggtgacctcgacaagaaaagaaagaaaaaggaagggtgtggattgtaacatcttgtttgtgttactaaaaatgttgtaacactttttggcatgctaaacactggttacgtactactagatactcttgcagtaacatgacctataagaatacttattggttgtgttactggaaactacaataacacctctttagttatatatatagtagcataaactacaataacacttttttagttactgtatagtagcacatgcttagcccatccccaatccagaaactatcaagtagttttcatacttaccatgttatatagacactacataaaaactatgtatctaatggatggtgtctcaaaattaaattatcatccaatcatctctcttttctctccttttatccatctatccccttgttttcattcttggttcttgtgtagagatggtttcttcatctttttatctctcttctcattaactcttttgctatattagatttttgcttatgtgacaatgtatttaatactatgggcactatatgacatcgagggttggggatggccttatgttactacaacccagtcctagggtagagacccttaagccttaaagcaagtttaatagtatagctaactaaagctaacatatataatgggttaactataaggttcactctattttttccctctcctctctctttttttcactatgaatttaatataaatttcttggagtaagtgcatagctaatttctgcatgagatttcaagtttaatagtatagccaactactagctccaaatcatctatagccaatttaatagcccattaatacaatagtttcctacaaatatatactacaccaataatatatagtcctgtctcatacacacacaacgtttagaatccctgttacagttggctataaatctgttgcccgctttccttccttctcttctcttctctcctctatatgtgcttacagccgacttgtagcttgctattgtactcgctttgagagccaacactattcacttttctttatctttcccttccacataagtttatactagttggcttacggtaagtactataaaatatctttgtcggaggcgtagttggatatggctagaaaagagaatcgaggtggtccaaagtgaaaaaaaaagagagagtaaatttaactagtccaaagcgataatattgagaaagaagatgaaagaagatgaaagaaaaaggggattggagaaacaaataaaataaaatcatttggattagtatactagagatagtgtagatgtggtgtatcgtttatatcacctcttatcttacattacatatagaaaattagggattttttaagagtacctttgggtggatgttggctgtctatgagatgagatcgtacggaggagatcaatttgtactacagatggtagcaagtgtagtaggtgtagtaaaagggtaaatgtggaaaaggaattcgtgggactgtttaactttgcagttaatagagggtgtaatccgtaatttaatcacgggagcaagcctggcacttggcccagttggttcaggggcggatgctaggcttccgtcgagacgccgtcgtgatgtggaggccatagatcgctcccgccgccgccgtcctcttcatcgagcaaagcgtgagacacagaaatcaccgtgtcccatgccatcactggccgcccttgccttcctgcagtcgcgctcgcttgcgtctcccctgtgggctgcgaccagaaagctcctatgactctcctctcaaatactagatatcttaaagctcctagctttgccgcaaccagggcgatttggactccgtcaactaatcgtatcgtgacacgtatctgcaaacctagttgatccacgccattaatttttgcagaaaagcccttataattttggtatttacgattgagtccatcgaatcagagccgttcgatctcacccgtggacataatctgatcgttcgtctcctatctagatggttccgtccttacccagacgtggaatccacgatctctcgtctctccacgtcgcatcccaatccccatctcgcttctcgcttctttgaccggcggcgccgatgctcctccgccgcggcgccgcctcctcctcctcttccatggcctttccagcgccatcgttttacccgtcctccaacagtgcttccctaaagtgtacggtggtggctgcgctcgatggaggggctcaacggcggtttcaacatagccttgaggtcggggacctggcggcggcgtcggagcctctagcacaggggtttggcagcggcggctgctgctggaggtcccagcgatttaaggtcgctgcggctctcccaacagttttttggaggtcttcgacgtggtgacgacgcatcgagttcgacgggtcactgtcgccgctggcggttaggtgcgtgattagcagctccctgtgttttcccctttcatcaatgggcttgtgattcaagcgattacattgatttaaatgtggatttcgagtttctactgtctactgggtaggccaatggcatagaggaggattaggacgagaagaagctgtcctctctgttgcctctcctgtacagcccaacatactactatcatattgtctgtaggtgagtttttggagcaaataatgagttctctttgattgatttttttgcaaataggtgtgtgccaaacaggatcgctttgcactgaaaatttgttctatctcagagcaaacatggtgcctaatgaaatgatttatgtatgctgtcatgcagctagcacatgcagaagatagactggcaggatgaggtggtggtggttcttccccagacccgtcactgctctggttgcatttattaccttttgggttgttgtcctatgaattgagcctaattagttgatattcaacagctggaggttatatttcctttttacattgcatcttcttggttgttcaacagcagtgatagcatttgttcccttagtgaaacagctatcttgttgtagcagtgatagcttttgttcccttagtgaaatagcttttggcaaattgtactatcttgttgtattggctagatgagtgtcctagatgtttaatatggcccgaggagtttgctaagatgtgtgacagaattcaaaatatatttcaatagaatttttgttgttacctctaaataaagaataatgttctaaatgataactatattatgttgaatcatctctaaagagttccttctgtttttgttcccactggttccatttacatggtcatgaagcagtttgcttgctggaccttttgcgtcgcttacatggctcctcccattatatctggcttttaggtaaagactattcatttctttgattgttggataactaagccagggtgatgtgaattgctgattgctgattccactgtatttaatacaaatttttcctatctttttaacagtgcttcagagggcaataaattcttctgagttcttccattgttacctgtttttagtttcagtaaaaaactaagctcttcaatgtaaatgggacaacaatttgaatagttactataagatcttttgggatcaaaagatttacttgttgcaggcttaactttcatttacattgcagaaacttatcattggtagataaggatgtgttaaaaggggcttgcttagtacaactcaaggcgaggctaatactatggtgggtatgaatttaaaattacaatatctgagttcaaattatttggtataagattgtagtttaagatgttgactgctaataattttaaagttgtaattgcatagctcactggccaaccacgtgctataatgaaatatttttttaaaaaaaaattgtaagcaagtactattaaattgaactctatgttgttttgcaaatcatcctaccatgtaatttatgatggttctcatgatcactaggccaagtagctctacaatgatgcactacaaagaatccttttacacaaattatttgtgggttttcagcatatgggtgaacagacggctagacttgccccatttttagagttcaacatttactagctttgtaaaatattagtgttgcttattaatgaaattattatatacccaaattaagagcaatcatttcatacttttatccatcgcatgagcttcttgtgctacttccttgccaacctctgattcatgttcttatgtagccattcagaacacgatagccatgacagccaggcaaaggcaacggaaaaaggtaagctgcaggaatttctctttttacctcaccattaaacatttgcctttcattgtttgtacctttttatgatatgccatttgcatgtctgatggccacagatggttctgaaattcaattatatttttgtgtaactttgcaaacagatcgccatatgcccatatattgccattctttgtaaatgacaggcgtagacatcaatcactcagtccagtaattgcataatagtagtatttccttgtttttatcttatcatgtgaaaaagtcccctataaaatttggctttctcactattattgctttgcagaattaacatggcaagttttgtacaggaactacatatgcttgcattgaagtttctttggggaaccaggagatgctttaatctttatctcgatgggtattgggtncctataggnntttgtctggatagggtcgatttctcacaaaattannatcctagggcactcnnccaatattacctnnacaacgagagtatnntncttaggatagggctacaacatgttacgntcttggttcggncttttgtcaactgacanaaatcantgaggatttctagatcgcctgctatattcatgtgatattatctataatttgatatatattaaatttatctgatctatacatgagtttatatatgcgacaccattacgaactgctactatagtctccccgtgttctcttcatacacatgaataaccatatatggtacaataaaagagaattgtagtttcacagcctctgtgcaagtagctttttaagtttaaatggtaaatatttagttttacctaagagaagtttaccaaaaaaaagttctttcaactgagatgcttatgatgtgtgcttgatgtcgccttagtcaatcttgataggcccaagatccccgctcaatcttcaaggaataggtttacttcatgataattcatgtctcatgttaatattgggagaggcaacccactatgctcagctcatggatcttcaggaatggagctgccagcatcttattgacaaacaaatacaaggtaaatatgcattggagatcctttctgtgatttgctctctgatgttctccttagagagaaagagaaaaaaaaaaggttaatccttcctattatttctttttattcattaattatatgtaattaccattttgaccaaaaaaacgagcactccatctgatcattttctaaaccatacaggaaaaatactccatgcacatcaacggttaatgcttttctatgagctggtcttaatatctctaggctgcactgtgttaggctggagcaccccggtccaattcttttgcctaccaaataaacttaccaacaccaagccagttgagtgctgcaatgtgcaaattaaacaatatggtctctgtagcctgctcagcaggaaaaccatttgaaatacctgtggaaatatccctaaacatgcattaaccatgatgatcatttttttttaaatactgtacggtaggtagatcgatatttgtcaacgccttagctatactagaatacgaggggcatctaagagaaaaatacaaatattgaaggctctcatggtagtttggtagctaattaatcacataggtgatgtatatttgtttctagcatttatatcagtccattgattcacagtggatactcagttattgcatttagatgtctcttttcaggaacctttatatttaagttcctttacatggctatt

SEQ ID NO: 8715 - DNA, 9152 bp, Oryza sativa
atttgacaatgtggtgctatagtaaacatttgctaataacggattaattaggttcaatagactcgtctcgcattttacaggcggaatctataatttattttgttattagtctacgtttaatacttcaaatgtatgtccgtacacgtcaaaattttttttgacaagtaactaaacatggcccttgtagaggccgtgtttagttgcaaaatttttcttcgaacttctaacttttccattacatcaaaacttttctatacacacaaacttctaacttttccatcacatcgttccaatttcaaccaaacttccaattttgtgtgaactaaacacacccagaggttcttctgcatgcgtatatactagactgacatgcgttgctatagcttcttctgcgtatatatatagcctttctttgatatatatgcctctttgtgtatagatcatatttttcaactaattagtcatcaatagtcgaccatatggtgagttttctgccaccaactcaatacggcgagaatgaattgtttctggtatatatggcgtctggtggtgtagagtcataggagcttttttttttaactagaatgagttcgcgcgctatgctgcgcggtattgtagcatgtaaggctataactcacagaaaaatgtttgtccaagaagattacataacaacaatactcaattcctcatgtacctacagcgtgataagaacaatatttaacctaaatagttctttttataaccaaagtccccagaagcagttccggatagatgataatttatacaacaatttcacgacgcatagtagggatggcaagcatagtatgattcatccaacatctatgggcacaagatgcagtttgttatgtaaaactaactgaaaatagtacatggttaagtttctcataatcttgtttgcgaggactgcagtattaaaatagtatctgtaaactctagcattggccaaaaactcagtcagatgaggcaatagtattgcattgatcaactatggtacgaaaaaccaactacatttcagattcattagttttaagtagggacttgactcttcactatgagaactttctactcaagaaacatatcccccttggcaattcagatcaccaaatgcaatacccagcatctgctaaaatcattcttaaagttaagagtttggagaattaactcagtatattagagatgttactaagtagaactcaaaagtttggagacttaagtcagcacatagagagatgttacaaaatcagtagaaggaactcaaattaatgaacagatcctcacttcagtctatgttatcctactaatcaaatcagcggactcttaaaatagccatgtaaaggaacttaaatataaaggttcctgaaaagagacatctaaatgcaataactgagtatccactgtgaatcaatggactgatataaatgctagaaacaaatatacatcacctatgtgattaattagctaccaaactaccatgagagccttcaatatttgtatttttctcttagatgcccctcgtattctagtatagctaaggcgttgacaaatatcgatctacctaccgtacagtatttaaaaaaaaatgatcatcatggttaatgcatgtttagggatatttccacaggtatttcaaatggttttcctgctgagcaggctacagagaccatattgtttaatttgcacattgcagcactcaactggcttggtgttggtaagtttatttggtaggcaaaagaattggaccggggtgctccagcctaacacagtgcagcctagagatattaagaccagctcatagaaaagcattaaccgttgatgtgcatggagtatttttcctgtatggtttagaaaatgatcagatggagtgctcgtttttttggtcaaaatggtaattacatataattaatgaataaaaagaaataataggaaggattaaccttttttttttctctttctctctaaggagaacatcagagagcaaatcacagaaaggatctccaatgcatatttaccttgtatttgtttgtcaataagatgctggcagctccattcctgaagatccatgagctgagcatagtgggttgcctctcccaatattaacatgagacatgaattatcatgaagtaaacctattccttgaagattgagcggggatcttgggcctatcaagattgactaaggcgacatcaagcacacatcataagcatctcagttgaaagaacttttttttggtaaacttctcttaaggtaaaactaaatatttaccatttaaacttaaaaagctacttgcacagaggctgtaaaactacaattctcttttattgtaccatatatgttattcatgtgtatgaagagaacacggggagactatagtagcagttcgtaatggtgtcgcatatataaactcatgtataatcagataaatttaatatatatcaaattatagataatatcacagaatatacacatctagaaatcctcatgattttgtattgacaaaaccgaaccaaactaacatgttgtacccatccaagaatacctcttgtaggtaaattgggagtgctaggattaattttgtagatcgactatccaacaaaccataggacaatacatcaataaagattaaagcatctcctggttccccaaagaaacttcaatgcaagcatatgtagttcctgtacaaaacttgccatgttaattctgcaaagcaataatagtgagaaagccaaattttataggggactttttcacatgataagataaaaacaaggaaatactactattatgcaattactggactgagtgattgatgtctacgcctgtcatttacaaagaatggcaatatatgggcatatggcgatctgtttgcaaagttacacaaaaatataattgaatttcagaaccatctgtggccatcagacatgcaaatggcatatcataaaaaggtacaaacaatgaaaggcaaatgtttaatggtgaggtaaaaagagaaattcctgcagcttacctttttccgttgcctttgcctggctgtcatggctatcgtgttctgaatggctacataagaacatgaatcagaggttggcaaggaagtagcacaagaagctcatgcgatggataaaagtatgaaatgattgctcttaatttgggtatataataatttcattaataagcaacactaatattttacaaagctagtaaatgttgaactctaaaaatggggcaagtctagccgtctgttcacccatatgctgaaaacccacaaataatttgtgtaaaaggattctttgtagtgcatcattgtagagctacttggcctagtgatcatgagaaccatcataaattacatggtaggatgatttgcaaaacaacatagagttcaatttaatagtacttgcttacaatttttttttaaaaaaatatttcattatagcacgtggttggccagtgagctatgcaattacaactttaaaattattagcagtcaacatcttaaactacaatcttataccaaataatttgaactcagatattgtaattttaaattcatacccaccatagtattagcctcgccttgagttgtactaagcaagccccttttaacacatccttatctaccaatgataagtttctgcaatgtaaatgaaagttaagcctgcaacaagtaaatcttttgatcccaaaagatcttatagtaactattcaaattgttgtcccatttacattgaagagcttagttttttactgaaactgaaaacaggtaacaatggaaaacttcagaagaattcattgccctctgaagcactgttaaaaagataggaaaaatttgtattaaatacagtagaatcagcaatcagcaattcacatcaccctggcttagttatccaacaatcaaagaaatgaatagtctttacctaaaagccagatataatgggaggagccatgtaagcgacgcaaaaggtccagcaagcaaactgcttcatgaccatgtaaatggaaccagtgggaacaaaaacagaaggaactctttagagatgattcaacataatatagttatcatttagaacattattcttttatttagaggtaacaacaaaaattctattgaaatatatttttgaattctgtcacacatcttagcaaactcctcgggccatattaaacatctaggacactcatctagccaatacaacaagatagtacaatttgccaaaagctatttcactaagggaacaaaagctatcactgctacaacaagatagctgtttcactaagggaacaaatgctatcactgctgttgaacaaccaagaagatgcaatgtaaaaaggaaatataacctccagctgttgaatatcaactaattaggctcaattcataggacaacaacccaaaaggtaataaatgcaaccagagcagtgacgggtctggggaagaaccaccaccacctcatcctgccagtctatcttctgcatgtgctagctgcatgacagcatacataaatcatttcattaggcaccatgtttgctctgagatagaacaaattttcagtgcaaagcgatcctgtttggcacacacctatttgcaaaaaaatcaatcaaagagaactcattatttgctccaaaaactcacctacagacaatatgatagtagtatgttgggctgtacaggagaggcaacagagaggacagcttcttctcgtcctaatcctcctctatgccattggcctacccagtagacagtagaaactcgaaatccacatttaaatcaatgtaatcgcttgaatcacaagcccattgatgaaaggggaaaacacagggagctgctaatcacgcacctaaccgccagcggcgacagtgacccgtcgaactcgatgcgtcgtcaccacgtcgaagacctccaaaaaactgttgggagagccgcagcgaccttaaatcgctgggacctccagcagcagccgccgctgccaaacccctgtgctagaggctccgacgccgccgccaggtccccgacctcaaggctatgttgaaaccgccgttgagcccctccatcgagcgcagccaccaccgtacactttagggaagcactgttggaggacgggtaaaacgatggcgctggaaaggccatggaagaggaggaggaggcggcgccgcggcggaggagcatcggcgccgccggtcaaagaagcgagaagcgagatggggattgggatgcgacgtggagagacgagagatcgtggattccacgtctgggtaaggacggaaccatctagataggagacgaacgatcagattatgtccacgggtgagatcgaacggctctgattcgatggactcaatcgtaaataccaaaattataagggcttttctgcaaaaattaatggcgtggatcaactaggtttgcagatacgtgtcacgatacgattagttgacggagtccaaatcgccctggttgcggcaaagctaggagctttaagatatctagtatttgagaggagagtcataggagctttctggtcgcagcccacaggggagacgcaagcgagcgcgactgcaggaaggcaagggcggccagtgatggcatgggacacggtgatttctgtgtctcacgctttgctcgatgaagaggacggcggcggcgggagcgatctatggcctccacatcacgacggcgtctcgacggaagcctagcatccgcccctgaaccaactgggccaagtgccaggcttgctcccgtgattaaattacggattacaccctctattaactgcaaagttaaacagtcccacgaattccttttccacatttacccttttactacacctactacacttgctaccatctgtagtacaaattgatctcctccgtacgatctcatctcatagacagccaacatccacccaaaggtactcttaaaaaatccctaattttctatatgtaatgtaagataagaggtgatataaacgatacaccacatctacactatctctagtatactaatccaaatgattttattttatttgtttctccaatcccctttttctttcatcttctttcatcttctttctcaatattatcgctttggactagttaaatttactctctctttttttttcactttggaccacctcgattctcttttctagccatatccaactacgcctccgacaaagatattttatagtacttaccgtaagccaactagtataaacttatgtggaagggaaagataaagaaaagtgaatagtgttggctctcaaagcgagtacaatagcaagctacaagtcggctgtaagcacatatagaggagagaagagaagagaaggaaggaaagcgggcaacagatttatagccaactgtaacagggattctaaacgttgtgtgtgtatgagacaggactatatattattggtgtagtatatatttgtaggaaactattgtattaatgggctattaaattggctatagatgatttggagctagtagttggctatactattaaacttgaaatctcatgcagaaattagctatgcacttactccaagaaatttatattaaattcatagtgaaaaaaagagagaggagagggaaaaaatagagtgaaccttatagttaacccattatatatgttagctttagttagctatactattaaacttgctttaaggcttaagggtctctaccctaggactgggttgtagtaacataaggccatccccaaccctcgatgtcatatagtgcccatagtattaaatacattgtcacataagcaaaaatctaatatagcaaaagagttaatgagaagagagataaaaagatgaagaaaccatctctacacaagaaccaagaatgaaaacaaggggatagatggataaaaggagagaaaagagagatgattggatgataatttaattttgagacaccatccattagatacatagtttttatgtagtgtctatataacatggtaagtatgaaaactacttgatagtttctggattggggatgggctaagcatgtgctactatacatataactaaaaaagtgttattgtagtttatgctactatatatataactaaagaggtgttattgtagtttccagtaacacaaccaataagtattcttataggtcatgttactgcaagagtatctagtagtacgtaaccagtgtttagcatgccaaaaagtgttacaacatttttagtaacacaaacaagatgttacaatccacacccttcctttttctttcttttcttgtcgaggtcaccttccacaccctctctctcctttctagatgagatcgtcgtcctctccttagccctaggcggtgagcccttgtcaagagcgatgacccgagatcgtcgtgggcaagctcaacatccaaatctggtgggggcaaagccaacaacctcgaagacctctcactttctcctccttgtcgatgacagcggcgagggccatggctacaccagcaatcatggatagcgagctcctctcctgacggtagcaccagtcactgagcccctctttggagtggcagccccagttcatcatgggcgtgcaggagatgaggttgttatctagatctgacgggggaaaagcaggcaacctcaacacactcccaattcctccttctcggtggcaatggtgacgacaagggtcaaggctgtgctggtggccatgatgtacgatgatgatgacatctggaagtggcggtggcaagggccaagaggttgcgctggtggccatcactacaacaaaaaaccttatataaagacacttttgtagaggtgttttgcatattgcctctaagatcaggagttttatagtgtagagacactttaaaaattgtctagaaaacttttactctagagacactttagaaatatttttagcacattttattagattttatcttgtagacgcattctttcggcactttaaaatgtgcttaacatgtaaagacatttgcttgagacactttaaactatgtagagatacttcttagaataaaaatatatactaaatgactaaatatataagtaagttaaggcacaaacatacaatgaatgacatggggttgagttggttaatgccttgaagataagaatgatttgtttaacaggtcatgagttcaaggattggcaaaaacaagggaaactattttattctcatttttacattggtttcatatggttgtgatacaatttaatgtctctagaaaatgcctctaccatgttatagacattttataaaatgcatcttcgtttgtagagacaattcaccataaggcacttattgggcacttttaaaatgcctccacagtattgtaaaggaatttgaaaagtgtgtctatagtactcgaaaaatgtttctacaaagcatttttcttgtggtgcatggtgttcaacacacatgacatctttggtgcggtcccccagttgaggccaagatccaatttgggaaatggattaaatttatctgatgttacgtgtatatgcaatcaatgcaacatcgagttagcaatgcaaggaacaataatactataatcaataaatgacccatcgtaataattatatgattaagtgctaaacaacatacatgatgtccataatataaaatatactccctccgggctgataatacttgtagttttagataagggtgaggtcaaactttataatctttgattatgaatcattttcaaaatatttgtctttcaaatatggtgactacttgtatagattagtcttaaaaagtactttaataaaatcatatatttgttaacactttcatacatattataatggaaaataattgtcaaagttgctttttggagaccgtgtccttgtccaaaacgacaagtattatcaacctggagggagtagctacgcgagtgtgatatgagacgataaaagccttagactaaaaaaactatgttaattgatgaattagcccattggatgtaccaacttatgttatatacaatagatagagtggttgcatatgttgataatttcggattatttggcaaacgacctatcggataatccgaccaaaatgtcggataatccacatctgccggattttagagataccatatccgcatccgcatcatactatccgcatccacat

SEQ ID NO: 8716 - DNA, 7013 bp, Oryza sativa
tgggctctcgtgccccacaagcacacctcctcgctctctctctctatttctatctctctctatctctttctctctctctctccaccatgaccacgagctccggcaacccctccccttcgaccggaggaaacgcagcaccccggcgctgccacccttggtgttgcagccacctcctgttccccaggctccccttcgtcgagcccaaaacaagctagaaaaccgttctcgccagtgaccagtggtgatgccatcgccttcctcctccggcaacctttcccgactcaccgaagcattgtcccgctgcatcgtcgtcgccgtcaattacgcctcgtcgatctcttccttgagcatgcctccatatcaagttattgtgtgtattcaattcctatgagcaattcagattacctttttttttatcttgttcttacttgtttatttgatttgcttgcagtcataaggttgatttgcaccagcaagatcaacaacccacggagtggtgtatcgatcgctaaggcacaacacaatagcgtctcgtacggttgtagtaagttctcccaaattagagttatcatcaactccccgaaagatcaggccaatcatagccgtgagtgtattgagtgcagctcagggtttatcaagacctcaggaacaccatcccctcctttgagcacgtcgttcgatgaagttgcgtcgccctcaccgactcgaagaatgttcttatctctgcttttaccatggaccatctcggggaacccagtccttggtgaactacctgttttacccatgggtctcgacaatcagttgctcggtcctttctctcctcgagcgctgatgtattacacataatttaatagtacaataatgattaaataatttggaagtctccatttaaattatagctaaattttggatggtcgtatcttggccatacgaggtccaaattgacccgtttaaattgcttaattttttataacttaaagggcccaaaaatgttatttttatgtaatgtgatcatttctttcttagagttttagtcttgttttgttattggtgtagttgctatcattttagaggttcccatctcgcaatttaggtccatcgtttgtggcagcagaaaactgttcgttgactaaggtcagtcacgctctccttgagcatattgaaacataatttgcgaaatgtattttgacttaaattattacattcgctttattaaatttgttgtgttataactattttgttgtcgagagatcgtagccgatgccccaacttgaaataagaactcgtcgaaaagtaaaagaaaagggtggcgatacgctgaaagttgtattgattggattgtctcccctattacaatggtctggggtttatatttttaccccgagtacaaaacttgtccattatggacacgactcaagctttcctaaagataaaatacaaacaagtccataccatggactcttaccatatctctaactcaaaccgatataaatatcctaattaatagatacaattgccttaaatgagctctatctctaaacgacaatgacggtcatctcaatcgaggcccaaaccgagcccaagtcaggctagtcggctacttgtcaaatcggtaaatcagactccaactctatttccaaccgatgcaatgcccaaccgatgcgtaatccatatttggaaagatccaatcttctttgattccccttcaattccaactcgaaatccgagtctatcttgccaaatttcgctgttaacacctgttggtatttcttaacaatattcctagaaatatgaatgtgtagcaatgacgttagaaatggtcttggtatatatatggtttacagaaaggatccacaagcgcacggatataccattgtagcatttcgcccgaaagtattatataggtatcgtatttatttaatcccaaaggaagagtgtagtatatatatatatatatatatatatatatatatatatatatatatatacatgccacttacataatcaaagtctaagtaggggttaagatatttatttgggtagagtgacacgaagcaaagcactcatatatctcatttaatcatttctaaactaagcataagaagaaatagaaaaacaatcatttcctataattctaatatacactcaattttagtctacatctgttagtatacaaccatatagccaatacccctaatagtgcactcctggtgcttcgagagaccaccccggattgccgagtttcttacgacaacctgtcatggccgtccatccgggggctaaatacggaggaataccctccccaggaaagttttttaggatcgtactgagctgtcaccatcagcggcccacctcgactgactcgtagcatataaacacagataatgatacctaataatctagacaccatgtgtacattataaatactacactatatccctcaagatgacatagagcaactgaataatcagacattaaacccacacaactgcacctctctggtaggctaactatacgactgtaccgatacagacataaagtaaagacaatacttagataaactaaagtatcgagagcatatgaagaagaatatttcattaattccaaaagtcttacaaaagaaaggaagaatgctattacaaccttaccgaaattcctccgaagactccgagaactccgagatgctattctattctactccacttagcactagaatactaaactaaagtgtagaagagatatttgagcttgcttgagtgtgttgagagagtgaatgagctcctccttttatagggttgttatgacggttgtagcctatgcgaaatgaccaatatgcctgcaaccatcattggggagcgatcaagagcgtccaggtgtaaggccagccagagccagcgtcaccagggttcgcagcaggcctccaaacttccctatgtggttgacaggtgggtccctatggcggttgtgacagttatgacggtttccgggacggttacacacgacaaagtgggcccatcttatccataggcttgcttaggagtgaggttttctcattttctctttattttatttgctcaattcctacactcaaataaagtccaagtacaagtggaaatagattattctaaaacaaaatatgcattgcaagcatagctagttctcctttattttagaaaattgatggtcaaaattggtttataatgaccgtcaacaacaccgaccttcaagcctctgctgcaaagcgcattccgtacaaccacctatctaatgggtaaggcttaatgcatcgattagtataataataaacaaaaaagatacgtatagaggcggatgaggtcctagtatgggaagaagatttacatacttccaagagttccctaggggatgtgatccaaattacattggtctaaaacaaaagaaagaaacgacaagacaacaatcttcctctttggtctccagctccgacacctactcccccgctcgaaggaggcaactttaacggttgcctccacaacagctacgcgcacaatggcttcactcggggacctcatcctgcacaacttccaagaaaaaggttcatgtcgcgggcgtgctacgatgccaggatatactcgaccaccttgaggacgccacctcatgtacatgagcaggcagcccgacaagccgttcttatggcggtcagctccatgatgcggtggctgattgagccaatgtccatggtagaacaacgcatgtgccctaggtaggcttagtgaagtgccaaagcatgacgcgtcgttttgcatcaagtactgaatcgacatgtttttcacaaaccacccaataatcaaagaccacgtctaatcatggcaaaccttctggaagccataagcggtttgaaggagggagaaattaaagcagagccctgtcacgtcacctgggggccgcaggtggcccacaccatgctgtgttcccttgcttccgaaggaagccccatggcagacctcggctcggtgacgaggccagggggctactgtcgaagaatactcggggcacattaggacccatcatggctactatgtgccctccatggagtgccacatgactaccccgaactccaaaggtatgacgcccgtgtgtgttagcctggaggtagccctgaggtaggaaggatgccctaaagatagtgtcagctccgacgttctttgaccggtagttaatgggctaggaccccgaggtcatcctcggggctagaggcctatatcagctacgccacaacaattaaggaggtatgacctgaccatacacgctcccttactgtgtcattctgcattaatgacaaatggtgtggctgctgtggagaattgtgggccgtcgtggacgatagggcgtacctccctccacttgccaatgccacccctggataagtggtgacagtgtggcttcgtactatgctacatgtctcgcccgccggttaatgaccccctagccagcctcaaaggctaacaaatgggcccaacgatgtccaggacacctaccttgatcatcctacaccatgcgtcagaaggaggagaaggtgttcgcatcaacggggcccctcaagatgggccaatgcaagatcaagattaccagttgctgatgtagaatcacgccgcaaaccttgagcacgttatatgcagcccacggtggcactcagagacacgccactgtagggagtgatagatgccactgaacgaacaactgggagggaccccgttagggtgaacatacatcggtttgtcctaggcttggcaggccagctaggacgtcctctaacaccatagatacgagagatgacgagcaattggggacttgaggagaatagacttgggataggtagcaaggagggagatgtagaatatagagggtttggatactaaattgaatttgacgatgattggttgtttcttcagtcgatcttagcccccttatatttataggaggggtggactcttcttaaggtctttcacatgtctaattaggcttaaaaatcaactaggtctcgataaatcctagtctaaaaaaggaaacacgagaaatatctaaattagactcgaaccttgtgctgaagatctgaccgctcagacatacggtctgaccgaccacattaagcggtcagacaaaccttcaccggaaagctccgatatttttcaaatttggttatcaacgtcaactcctatacattgggtcgtgcttgtttgtccaggcattggggtatccccttactattataaaataaggactaatgccaccaaaaagatgggttcgggacctaggacaagaggagaccacctctgttagccactgggaaaaagaccttgaagaacacccttaaaccaagtgatctaagcaagaacacaagagtagagtattacactcccaagtagcttaaacctatctaaaatgctattccactacacctgagctcaacacctgcaccattgctgaatctcaaagggagcgtatcgtgccttcccgctagaagggctcatgctccgacaccgaccatctattggggaaaaaaattggtgtagcatggatgcaaagcattacctttgcaaccctaccacagatggttgacacatggacattataacgatccaacgactttatctgctcggtaccaagcggtgggacgaggatgcgcggttccttggctcggctcccaggcccatcgactctctccacaatccccttcctcacgtgttctcctatgccttcctcatcttccattggacctactgcagcggcatggcctccccttgtggtgtcaactcgaacaagaatcccacccgcaagaaggaagcctaggccatgttcatgtacaccaccggagcctacaacgttctccaatttcttgtcacggtttattttgatcatatcatgcgatgggaatgatcttgatccatggatcatcagtacttagtgacattgagaacatgatggtgtataactagtacaagcaggaaagaagggctcaaaggggacgcactgctagtggtggcaatcacaatacgggtgccgacaccacagcgcgcaccaagaagtacgccgtttgggacatgggcagtggccacttcagcatgttctcccatgaccaaggtggtcgcactcctacgatggtggtgccactggcgtcgcagatggatctttgtttttttctaccacagatcctcgttttctgctatgtccatcttccttgtgacgccgggtgcttcttctgctgcgttgtccacaaaggtttctcttttcatggtggttgtagtcaccagcgatgtagtcgctagcgatttggtcatgcctgaaggcgagtcgtcccgttccacatctgcacaatccccttttgggagccgggccaaggcatgccatgtgcagccttgttggatagtgccaaacaaggcaagctgttggattggtatattatccacgcgtcggacatccgaagtggggctgcaggcaatgtggtttgcacccggactgcaccaattttttttccgatccattgcactctctttgtctctatagactcctcccctttctcgctgccaccacacttcctctccgtgcttactggtgtgacacttccatgcactcttctcgtatctcctaatcattctcctaggctctccatccccacaccacacaccacagcattttgtccatatttcagcccctcttttctcggtctactctaccatatatatctcccagtagtcccccacatacaccagatgcaagcatagcaccaaaagtacaagaactcctagcatcagatgcctccagtccatatatagccctttggagagcaaaaagggagaacaacccagacaaaagagacagccatgtactgcccttggccttaacccccaccaccacagcccctcactgcctttcacctgcaaaaaccacttgcaaccctcacaaaaccaaaaaacgccagcagccagcttccctcccccctccaattttagcaacttctcccttaaaatctcccc

SEQ ID NO: 8717 - DNA, 39562 bp, Oryza sativa
ttccaccccctcctccgaacacagccttagatgagcacatgatagggtaattactaagaaggtaaaatggttatgaattaagactacgcaggtagttgggagactattgtaaaagactaatgacttttgttgccttctgatttttccttttcagaacagtttgcaaatggaagttagcattatagaacttggaagccatcttgattgtgtggacaaacataccaattccaaagccgtctttttaatctagtatatcatgatgccatggggttatttggcctagcttatttgcatatgtcagaaagaactagggaattgtgttggggggcacaaatagccattttattagttctcttcttttcattgtatagttggcctggcagattttagctgattggctgaaaatatgatcctattgcttcacgctcatgagaaataaagggaccaatttgttgatatgcactgcaaaagtcgatggtcgatgctattcctgacttggtgtagagaatcacggacctctatagtaaactaagtttttgttctaatcattgatcttagtgattctatacggtcaaataattcagtttatactaaccaagcctcattgaaatgcccaaagaattttgtcgccttcttactgacaactggaaggacttaattctgtcatcttgcggtaatattcaaattaaaatgatgaactaaacaaggaattataagaaatcatacatacatattaggagacagaaactttggcatgggaacactatgttcttaagaagtggtccagccttcagaagagctctgatatttcgagttttcaggtaatgcttctttcccactacacctgaacatcaacggtgtgttgtagctgcttcaatcttcagacttttgtatgaagtttcatggtaaacatgtatctagctttcgttccagctgtgcacctctaaagctgtactctgcaaaacatgcatctactcattatattactttgcattgattttcatcaagtgcatgtgctactttaaaatattttctgttaagtcaactgatacgtaaatatccgtgtgaaactataatactctagagtctagtgggaaatattttgtagttaatgtataggtatcagttccaaggggctattactaagttgtatgtattgtgatactctagtagcacctctaggtcctgggcccaactctctatagaagcgaatttcaggtctagttaaaaaaaatcacttgctagccctcgtaaaaaaatgtgttaagaatcgacctattaagggtgggccctcgtataggggacaagggctttaaagcaggattaaggaccgatccatacgacgtgagtccgcgtgttaggggccaggtttcgtggcttttcttagtcggtttggttgaggcttcttcttcttaatgtggggtggtcatgcctccactggtcgagtttttttaataccaagttatatatatgcttattagtaaccaaatctgtgggatgtttgactgtattacagtgaaatactggagaaatctgggagttagtattaatgaggacttgttgctgtggttttctgactatgagctaccacaagaaatgataaatagatatctattattgaatctggagatataatgtgatactaaagcataaatagtactgctgcactgcaccatgcaaggacaagtggtccagtataagaaaacaagattatggccaacagctgcatgaacctccatgtgcagcttcaaaataaccggctgcctttgaatattctactgcttcccctcaacagagtcaacattagccatattgttttggttgcaagttgcagcttgcaacactcatttctcctgagaaacccaaccttcttgcaggtagaggaacaaggagggagatggctggcctgatttcttcaggaatcatcaagtggacggcaagcaagctttcttcactggtttcggcatcacctggagcatcagcatccaatgagcagagttctgcactcagggatgtgaggacgctgcagaggacgatggcgaggatccagcgcacgcttgctaccaccgatgagcacagcatcagagatgcatctgagaggcttcacctgagggagcttcagcagtttgcctacgatgcccaagatgcaatcgatctgtacaagtttgagcttctgcggcgaaggatggatgatccaaacagtcatggagatggcggcagtagccgtaaacgcaagcacaagggggacaagaaggtaccaccagttcttcgatctcctgtgatttttcttttccttttccgtttgattcatcagaaaagttttgcagatttaccattttagtgaaatgcaagcatgtggatggttggtctaattactcatgttaccataggtagacaatattgattcttgaagtatattgacatattccattatctctaacataagaatcatcgataaaaccgttgctagtctgcagctgttgtcatgtcaactacagtgaaataaatgagctaggtaaaaacatgggattgaatgattgtaataatttaatgaagaaattatcaaataaaaaataaatttataaaaaatggttttataaatggttttataaataaaaggcactttctacaagcaacttactagaaaaatattattttctattttttttattcaagtattttatctccaggaacctgaaactgaaccggaggaagtttcaattcctgatgaattggctgttcgggtaagaaaaatcctagaaagatttaaggagatcacaaaggcatgggatgatctccgtctagatgatacagatacaacaatgcaagatgaggaacatagcatgctcccactgcctactaccccatatgttgacgagcccactatctttggtagagatgaagataaggaaaagataatcaaaatgctgctctctgtgggtggtgccaatgaaggagatgtgtcagttcttcccattattggaatgggtggagtaggaaagacagcacttgttcaactagtgtacaatgatcgaaggattctgaacagatttgacttgatgggctgggttcatgtctcagagaattttgatctcaaaagcataatgcgtaaaattatcatgtccttcacgaaaaaaccatgtcagatgacacaaatggatcagctccagtatatgctaatagaacaagttgttggcagaaagttcttgctggttcttgatgatgtgtggaatgagaggaaggatatttgggatgcattattatcagccatgtcacctgcacaatcaagcataatattggtaactacccgcaatacaagtgtgtcaacaatagtccagacaatgcacccctacaatgtgagttgcctaccttttgaggaatcctggcaactattcaagcagatggcctttttgcaccaagatgagagtatgaaaacagattttgaggttattggcagaaaaattgttcagaaatgtgctggcttgcctttagcagtgaaggcaattgccagtgcacttcgctttgaggaaaatgaggagaaatggaatgacatattggagagtgaacaatgggagttaccaacaacagaggatactgtgttaccggcgttaaaattaagctatgatcaaatgccaatccacttaaagcggtgctttgttttcttcgcattattccctaagaggcatgttttcttgaaggaaaatgtggtatatctgtggatatctttgggcttccttaaacggaccagccagacaaaccttgagactattgcaaggtgccttaatgacttgatgcagaggactatggttcagaaaatactatttgatggaggacatgattgcttcaccatgcatgaccttgtacatgatcttgccgcgtccatctcatatgaagatattttgagaatagacactcaacacatgaagtctatgaatgaagcatcaggaagccttaggtatttatctctggttgtgagttcttcagaccatgcgaatttggatttgcgtacattaccagtgtcaggaggtatcaggatatttcaagttgtaaattctatggatgacaatagaagatatttttcatccttcttcaaaaataacagaagatgcttctccaagttgttctcacatcacattaaccttacaattgataatgagctatggagcagttttcggcatttgagaactttagacttaagccgcagctcaatgacagcattgcctgattcaattagaggactgaagttgctcaggtatctaagtattttccaaacaagaatctccaagctcccagaatcaatttgtgacctccttaatttgaagatcttagatgcaagaacaaactttcttgaagagctaccacaaggcattcagaagctggtcaagctccagcatctcaatttagtcctttggtctcccctgtgcatgccaaaaggaattggaaatctgaccaaactacaaaccttgacaaggtatagtgttggaagtggcaattggcactgcaatattgctgaactacattacttagtgaatatccatggtgaattgaccattacaggattaggtagagtgaccaaagttgatgatgctcaaacagccaacctgattaataaagagcatgtgcaaactctaagattagattggtctgatggattctactctagtgaatgtgatcataattctagtcatatagatgtaaaagcaacaccagaattagcagaggaggtatttgagagcttaaagccaactagcaacttggaggagttagaggtagctgactattttgggtacaaatacccaagttggtttggaggttctgcctattcacaattggccaagataactttatggaagcaaggctgcaagttccttccaacacttggccagttacctcagttgcgtaaacttgtagttatacgcatggaggaagtagagagaatcgggcaggagtttcatggcgagaattccacaaatcgattcccagtattggaggaattggagtttgagaacatgccgaaatgggtggagtggactggagtttttgatggtgacttcccttcacttcgtgagctgaaaatcaaggacagcggtgaattgagaacccttccacatcaattatcatcctctttgaaaaaattggtcatcaagaaatgtgaaaagctgacaagactgccaactattcccaacctaacaatcttacttttgatgggcaatcttagcgaagaaatacacaatagtctggattttccaatgctccaaatattaaaagtgtgtttcacgcaaaaacttgtgtgccttgaacttgacaataagaacctaccaatcctggaggcactagctataagtggatgccgggggctattttctgtggtaggattgttcagccttgaatccctcaagcttctaaaaataaaagattgcccaaacctgcagtgccctttacaaccacttcaacagcagcttcagtaatgtattatcacgaactgtcctcaattacaggaatggattgagtggcaacagtctctaatagacaaggaagataaggtaagagctttttttttttatctgtgctttctttgtgccttttgttttttgttttcttcactgaaattgatgtattttatcctcagcagcaaccagaatttgataatgcaagttatgatcaagaggctcttggtgcactgagcgacaatagtgaggatgatgttgaagttttcaatgaagatgaagatgacgatttctatgatgaaatgctagaagttgggcagtcaagcgggacagcaattaatgacgatgatggaagtaacgatgctgtttgaagtatgagagcaatatttttgaacatcacgtgcaaatgattttgtttgcatgtcgttctccaacttcaacttgattaatccaatttgatgtgctacttcctattttttataaaaaaactacagtgcaaaatataccaatttcaggtcgaaaaaaatatgtgacatacattccattagctggatagctatggttttaatgtaggaaaaactgttatataagtgtcttacaaaatatttctgagctcccaatcttgataacaaatgaaaaaaaaactcatagaagtaggaaacatgaaccgtaagtagaagtatttaaaaaacatgtggtttgagctttctaattttatgacaaacttggctaccatcacggatttccagtgctgcctcaaatttccctttggttcagttgcatttctcggataaacaagttttcttgttagcgacaattgcatattttttattaataatttcatatttttgcaactaattgattgtcactatcactattcatgcatcatgtttatgcgtctgcaggactgcaattcgtccagttgtccatctatggtgacaaattgcaattgtctagagcaagacagggtagtaaaaaggtacagctatttcacgcgtaccccaagttgaatgtgtgtatgcaaccttggttgaatgatcgttagttatgaaccatacggcagctaagatccagatttagccgtttggttaaatatcgatccaattatatgcattgaggcagtaccagatacataaggcgttaatttctcaattatcaggaacgaagaaattggaggaaacaaattaaaggttaaagacatcaccatcaactttaacaaaaaaatcatctttgcataagcatctactacatccagcagcatgaacatatagtgtttaaggtatcggacatggaagatacttaaatactaagccaaacggttcatatttcaaaattcagctaacacctcaaacggtttcactaatcatgcagatcacacttcatgccagatgttcacttcttatacttctttggtgccctgcatcattacgaagttgcagacgataaaactttatgaaaacaagcatacatatttgcaaatggatggttcaatgctacttacgccgcagtttgagcaggcactgctggagcagctggctctcttgggccctgtttgtcatcataaaagtattaaaaacacatggccagcaaataatcaaatatgaacaagccaggcaaatatgctttaccatggaacatcttcaaaaaattaatcatgatttgacaagcttattgtaacatgaatgacgtcccagtgtcatttaacatgaatgagttgacagcattgctttactagcatttttttatttggtggaataagatatatttcaatattgaaatgcaaatgctaacacattagatattccaatgaaaaaaaaaaaactataaccatagaaatcgtctcacctgagccaacctctcgtcacgcctggcaatcttcctctcacgactggccttgctcttggcacgcttagcctcaaactggtcagagagtgtcttctctcttgccttctcagccttagacttgtggatactttccatgagaacacgcttgttcttgaacatgttacccttgaccttcatgtacatgtcatgatacatgtgcttgtcaatcttcttggcctcacgatacttgcgcagcaaacgcctgagcacacgcatcctcctcatccacaggatcttggtggggagcctagcctccctggtacccctacgcttacctgcaaaatggcagaataaggaatacgcagagacattttcacactaaaataacaatgaacttaattgtacacaacgcaccatagccagagtgacgtcccttctgcttggcctcatgggctctccgtgcacgggacctggagtgaatcttctggggcttcttgataatgaacccatccttgaccaacttacggatgttctgacctgcaagcacaaaggaaaaaaaatcagatagccttccaagaatttcaggcatgtgatatgagtcacagatatatacagggcaacaaacttcagtatctagaacagtaaataattaataggatattttattggttcttgcaggaaatgagttgtgacctattccaataggacattacacaaactcgcttgcagataagctacaccataattcatacgctcagacaggatcataccacagttgtacaaatggtgatgcagaatcaaaatgaaccaatgagctttagaagttggaattgcaattgcaaaactgacaaaaaactgatcctttaatggtaatcatcatttgggcatgaattgccagcatcctaactgatttaggtaacgaataactcaacgaagaagcacaaatgcacatgcatatctaaatgcgccaggcatccccttgtctctttgtatattaatcactatagaggacagttagtcacattcccagaacagcgccttggattagaacccctaacgacaaccttgatcaatcggtaacaacactgcatggtccaatctagatagcatacactccaaggtcaatatactggccatttctctaatgttctcttccaaacaaatacacccagcacaacaacctaacaactcctatagaactgggagcacgcgattcccacgaagcaataaaatattcctaccagaatcgccgggggcaaaaattttcgcgcggattagcagcatggcttcagatctaagcaaatcacgcatcaacaccacacaagtagcaggcacagaacatcatacggtagggcaaggggagggttatgggggggagggacgaggaggggagttctcacgggagttggccatggagatctcgttgacctcattggggtcgagccagaccttgcccttgccgcatttgagcacgctggaggcgagccgcttctgcagcttgagggaaaccatcgccgccgccgccgccggcttcttacctgtgtggagtgtgtggtgaggggggtgcaagggttggccgcgtgcggcgccgggggtttatatagtgagaggggctagggtttcagcccgagcggggagactcatgggccttgggcccatcagtgtgttggggtttgcagcgggaataagttcactttatgaccctcaaatgtccacgaccttaaattacaaaatcggatatctcgacccccaaactcctaaaaccggtgcatttgactccctggaccgttttgggaggcggttttgctgatgtggcgccgtgcggtgcctacgtggcaatattgaccgagttttcggtccacgtagcgttgacgtagcacctacgtggcggtagaattaaaaaatatgcatgggacccattagtcattcacacaaaaagaaacatgggcccactaacatatgggacctatatcctcaagaactcatgtcgacgatactgtggggacgagggctactagttcctaccgcacgatcggaactgtggcatgctaaataggcgcggctcttacccccagatgggccaagtttgacaagtactccctccttcaaaaaaaaaaaaagacaaaccctgggtttgcgtgtccaactttgactgtccgtcttatatgaaatttttttataattcgtatttttattgttgttagatgataaaacatgattaacactttgtgcgtgacttgtctttttaatttttttcataatttttttaaataagacggacgtcaaatattgggcacgaaaattagggtttgtctttttttgggacggatggagtagtactgctgactttgttagtttgtgctttaatattagcaaaaaagtgtggtctgtggtgtattgcatgggctgttcctaaacatgcatgcacctaattaatctaaatgtactgtgtgggtggatcatttatttgctggtctgatagtttgtttagttcaaaaatgtatctttttttcccttccgataacgtttcgatgcacctttttgattacgattgtcgacgggtgatacccgtagaccggatatagagggtattggggtacgctggtacaaggatctacgtagtacgacatcgagtaatcaaaagacaagaattatactggttcaggccccttgataggtaatagccctaatccagttgatatgggattatatggtggaaaacacaggttacaaaggaaagatggaacttgtcgaatccggcgagattgtagtcgagttgattcgactagctcttgacgacgtggcccctcgcaggctccggcttcgtaggctgtgtgggttgtgttggctctgagattcgatcctctatgccctccccaggggtcccttttatatcgcaggtctggtggtctccgagtaggactcgaacacaccagacccagacccagctcaatacgtaggtaacccagttcttatccgagaaggactcttcccgtctattgatttcgtgaaaggtttccttagatcataaaggaaatatccgcatacgcgtgggtatgccatgtcgatacgtaacgtatatcgaagggtagagggtatgcctgacccgtaaccctgacagtagctcccgacttctgctcaaaatgaactcgtgcgaccattcgcgacttcgggtgtcgagaacgttatcattccaggtacgagaaccacggagatgacgtgtagtcgaacatgccgtttgaagcccaacggtcacgagtgaattttgaacttaagtcaaaaactgccgcgcgtaatggacctagaaatttccggcggggatttctctcagttccttggaattcgcaccgtcgggggtgcgcctatttaaagggattttgggtgcgcattttgaagtccgcccactccatcaagcacacaccgcccgttagcgctcctcgccttctccactgccgtaaagaaccctagcttcgtcagctttaggtccatctctggcgatcttccagcagcgatggatctcggcaagtcggcttccaccagcgcgaccctgaagaagctccaggaggatggcgcccttcctggccgtgaaaacgcggagagggaagcaggaggtacaaatcctcagcccatcttaggtcgcatggttgtgatcgaagattatgttgtctgcgggtttctctcttcaccctccgaattccttctgctggttttgaatttctatgggctttctcttctgcacttgaaccccaattccattgctttccttagtgtctttgtgcatctttgcgaggcctacattggggtagagccctttcttgatctgttccgcttttattacgagttgcgctggatggaacccaatagggtgtctggttgcgtcgggttccgacttcgtgacgggatgaagtcgcgctatgtccccttccagtgtccctcttctcgtagtaaatggcggaacaggtggttttaccttgaaatcaaggattcaaatccgatcctcgttgttcccgaggaacaacaagattctggtctggaccgccaagccccccttgaccccctctctccaatcgtttatcgacatcatcgatgatctccgagaacggggcttatcgggatatgaagtcgttgcagacttcgtcgataggcgaatccagccgctccaggctcgggcccacccggcctataactattccgggccagatgacgcgacccgggtttctcctcggggtatctttctcgcattcattttgatatgcttgtactcgcgttccttttcgacttatcaaaaattgattccttcttgacaggtctgagcagcgaagccgtggagcggcgtgttggtcaggtgatgatcagcggcccgactacggcgagcgacatccccgcacccttttgtgaaaggggagtgacggagcacgacgaagcaatcaatgtgagttcattcgataagcgtccgccttctttgctcaaaatcagcttatgacatgatttagtgtaggcccttcctttgactgatgtcgtcggtccgctcgcggatcatcaggtggcggcatctctgaaagagaaggtcgtcaaggtggcgtctgacgctgccaccactagtggtggcaaagctccgactaaggcgaggaaattctcgtctgtgctcggacaccgccgcaaggcggcgactccctcagtaattttcaccttgtcgtcaggttatgtagcaaggaaggtttgttctcactctatgttggttgttttgtaggcttccgacgtgtctcctccgcctgcgcgacgtaagcgcattgtgacgatcggcgagaagtaagtaaagaaacttttagattctcgtgtcttctgtttgagtggaattttgattcatggcggtttatagggaggcgcgggcgaacgttgctcgggccaagtccgggggaacgtctagcgcgtcccctgtcacggcgtcaacagatgtcgtgcccgtggtcgggagtcgggaggcgacgccaagcggccccgtcagcgatcccgctgggggtcgtggtctgccagaggccgtcctcacctgggaggagctccaagtcgaaatggggcgccttctcgaagccggtgctcgcggcatcggccgcgagatctcagaggcgagggcggagacggcggcggccaacgcgcgtgccgagcgcttggtgcgggaactggctgaggcccgcgaggacctcacgaagatgagggagctggtggccggcaacgagcgccagcgcaaggggctcgaggaccgcatgtcggaactcggggataacctctccgagatccgtggttcgctgcgggtcacctacaccggtctccaccagcttgccgaggagtgcggcatcaagtccacgatcccggcgaaccccgacgagttctcgttgacctcttctcttgcggagctggcgacggcgatggggaaatcccctccaagcatacggccaggatcgcggaggagacgtccaacggcatctataccggggcgtgtcatgtcctcgcgtgtgtgaggttgtcgcgtcctgaactcgatatgcgcgagatcttggatcagggggcggcaagcgacacgcgtaagaaggtgatggaagaagtcgatgacctgggggagtctgtcctccccctttttgaagagtaggacttcttgtattttttgtgacttgtaaatcttgaactctggttgccttcgtgcgtgtgattatcatccttgttcaccgttgatctcggaagttttttcttgtcgactgtagagatgctgatgacgaggatgtccagcagcgcgggcagcccgagtcactggcgataattccggtattcgagtttgaaccacacgtcccacatgacgtcgaggaccaaactcttgatgcggaggtcgaagtgactacaactgcctcaagtgagtagccattctaccttcgagttctacctttgtgttgttttggggatttccagcttgtcttagtggtcgttatgtttagcagatctcaaggatgcccttgcgacccaagatcgtcgtatccaatactggaagacgaaatttgaagtggtggaactcgagagaatcatgctatccgtgaagaaagagcaagccgtggaaacgctccgaggccgcgaggtgtggtttgggtcatacttgaagaattgttgcacctcgatggctagggtatgcagggagcttcgagtagtccgcggcgatcctgaagaatcggcggccgggtacatctcgtggctcaacggggcctgtgcccaactcgatggcatcggcaagcgaatcgacgaagccttgaagcaagagtgtcatcttgcgagccgatatttcggaggacatgtgttagcttgcctgcgagatcaccgcccacgcctggatctcgaattcctccgtgaaggtttttcttgttctcggaggaatccggcggagatagaccaccttgcgaggtcgatgtcgccgttggccgagaagattttccagtcaatggactggcattggctttcttggtagtatttgtaccctgcgaccagatatcttaggggaagatgtaatgcagcgaaatatttatgtacaaactgtaagaaatattttgtgaataaagaaatctatctttaacaaatgtttcttactctggatgtcgtgtgtatgagtgtgttctcagttaatgactttagttagccgtttgagtcgtacactctccctagcccccagctttgtcgtcggaggaattttctcggaggacaaggctcttggacccttgacctgtcttggttgaataagctctgatcctagcacccagccgtgaagttggaaagctcggtttccgattacacgacttggttaatacgcacggcgagaactcttacacgaccagatcttacatggtctttcgtctctaaaggatctgacaaggccttatcggctctaggcgtccccagtcgaagatcccttaggttcctcggaggccttgtcaagacggcgtaaagggacataaggacaggtttcaacgctaggtgtcgtcagagtaagggatcattgggtgaaaacactttggtcgtgacatgtgacttagaaataggctttattgatactgtaagggtgcttacaggtacagtggtattgactcatacatagaatttacgtagttggtcaatgttccacgaatttgctagttcgcgatcgtcgccgtctgcgattttgaatgcgcctggccgcaagacttgtgtgatcgtgtagggtccttcccattttggtgagagtttgttttgccctgcttgggtttgaactcgtctgaggacatagtcgccgatcgaaagtatgcatgctcggatgcgcttctcgtgataacggcggagggcttgttgatagctagctgctcgaacggcaactcgctcacgatgctcctcgagaaggtttacatcgatgtctcgctgtttctcctggttctcgtcggaatgcttctgtactcgtgtactttgatgtcgtaactcgccggggaacatggcttcagagccgtacacgaggaagaagggtgtttccttattggatgttgtcagtgtggtgtgcatggcccatagtactgatgggagttcttcaacccattttttgtcgtgtgacatgagtctgtcgtagacgcgggtttttatcccttgtagtactatgccgtttgccctttcgacttgtccattgctttgagggtgagagaccgaggcgaaacatattttgactcccaagccgatgcagtaatcctggaaatcggcgctgatgaattgagggccgttgttagttatgatgcggtgcggtagtccgtatctgcataatatacctctgatgaacttgatggcgttatcggccttgatttccccagtgggtactgcttcgatccatttggtgaatttgtcgattgctacaaataggaatctgtagccgccctgtcctcgtgggaatggcccaagtatgtctagcccccagcacgagaacggccaagtcagagggattgtctggagtgcttgtgcaggtagctttgtgtgcttgctgtggaattgacaggcttcacatcgctggactatgtcgcatgcatctttaaggtcggttggccagaaaaacccttgtcgaaaggctttgccgaccaatgtccgaccggcggcgtgtgacccgcatatgccttcatgtatgtcgaggaggagttgtctgccgtcgtcggtggagacgcatttgagaagtatcccgtttggcgcttttttgtataaatcgttgccgaccatacagtagatctttgctttacgggttattttctcggcctctgtatcgtcctcgggcaactcctcgctgctgatgaatttgattaatgggatgcgccagtcatctgtggtttcaatgtcagcaacggcgcgttctgcctcggtgacctccaagctgatgtcgggggtactcgggccaacttcaccgctaacttcttttaccgatggctttgtcaggacgtcgagaaaggtgccgggttcgagcggttctcgtctggatgcacgtcgtgctaggtcgtctggctcgatgttgtccttgcgatagacgtgtcggacctcgatcccgtcgaacctcttctcgagcttcctgacttctgcgaggtacttggataactcggggttggtgcatttgtagtctttgtgcacctggtttgcgattagctcagagtcccctttgacgattagtcgcttggccccaagtgcggctgcagctcgtatcccggcaagtagtccttcgtattctgcagtgttattggttgccctgaagttaaggtggattgcgtgcttgaattgatctccggagagagatgtcaagataaatcctgcccttgctccttggctgttgagtgcgccatcgaacgccattgtccatgtctcattgtcaccttggttgtctgacttattatctggcatggtccaatcggccacgaagtcggcgagtatctgagatttgatggctgttcgcggcacaaagtggatatcaaattggcttagctcgactacccatttcgcgatgcggccgacaacgtctttgtttctcacaacttcgccaagggggaaggaggagacaactgtgactctgtgggcttgaaagtagtggcgtagcttccttgatgtcatgatgactgcgtagagcagtttttgaatatgtggatatcttgtctttgcgtcatggagagcttcgctgacgtaataaactggtcgctgtattttctctgtctcgacaacaatgacggtgctaacggaatatggcgtggcggtaatataaaggaataattcttcattaggttggggagcaacgagtacaggggggtttgataggtagcgcttgagtgcaataaatgcctcttcggcttcctgtgtccatacaaatttgtcttgtttcttcaataaggcgaagaaaggctgtcctcgttctcccatcctagcgacgaatctgcttaatgctgcgatgcatccggttagcttctgcacctccttgagtcatgtgggcggcttcatgttctcgattgctttgatcttctcgggattcgcctatattcctctgccagaaacaaggaatccgagtagcttgcccgacggtacttcgaacgtgcacttctctagattgagcatgaggcgatatcgtccgaggttgtcgaacgtttcccgcaggtcgtcaatcaatgagtcacttgtcttggttttgacaacgatgtcgtcgacgtaagcctcgacattgttgccaagctggttgctaagtgcgccctggaccgtacgctggaaagtattcccggtggttatcagtccgaaaggcatcttaacgtagcaaaataccccgaacggcgtgatgaacactgtcttctcttcgttctcttttgccatgctgatttggtggtagccagagtaagcgtcgaggaagcttagaagctcgcaaccggctgttgaatccaccaactgatctattcgagggagaggaaagtgatccttggggcatgccttgttgaggtctgtgaagtcgacacacattctccattttccgttggccttccgcaccataactgggttggctagccactctgggtgaagtacttctctaatgaagccagctttcaaaagtttgtcgagctcttcttgtatggcttgttttcggtctggtgcaaatctccgcagtctttgctttactagcttggcatcgggtcgcaccataagtttgtgctcaatcacctccctggggacccccggcatgtcgcacggctgccaagcgaacacgtcggcattatcgcggaggaatgtgatgaacgcgagttcctatttctcatctagtgtagtcccgattttgatagtcttgtcggggttagcactagagagcggaacgatcttgatggtgccgtctggctttggcgtcttatttggcttgctcactttcttaggtggctcagacgtggcgggtggggtgggcgtttgctcgaccatgtcgaggctccgcttgtcgcactgcaccgccagctttgcgttcccctaaatagtgattgttcccttcggtcccagcatcttgagcacttgatatgcgtagtgggatgtggccatgaacttcacaagtgcagttctcccgatgatggcgttataagctgtatcgaattcagcgacatcgaaggtgatcagggtgcagccccctgccacgtcgaacagacttcacgttccactttcttgtattctcgcttggaggagtacgttgtggaaccaccgaatatgtgtgagacgtggaggtcggagtctgggtacgcagaatccgattcgtgaggaggtgtctccttgttcttctcaacaacgcgtactcgcttgcctttttcaaacgccatgtgcttctcgagcgactttttgaaaacaaggcaatcctccagagaatgtctgtccgttttgtgtatggggcaccatgatttctttgtatcgctgccctgtcggtctgggcgcttgggagggttcgcgtattctgctgcgaggacttccgcttgagctttccttttcccgtttttgcgatttttcttcttgcttgactcagatgcgtctgcggatagtttcttctctcccccagtcttcggcttgtcgttcttgcgtcttagcgcgtcatccacatgggctcaccgctcaacgatctcgaataatcttcgagtagttgtgatgcgtcttgtcgccaactcctgggtagtgtagcgatctctgacaccagacttgaaggcgagaattacagaagcgtcggtaatctcgggaattgtgtttctgcactcgttgaagtgccgaacgtattccctcaatgattcccccgagttctgtgttaacgcatgtaagtcgtcttagatcgcgtggcgcttgtatgttccttggaaattggcgacgaactgttgccacaggtctgcccacgaggagattgagtagggaggaagatgcatcagccatgaacgcgcagaaccctttaacgcggatggtaaatagttcgccaacgcgttgtcatctgctccggcagcataaagcactgtcgagtagacttgaaggaattcttctgggtcggtgctcccatcataattttcaatggctctgggtcggaatctctcaggccatcggacatcacatagggaacgaccgaaagccctacacccagcactgggggcggtggtttgtcggcggtcgcgtgaccttcgtggatgtctgtccaacgatgaagaggacgcggatgatgacgatgacgatgggtcgcttggttctggcgtacgattacgaggatgacgacctggatcccgggcatcctgtcgttgtctctcgctgttgtctcggcgccgatcgccttcgtcgtcgtcgttgcggcgacggccatgaccagtattgtctggcccccgccgttcgcgatcgttgtagtctcggtcctcgtttgggcgatttcctcgatcatggcgtcgtgaagagacatgacgccgggagcgatttgcgtcgtcccatgtgcgtcgtgcttctcggcgatcattgatttgatctcgaagatctccaatgccacgaggtggaggggtagcctgtcgaggtaattccctccgctccggatctttaccattggtgtcgccgatcggtggctgatcttggtgtgctgcggtagcggcttcttcgaacgcattgctgaggttggtcaccgactcccgtaatcgttccgtccaacgctcgaggtcgtcgttcagaacgggatcgtaaggagtttccctctgtatggcttgaacaaccctgatgtgctgggctggagtagtcgattgatttgccgcctctgcattggcttgtgctgacgtgccaacgtcatcgatagccaatacctcccgcgacgcacttgttgtcgatgacccacagtcttcgaggagatgtaagaccgatggttcgtgggggtcgagatcgattaccccaacgaatcgatctgaggctggagtcgctccttgttccttgccgttatccctaacggggacgtatgacttaggagacggagttttcacggcgccgaggagaactttgcagctcgagaggtcgtgattctttgtcttgtggataggacaatagacatcccgagttagagaagtacgctgaattccgcgttctttgcaggcgcgaatttcagcacggacattgatgaatacctagcaatcttgaagggtatgtttcttggttttgtggataggacacaaagaccagataacttcggaagtcatctttgttggcccgtggtttatgtcggagggacaagacttggccgcatcagaatccttcacgagtttggatgtagtcgataatccgttctctgtttcaacgggtggatttttcgacatggagccgtcctggttcatagccactgcgttctcgtttccagtcattggaggaccggttgagatcggcatcgtggtgtaaaccgggaagacgatttcgccgacttgagtccataccagcattattgaagctgagagtgcttgactggagctggtgttgacgttgttgtcgacgaagcttgatggcatagtagtagaaccttgagtaccaagtgcccctacctggcgcgccactgtacgtagactggatatagagggtattggggtacgctggtacaaggatctacgtagtacgacatcaagtaatcaaaagacaagaattatactggttcaggccccttgacaggtaatagccctaatccatttgatatgggattatatggtggaaaacacaggttacaaaggaaagatggaacttgtcgaatccggcgagattaaagtcgagttgattcgactagctcttgacgacgtggcccctcgcaggctccggcttcgtaggctgtgtgggttgtgttggctctgagattcgatcctctatgccctccccggggggtcccttttatatcgcaggtctggtggtctccgagtaggactcgaacacaccagacccagctcaatacgtaggtaacccagttcttatccgagaaggactcttcccgtctattgatttcgtgaaaggtttccttagatcataaaggaaatatccgcgtacgcgtgggtatgccatgttgatacgtaacgtatatcgaagggtagagggtatgcctgacccgtaaccctgacaacgattgagatttagtcatcgacgagtgagagccgcattgtcacaccctgaagttctcctcccaaacctaaattgaatttataaatggtcccaagaaaatatcggtgtaaaagcaagagtaaaccctaataaaccaatgcaaataataatcggaattggcatgtggaatttttcttgagttctacatgtcgaaatttactaacaagatttttagtggaattttcagagccctagaaataattttaaccaattaaaattgagcacatgcaatttttaatcccaggaaaaaccctttcttccttttctttttcttttccctcctttttcctcttcttgggccgtcggcccagtccaccccaccgccgcgcgcgcccttttccttcttgggccggcccatgcgcccctccctcctctctctaggacgccgacaggtgggccccacctgtcggggtcatccccttcctccggccgcccgccccacgacggcaacagccgccgaaaccgccgcgcccaccccctccgctcctcccgcgccctctccgccccactccgcgcgctgcgcccatgtcaccgcctctccctgcgtctcccgccctcgcgcgccccaaaaatgggcgggattcgacttcgaatcccgccactctctctctctctccccacctccaacttcccccactaactcctgcgaaatcgagccactcccggctgttcccgacctctccgcccctatataattcgtccccgcgtcctcctccacattttccttttttccaccggcctctcccgtgctccccatcgctcccacaccgcgctcccacccgccgtcgcctttttcgttgctccggccgcctctagccgccgttagggtcgccaccgcaccgcgccgtcgccgccgtcgggttcgcgaggccgagctccacctcgtccacccctcctccgccgagttccgccatcggaggccgcttcggtcgtgcgccagtgagtctctccataaccgccgccatcggccacggtttccgctcgccgtggactccctctctccctctaatctctctatttccctctcttagggtgtctcggaggtcatcgccgttcaccgtcgttccccggtcgtcgccatcgccgttcgccgtcgtccttccccgcaccggccaactcacggtgaggcatccctcctcctcttttcccctccctctccctcctagccgagccgggtcgagccgccgcttcggccatgcgccgccgccttcgcgccgccgtcttccgccgccggttgccgtcgccagcgacgcgcgcgccgccgcccttgccatggcaggccggccggcttgatgccgggccaggccggcgtctcgcccccccttggagccgcgcccgtggggcctgcttgttagccgcaccccctcccgccttgtgtctctgccagtggggcccacgtgccggcgccccttcctctctctcccgagccgctgacccatggggcccgcatgtcggcgccgcccgcttcccgtgatgacgtcagccctgggatgctttattgcgcaataattcattaaggacttttcttttctagtaaaaacacagagaatcttcttaaaatcataactaattcatccgagctccgtttaagtccattcaagtctcagtaaatcaagaaaaatgtgtagaatccattaaaaatggttttgttctttgtttcagtagtcttatagcctgtttgtattgtttgccttgtatgtcgcttagattccggctctcctgacgctccggtgtactttgagatagtcgccgaggttcctccagcagcagagcaaggcaagtcatgcttgtcacttgaacatgttgatcctatattgcaaatgttctaatgttttccatcaaatactgcattgttttacagtaatactatgagatgtttacctactgttacagccatgctattttggtaccatgctcctttgttagcttgggatataacatgactagatattggactagggattgcttagccatgcttagttcaactagcacacaatggggaaaatcctattaatgtatagactgtaggttctaatggtaatgttggattaatgccaccgcttcggtgtgggtcaattaaaataaatcacatggtgggctgtgggtgcatggttttgttggttgtcacgccctaaaaatcaactaaattaaaaatacattgtttaaatcatttttagaaattattttaaaagcctacaagctaaaccctaattatctaggaaaattttcaacataaaattgagctagataaaattttattaaatactttgcttgttcctctattttctagaattttctgggaattgtttgagcaagggaagtatttttaataaatgaaacaacatttcacaaattatttttaagtaaaaagttccaaaactcctccctgaagccgttgggccattttggcccaacatccctcccacatcccgtggccgagccggcccatccggcccaacccgccaccaccgcccctccctcgcgtggaggccgacaggtggggcccacctgtcggtggtgtctcctacctccggccggctgcaagccgagcccgagccggccgagccgccgccttctgcctccgtttccgccccgatctctccacccctagtccggatttttgaggggtttttatccccacatcttcctctatctttcccctcaagaatcggagcaaatggttgagtatcttgcccgaatcgaactcgttttcgagtttatctccaaaaccgagtttttgattttcccgagtcgatttcttgcgggaggagtccgatctcttcaatccaaggctataaataggaccccctagtcctcctctttcgtttgccccaactcccgtcctttcccgtgctccgtagctccgtcgccactgccgcctagcaagccacccgccgccggccggactccggttgcgccgccgcgccgcctccgccgtcgccgtcgcttgccgtcgccgccgctggtttcgccaagaggtggggaagctcggccgcctcctccccttcgccgccggccgccgtagcctcgtcgccgccagtcaacccgagccgccgccgccgccttctcgacgccggctatcgtcggtggtcgttcggtgtgttggtaagtaccgtcgcgttcgtctcgtcgttctctacgtgtagatgccctccaaagttccggccgaccgccctagctccggcgaggtcgtcaattcgggccggccaccattgatgacgtcatcgtgacatcatcatcttttctttttcccgtttttctaatagattaaaacttcagaaaatcataactaaataaccgtagatccgtttcaggtagttcaagttgctaaatttttctaaaatcaagatctacatgttaaaaatatccacatgtactgtgtatgcttgtttttgtactgttttgttaatttttgtttaattgctttagtttccgacgttccggaggagagcgtttccgttgaggaaggttccgaagcgtttgcggaagcccaaggcaagtcacacagatcccaaacaaccctttgaacatgttgaacccatttaaagctattattttatttcagctatgcattgttttcgaatgtcatcgggtggtaaacctttcccaattaattaatggccgaagatgatcttattttcctataggttataatttgattagcatgaaccttatatgttggattggttcagctaaatgctatatgcaagtttgcttagccatgcttagaaacgttagctaactaaagggattaattataaactatgttacattattattttaattatggttacattaaatggtagctcacgatggttaatcgtgtgatgttaattaattgatgattaaaacctggttaaggtgggttgtgagcatatggttttgatggttgtgctcatgacaattaaggaccggttcgcgagctactgttgtaaaacttttaccgtgccaaccacaagccagcgtgggcaacggctttatcttttgtatagcatgattcattatagtgcgccagactgtgaagcggcgagaagtccgtgggggtcgctggggagtccattgcctctggttttgagggggagattatgatccaggaacggtgcactgtggtgagttgtgttgtgcaaggggtattgtcacagttcttttccgaggtatcgtggtggtactaaggcgcatggtaacatgttgtgggattgtgtcttgtgggtacagtggtacacctctgatcagagtttaatctattcgaatagccgtacccgcggttatgggtgagttgagcaatgtttttcgtgattagtcgcactactcattaatggtaataatgtggtaattaatttgactcctggtttggaatggataattcctggtttggaggtttaatttgttcaactggggttggttgttcaaatgtggttgggcctatgcaacatgggtgtgttgtatggtgtttatttaatattgattcattatacaactgttttactattctcttaaatatttgttaaatgctgttatgcaaatgagctatattatgccatcctttgttatcctatgcacttgcatatttgctgtgtggcttgttgagtatgtcatatgctcattcttgcaatattcaatcatcagaagaggagtatttcagcgaaggtgatgatctgaaggattgagcttgttctggttaagatgcctgtggagtggagtcgccatagctgttccgtagtttgttatagttttatttttccgctgcgtagaatgttattctttgagaggaactatctacctctgtaataatttattatttgcgaatattaaatagttatttatttgtactctattatcaatttgttattgtgtgcctcggttgattcctggacgagggtttaacacacatgtaagcgtttggaattttggatagaaattccgggcgtgacattggtcgcgcccatggcagttaaggaccggttcgcaggatgccctggaagaacttatcgtacttaccacaagccaacgtgggcaacggctgggcttatagtgtagctttcctctagttgacgcatccaggcaagggtgggcgtgatggagcggggcgggccctgcgacggcctctgtcgcttccggattcacctaggcacgagaggggactgcccgttgcccgctggggacgggggtgaaacttgaggtgtggtgtgcttagctagagggggttatgcgaagggtcctgtcacagtctctttctggtatgtcgtggtggcatgtcggcgcacagaaacgtgttgtggggctgtgtcttgtgggtacagttgtacacctctgatcagagtaaaactattcgaatagccgtgcccgcggttatgggcggtcaaccagattcaccgtgattagtctcaccctagtttagtctaatggaattagatagtataggtggatggttgggcctgtggcaacgtggtatagcgttggacagtggatgattaatattgattaattgttacaactgttttactgttctcaacttctgtttataaatgcccgttttacgcaaataaaccagtatagctatcccttgataattccctgcatcatacccctattccggtatgacttgctgagtacagtgggtagtactcagtcttgctctatttttccccaaaccctagagtatgagtatgcgtcagatggtggtttctccgaggagtaggcttcgtccgtgccgtcgaggatgcctgtggggtggtgttcccgctgcagatctagtcaaggcttagccccttttatcttttgtttttccgctgcatttatgtaagacttttataatgtttgtaagacgtggatctgtatgtcaactttgtcgcttgtgtaccccagccagtcctggacggggattttaatgcacattctgcttggaattctattcgggaatttctgggcgtgacacgcatgggagaggtgtgtgcaaagctagggccacctatcggcacggaaaagaagcgtcgtaggggcgtgggatcggatggtgactttgcctgtccaagtagacatttaccaccttttagttgtagtgaccttttagttgcagtgacagagattttgactgttgcgcctcgtgagccatgtgggccacacccatcacccacccgcacgcactcgatcgattaaccacccaaacaacgccaatgcaagcagctcgttcccaagttgccacaacacaccatgcatcttcgagttcgactcgcgggcgcacttgtggagattatgggtaccccatacccacacggcacggttatccgactagttataggggataacttatatatatgaaatatgtaacagatcatgacttgggtattacgtttccttgtatattacggaacggcctaaagtcctggtttgataagattgtaaagtagatttaggaaaccgataccgtattggataaggtttctatcttgtaatcatgtcccccatcctatataaggtgggcaggaggccctctagggggcatgagacaattagatcgtcagatctatactacactcggcggattcaaatccccaaacaggagtagggtattacctctcattgagagggcctgaacctgtctaaatccttgtctctgcatccatatacttttaggtttcgtgcgctaccccgttttattattgccgaattcatgttttgacagctggcgcgccaggcaggggatgcgtcgagtttcccgtcgacgagtgcgatggaatcaattcaagcattgagattaatctcaacgagttcgacgactccaaatgttaatcggtttgtcgtttcaatatattgttatcagattgatctataatcacaattgattttctgttgtttttcctctctggttacatgtgccgccgcgctgtgaattcttctgatcactgcgggttgaaaaaaacataagccatggggaaaacggccggagttacgcggggtcatcagatcggttctgtccatgcaagcacgggatcaatcaactgaattaatatgaatggcttttgcacctatctatgcaaatatgcatctacgttacatgcatatacagtataagaaacatatatttctgtgtactttgccattgctaatcagattgatttgtctggttgcatgtgttatcggagctgtcatcggattcttctgagttatggccacgcgtgaacgcggctatgccacctcgtcacccgagttcgtttcccatcatctgaaccctccggctagaatttaatccagactcgggtcaatgatttacacacgcatggcagcagcatggatcggtccaatgacatgcacgcatccgggaagaccaatcttggcgagttcaacgatttaatctcgacttcgccgggttttttcctttcaacttattgttgtttattagattgatctctaaatatcagattaatctcttggtattttctgatgtttacatgtaataccgcggcactactgttgccgactggtgccttcgtcctcatggctggcctgctatgccgctgctgacgggcgtattgatcttcaccgaccggtagcctccgtcgccgccgactggtgtcctcgcctatatggttggttggtcacaccaccgttcatgggcgtccacatcttcaccgaccggctggccttcgccgccgccgactggtgtttccgcctgcacggctggcctattatgccgccgttgttgggcgtctacgacttcaccgccggcctgcctccgtcgccgccgactggtgccctcgcctatacggttggttggtcataccaccgttcatgggcgtccacgtcttcaccggccggttggccttcgccgccgccgacaggtgtctccgcctacacggctggcctattatgccgccgttggtggacatcttcgctttcaccatcgaccgccttcgttgccgccgactggtgtcttcattgttattgatggacgacttttttcccacattggccacctctgccatcaccaaggggaatattacaaagctaagtcatcattgttttattccttatatgatattttccttttcctctgcctcactacttcaactggttcgctgttgactagtgagtcggaggctacagatgttatatcatatttttcaacatttttcataatatttatcctgattggttgcaaaatactccgagttcaaataaagtgcctatcgagttatggagttctatcttcctatgccttccatttggtttgtcgatggatagttgcctttgggccgattcctagcacccgggggctcgttggatggaccaagtaacgcaaggtgctaaatattattcggaataaatcaaaagcatagagataagataaatctattttctgctctctacaattgcaaaagtacccgagtagtaaattctgattcgtgaaactttgttccattaatgacgaactcatgtcactcatatgcatgtttgggaagtgcctaggccgactcccgatgctcgggggctatgactagtcggacagagtgtttaaacgtacggagtcatctgctcggggaaatcaaaattgagtagaggagaaatacatatttataaatattttaaaatacttgaatttttctcgagtattatatttatatcagatactactcatcctatatgtttgttttacaggatccagatccagatatgcataaaagggattcatggctttaagcttatctcttacgcttcaggaatgggatcagtcagaacatcaccaccggcttgctttcgccgccgccgactggtgtcaccgcctgcacggctggcctattatgccgctgttgttgggtgtctacgtcttcactgaccggcttgccctcgtccgccgccgactggtgtttccgcctgcacggctggcctattatgccgccgttgctgggcgtctacgtcttcaccgaccggccgcctcatccgccgccgactggtatctccgcctgcacggctggcctattatgccaccgttgttgggcgtctacgtcttcaccgaccggccgcttcgtctgcagccgactggagtttccgcttgcacggccggcctattatgccgctgttgttgggcatcatcgacttcaccgaccggccgcctcgtccatcgccgactggtgttttcgcctatacggttggttggtcacaccaccgttgttgggcatctacgtcttcatcgaccggccgcctcgtccgccgccgactgatgtttccgcctgcacggctgacttattatgccgccgttgttgggcgtctacgtcttcaccgacaggccgcctcgtccgccgccgactggtgtttccgcctgcactgttggcttattatgcctccgttgttgggcgtctacgtcttcaccgacaggccgcctcgtccgccgccgactggtgtttccgcctgcacggctggcctattatgccgtcgttgttgggcatctacgtcttcactgaccggtcgcttcatatgacgccaactgatgctatcttcttcacggctggctacgtcgtcgtcaccgctaataggcaccgtcatcttcaacgcaagctgtctacgcctgctgccaactggtttattcacttccatggctggatgattctgcccctggttattggccttatcgtcttcaccaccggtcgtctcgtctgctgttgactggtgtcctcgcctctacggctggtttatgccgctatcactactgatggacgtcattgtttttattgctggtcgccttgtctgccgccgactggtttgttcgcctccacggctacgcgtcttcgctaccggtttgcttctgttgccgccgactcgtgttcacttcatcacggctgtgcaactttgtcaccatggtggagctacttcatcttcattattttcggcaccggcaaactctatagcctctacttcgcatgatttgccacttcaccaaccacgacgtctacaatagcctcgacatctcggcatgtgtcacaaaatatgatgccgtgttattttactacaacaagtgatgttccaatcttcaatatttatcttcactcaagcaatgattacacgacgacaagaagctacagttctcgactctatgttcagttgtttcccaactaactaaagagtcgggggctacacaaatacaagactctcaaaattcgacaagctgaagcaatcaattaatcagccaactagtcaactccaggagtcattatcttcatctttgctttagagcagagttatcaaccaatcagctcagtttcgatgagatggacaacatcatctactttcctccaagtgaagcatctacaacagctataacaccaatttgatggattattgtcactgacttcatcaccagcacctctacttcattggccctgacatctctgccgttgctaatggatgactacgtcttcgccaccggttgcttccgtcattgccggcttgttatttcgccttcacggttgacctactatgcaaacgctgatgagcgtcttcatcattatcattggttgctacactgctattgactggatcaccgacatcgtcatcttcatcatgttggttgcgtttgtcgtcgccgactatttccttcatcttcatgattggtggatttcgtcattgcctttgatgcgtgtctacatcttcaccgttggcttgctttcgtaaccatcgattggtatcctcgccttcacgaatggcttattatgtcgccactaatgggcatcttcatcttcttcaccagctgcctcgtctgtcatcgactgattatttcgctgccatggctacacaactttatcgctgggcgccttcatattcattgctggctgacctgactgctaccgactggtttcttcgcctccacggctatgcaacttcatcacttttgattggtatcattatcttcactaccaccaatatttttgccacctctggtaggcaatattatctctatattggtcgtcttgtctctatgccaactgcgtcagctacgatcaatggacaactgtgattacgacagaaggacaagctatatgctcaggggcttagctcaaacacaagtatcataccttcaatttggacttgctctggatacatgcaacatgaattcataaacatgggtctattttctatgctcaaagactggactatttattattccctataagggttatcaaccgaatacttgtgtcagtcgggattcaattattatatctatttcggagtatcccataagggataatcactcagatcagaagctattcatatgagctatacttggtctatatcacccggaagatttattactcgggagcatgttacatgcgtcatcctttaaagggtgtcgaaggcatattttttggcctaggcctaatatgtctgcagcccatattttcaggtgtggcctgtcacgttcttttagggacttaggcatctttttgcttaggcaaaagtgcgcgtgattatgtgcccaataccttaaaatccttttatatcgcagttactcaactttttaggagttggtacattgcattttaaaaggtgccaaacagtaatgctttatatagctgcccgctgacttttttatataaatcaaggcgttgtttgggttcataaagcaattgattggatacaatatcattgctttttgccacgtaagtgtgcacttttattgaccaatattatggcttaggctgattatatattttggtcattttccaggcggttggtaaatcctttatgagtttatttactcgaattttacaccacatatgccgtatatttttgggtgtagtgaaaccatgtgtcttttagggacttaagcacatctgttaaagcagtgtgcgcatggcgtatgtccaatactttggaaatttctttactcacagcattcgagcttttttatagttgttttgctatgtgaattttcaatgatgtagtcagctttaggttgcatgcatcaatttttacaaagcagtcggtatatcacttggatcatgttgctatatattaatattaagtcacttggttgactacaattatcaaaaccacttggttggttggattatttattccttgactatatgcttggtttgttcaattaaccacatgatcgggggctaaaccaattaggtgcatctagtcgatgcacctgactttatttttcagccatccacagtcttctgatttagtaaaagtactcggaggtcatggcgaagatgattgaagcactcggctttggagtaatctagttcgagagaagattatcttttcgactgtgaaggtctcaggggctactgtggagattatgggtaccccatacccacacggcatggttatccaactagttataagggataacttatatatatgaaatctgtaacagatcatgacttgggtattacgttttcttgtatattacggaacggcctaaagtcctggtttgataagattgtaaagtagatttaggaaaccgataccgtattggataaggtttctatcttgtaatcctaccccccatcctatataaggtgggcaggaggccttctagggggtatgagacaattagatcgtcagatctatactacactcggcggattcaaatccacaaagaggagtagggtattacctctcattgagagggcctgaacctgtctaaatccttgtctccgcatccatccacttttaggtctcgtgcgctaccccgttttattattgccgaattcatgtttcgacagcactgctggttggctacttgcctacctggctcgctcgctctctgcaccttctatgaaaggaggcaagcaacacagtccggccgccctatcacttggccacaatgtagcacgcaagatcgtcgagaagctccgccgttagtagcattcaacgagatgatgcaccgcgttgcctctcttctttgagttgcaagccaagctccaggtctcaacatcttcgccgaagccaccgacgaagcactcagtcgcgacatgtgtcacatgatgacgaagcagagcaacctcgcgttttggcccgtgaaaaggcacgatggcaacgggaccctaccgctccctgtctccatcaattggcgcaacaagacctgcgaaggccagccgtgccttggtccagtcatgttcatgggggtgctacggctcttgctgggcgttcgccatgacgggcgcgctggagagccaccgcgtcatcgcatgcaggggcaaactacgacaacccggtgctcctgtcagagcaggagctcgtggattgccatccaaggagcaaaggctgcgcagggggcctcgccttgaacgctttccagtacgtcatgaaaaatggtctggcgttgtcaaccttctacccttacatgggagtggacgatggtacatgccacgccagcaccacaccccgcgtgaacatgatcatgcgaaggttccaggagctaccacgccacgacaatgctgagaccatcaacaatacgctattagcctatcggccaattggctatcagtcaattgattctgcttttattctttattgctgattgcaggatcaaatcagttggcacgcccttgagacacttgaggctagccttggacctacactagagttaagcagatctcccaggctgccgtattttcacatcaacagtgggtacaatgtttttcaccgaaacgaattagttcaaaaagcaccgtaacatgagacttggacatattggaatggattgagagcgtttgtttcaaaaaaaatctctcggtgactcgttgggtgagcttttttcatttagtgtcgatatcgggtcatgcgggtgtgatgtttttcaccgggacgaaatagttcaaaaaaagcactgacacctagacaaaacatgggtattttgatagttttattaaatgttgcatcatttgcacgcactcaatgtttgtgtacaaacttgtccatatgtggttgcaaattgctattgtctggagtaagatgctggggattagggtatgattaaaacaagaactactcgtgtaaccgcagttgaagttgggaggcaattcttagggatctgaattgatttttatatcctggttagcttgattgaaccaaatgctacttagaaaataaatagggaaaaattagaaccatgccattataattttgtaaaatttgatatgtttgttagctcaacgtcaaacatttttatagccttgcatatttattgccgctttctgatgttgtgatgtcaaagaagtttgtccttgtctatacataaatttgtttttgggataatgtgtggctgaagtggcggtctgccctatggaagatagtcctcctgatcagtgaaagaaaaaaaaatcataagagttaactaaagatacttattattactctattatttttttgcataagtatactttgatcctatctatgtccatgggcacgtggtccagtccgaccatgcgaacacactgtaacagtctcgtatccttgatagaaggaacaaaatctgaaactggttttgatgttttatgctcaccttgttagaggaatgctgtttccctaaattttgcctcttcggttactatcagttcattggtttttctcctgtgcaaaattgtacgagttggaagcaatgtttaacatgaaatgccacatatctaaattttatttttaaactagtaacagggaaggagaaaagtaggatagacctgccctcatatttagcaaaatgtgcagctgctagtgtacgtttgcaaaactgaacacttacagtgaaaatagttttggagtatataccaggtagatgaagggacaacaatttctctttataaaacaaactacaattggactagagatttttttttctggtttaactataagattccttgcgcggtgttctaattaagtgattctatagattgaactatgctgttctcaacagggcttggcaatataaagcaattcatggttctacagagcatatgaaccacagaaaatggttctatagtggccctttacagactagattagggacacagaaaatgcatgtcaccatacaagaatagttctgagcattacattgatattctgaaatgatgtgtccacgcagacaatgcatttccccgcaaaaaaaaaaagagcagataatgcatttcagctagtggtactgtgtgcgcagttatgcagttttgacactataataacaggaattggttgaaaaccaatatatgcctcttgttgtaaggaggttggaaacataataacaggaattggttgaaaaccaatatatgcctcttgttgtaaggaggttggaaaccacagcttgtgcattaaaaattgcattgcacttgtccacaaggtcaacaccctgaacttctatatgttcctcttgccttgttaatctgattcatctctcagcttggtctaactctgtctttggatcagaaagagcagttgagaagagatggctggactactagcatctggaatcataaagtggacaacaaacaagctttcttccttggtttctcctcaaatcgtttcatcatcatctgacgagcaaagtgcttcgttcagagatctaagagatctgcagaggacgatggcaaggattcagcggaccctcgatgcgatggatgaacacaatataagagatgaagccgagagacttcgcctgtgggagctgcagcagcttgcatatgatgcccaggatgctgtcgatgaatacaggtatgagttgcttcgacggaggatggaggaccaaagcaatcaaaggcagagcagcagaagtcgcaagcgcaagcgcaaaggtgacaagaaggtaatattatccccttatcctagctataaccaatgctacatttggtttatcagaaaaaatagtctgtgtttcttctttgatgaaataaagcttccaaattgcagaggcctcctctcaaagtttcttgtataaaaagataagctcccaagcaatttgtttctctcaataatacatgagcaatctgcatatcatgcataagcaaccattgacatagccatataaaagtattgggatagtagaggagcaaaaaggggtccataaaggagcatgtacatatgtgtgttttatttaactcttgttagtacacagtatactacatgcctttggattataataatattagtgcatgtacaggaacctgaaccatcccctatcaaagttcctgttccagatgatttggcagcaagggtgaggaaaattttagaaaaattcaatgagatcacaaaggcatgggatgatctccaactcaatgagagtgacgcaccaataagagaggaggcctatgacatcaagatatctacaaccccgcatgtaggtgattttgacatagttggtagagaagaagacaaggaaaacatcatcgaaatattaatttccgatgaagctgctcaagcaaatatgtctgttgtttctattgttggcatggggggtttgggtaagacaactcttgctcaaatggtgtacaatgatgaaagagtcagcaggtactttcaactaaagggctgggtggatgtttctgagggtcattttgatgttaaggcaattgcaagaaaaattatcatgtcgttcactaggaatccatgtgatatagaagatatgggtaatctccaaaatatgataacggcgcaagtacaagacatgaagttctttctagttcttgacaatgtgtggaatgtgcagaaggaaatctgggatgctttgctttccctgttggtgggtgctcagttgggaatgatcttattaacaacacgcgatgaaactatttcaaaaatgataggaacaatgccttcttatgatcttagcttcctaacttctgaagaatcatggcagttgttcaagcagatggcctttggatttatagatcaacatatggatcaacagttcgaaggatttggtaggaaaattgtgggaaaatgtggaggcctaccattggcaattaaggcaataggatcctctcttcgcggtgagacaaatgaagagacatggaaagatgtctcagagagtgatcaatggggcttacctgcggaagaggatcgagtgctgccagcactaaaactcagctatgatcgaatgccagtacaattgaagcgctgctttgttttcctttcactgctccctaaggggtactatttctggaaagaagacatgataaatctctggatgtgtttgggactcctcaagcaatattgtactgggcgccatgaaaacattggcaggatgtacttcgatgatttaattcagagggcaatgattcaacgagcagaatctgatgaaaaactggaatgctttgtcacacatgatcttatccatgatctggtacattttgtttctggaggagatttcttgagaataaatactcaatatttgcatgaaaccattggaaacttccgctacttgtcattggttgtcagttcttctgatcatacagatgtagcactaaattctgtgacgatacctggaggtataagaatccttaaggttgtcaatgcacaagataatcgaagatgttccagtaagttgttttctagtagcatcaatgttaaaattcctaccgaaacatggcaaaatcttaaacaacttcgtgcattggatttcagtcatactgcacttgcacaagtacctgattcaataggagaattgaaactactcagatatcttagctttttccaaacacgaattaccactatcccagaatcaattagtgacctctacaatctgagggtcttggatgcaagaacggacagccttagagagctcccacaaggcataaaaaaactggtcaacctccgccatctcaatttggatctttggtccccactttgcatgccatgtgggataggtgggctaaaaaggctacagacattgccaaggtttagcattggaagcggaggttggcattccaatgttgccgagctacaccatctggtgaacatacatggagagttatgtattacaggactacggagggttataaatgttgatgatgctcagacagctaatttagtcagtaagaaccaattgcaaatcctgagattagactggtctgatggtgtttgccccaacaactgcagtcatcctagcagccaaaatgatgtggctaccccagacccagagcatgaggaagagatctttgagagcctacggccgcacaagaacatcgaagaattggaggtagtcaattatagtggatacaaatatcctagctggtttggggcttctaccttcatgcacttggcaaagataatcctatgtcagcaaagctgcaagttccttcctccacttggggaattgccacgcctccgcatactctctatggagtgcatgacagatgtggagcatgtgcgacaggagttccgtggaaacatcaccacaaaggcattcccagctgttgaggagctggagtttcaagaaatgttgaaatgggttgagtggtctcaagttggtcaggatgactttccttcactccgcctgctaaaaatcaaggatagccacgagttgaggtacctcccacaggagctatcttcctccctcacaaagttagttatcaaggattgcagcaaacttgctagtctaccagctattccaaacctcactactttgg

SEQ ID NO: 8718 - DNA, 19429 bp, Oryza sativa
ctgcccttggccttaacccccaccaccacagcccctcactgcctttcacctgcaaaaaccacttgcaaccctcacaaaaccaaaaaacgccagcagccagcttccctcccccctccaattttagcaacttctcccttaaaatctccccccccccccccccttgcattgcacctctccttctctacccacaccacccccgccgtctccgccgccgccaccaccaccgattctttctccggtgccacctatggaagagatgatcaagccggcaccggcaccggcgtcgtcggaggaggagaaggaggtggtggctactgctgctactggagaaaggaggcatgaggaggcgacggccgggagagaggagcaggaagaggaggaggaggaggaggaggcgccggtggtgctgaagaaggggccgtggaccacggcggaggacgccgtgctggtgcagcacgtccggcagcacggcgaggggaactggaacgcggtgcagcggatgaccgggctgctccgctgcggcaagagctgccgcctccggtggaccaaccacctccgccccaacctcaagaagggttccttctcccccgacgaggagctcctcatcgcgcagctccacgcccagctcggcaacaagtgggcgcgcatggcctcccatgtaagtaaagccccaaatctccggttgatcgatcgatcgagctgtctgttgttttccatctcaaagttgttgatgtgatgtgatgcgttgtgttctttgttttgtccccagctgccggggaggacggacaacgagatcaagaactactggaacacgaggaccaagcggcgccagcgcgccggcctgccggtgtacccgccggatgtgcagctccacctcgccttcgccaagcgctgccgctacgacgacttctcctcgccgctgtcgtcgccgcagcaatccgcggggagcaatgtcctctctatggacgcagccgatgccgccggcgccgcctcgtccgggtacaccagcgcgcgcccgccgccgctcgacctcgccggccagcttgccatggggagccggccggttcagctcctcgccgcgacgccgttctccgcgccttcgtccccgtggggtaagccgttcgctcggaacgcgcagttcttccagttcccgcactcgtcgcccgtgtcgccgacgacgccgaccgggccggtgcaggtgcacccggtcacgccggagctctcgttgggctacggccttcacgccggcgaccgggccagactcccgcctgtctcgccgtccccgggtgccagagccgagctcccttcaagccaattgcgcccgtcgatggcgcctaccacagccgccgccgccgccaccggcggcttggtcggcggagcgctgcaggatcacccaaacgcggcgagcctcgaggccatgctgcaggagctgcacgacgccatcaagatcgaaccgccggcgccgccggaaaacagaggaacggaagaagaaggcggcggcggcggcggcaatctgcgcggcgtaagtggtgagtagtgcatgtcgcgcgtgaagcattttcctcacattttccactcattggatgcatctcaagttctctctctctctctctctctctctctctctctctctctctctctctctttttaagtgtgttgctttattgtagaagagaacaaattggcatgattatgatgtgaacacatacatagatcagaggatgaacctttttgtttgtgcttccaaaatctccatttgttttcttgctgaattctacctacttcctgaaaagcaaattaaacaacaccaatttcatttacctcgactcacagatcactctagagttaacctgcttagtgagaaaccaagaatgggaaaaaaatatatttcttaccagcaaaaacaatagtacatattagttttaggagttagcaaaatcagaaacaggacagctctgcttggaaccttcttttgcttttctttttgatagttttaaggtaattagcactgcatctgcatgtactgatgtacagaggcttcagaggatttctttttgtccttgcaagacagtgacagcctacagtgactgcctttgatcttgttccatgattacttttccttatcttaccaagtagtactttaatgcctttatttccctttcgactttttttttctctctttctcactctgcatctgccgctttcctatactactacctaatctaatctgcagccaattcatgcttcctttttgttcttccatgattgccttgctcatcacctccaataacagtacgtcacattggtgtcatatgattcataggttaattgattatcataatcaagcaaatataaataggatcatatctaggataagagtactttttgggagattatctataggcacctatccaactagtgctgagcagaatcgatcaaaaattaattctgcgtaagttaatgaatcaactagttgagttggtaccaagaatcgaaatcgtgcaaaacaaaaaaactttcttgaaataatttcagttccttcatgagcaaatttttgacaaattgatgcccatcaagtctgaagatttttgcatcgtggggttgcattctgtactaatttcacttcaatttccaggtgacggcaaaccggaggtagagctcaaggacgacatcgagacactcttcgaccttatcataccggcgacgttcccggcggcggcgccggagcccgccgccgccgcgacggccgcctccgccgcgcccaaccactccagctccgtctcgcagcacagcagcgacgaccaggaccactccaacggcgccgacgtcctcgacctgcccatcctcaccggcggcggaggcggctcgtcggagcaggacgactggagcctcgacggcgccgcctgccagtgggacaacatctccggcggcatctgctgacatgaatttcgatgatcaacgctgcgtctgaaacattctgtgatcccaagaaccgctcaagaagagctcttttttttttcctttttgcgaacatttttcttggccttctttttttttttcatgtacctggggttaattaggttgtatcgatcgtgactgagcaaagtgcaaatcttcgatgcccccagtgaggcttttaacttcgtttttttttaattacaaatgactcggtctgagctgatcatatcaaagtttttatcggcatatatatctagtatctctgttaagacattaactgcctgattatcttgttagaatgttattgtagtgatatgttcttccaagcatgcaagaggcaaagattatagcgatcgatttctgtgatgttttgataacggtcttgtttcaagctggcagttggcagtaggtacacgctgtgactgactagtacttgtcccaaaaacgggagactgcaggagcacggagaacatccgtgtgttaggttgtgatcaatgtgttgctgccttgttggagaccaaggctcagattggctggcacctgatcgaatcatccagcaaccgagtctgtgactagatgccctgctagagcattcaggtgttgtgcctagctagttcgtgtacttttggggatattgcgaatgcacgaataaaatttggggaaatgagatcaaagtgccctccgctgctttagttgtagttttgtttttgataatgatttttttttgggcgaaacacactatacgcacgcttatatgcaagcacgaacagtcaccttatgaatacatacatgcgtaccctacctcaatttgatccccatttaaacgatatgatgtatttggccataatttaacttaagttacagttacactaccaattgcaatagaatcaggtccattttatttagtggcggtttttaaaaaatgttgtagaatgaaagtcatgctaacaatctccagtgtccagaaatatggttatctgcatcttagtcggtgcacaggctggaagttacacttggctataggagctccttaggagcatatactcttaattctctctgaaacaaattgagaaaacgagcttgcttatctgtgtagcatcagctttggatgggtaccccaaaaaagaaaaaaaggatggcattatgggaaacatatcttagtgaaatgtgatacaccaatctcatattttacaataacaaaatgtcaaattcaagcagtagcaggtggtcataaatccgtcgtgagattatagtggcgaaccatgcaaaaggtggcctctgctgccttccggtgtctcgtacgcagcagcggcaccgctggtcgaagaaaaaggagcagttggattgcatgatcagcaagtaccctccccatgctaaatacgtgttgcccattctttgctccttgcttcctgccataagttcctcccaaagagaggcttctctcttgttgtgactccttactgctctctgtcacggacagagtcctttcatttcttttcactctgtttttttttccttccttggggacaaaagaagcttctaatgattcttatgggactagaccacataatgcaacataggccaaggacatagcactcaaataggtattttccactatattttttttgacaccatattttccactgtatattagtatagctttaagcctttaaaggtggtttcaatcttctttgatactttctattttagccctcatagtttttcaatttatgtgaaagtccaaagtgttacactaaacacccagaacctagaaactaggccatgtttgggggagcttctagctgctgcagcttctcccaaaatcaaaagctcccccaaacagctcagcttttggtccagattctgagtagctgtagttgtagaatccaaaaaatgaactagaaaccagaagctaggaaacccagtttttccagattttcaaaagttggctaccaaccaattgtttctcagaatcttaagcttcccaaacagaccataaatctctcctctacccctccactctcccctctcttggaccctgcctcctatctcctctgccctctcccaccacctgacactagcagaatattttggttccatgatttcggtttaatatatagttaaaatattggattttggttttctgattaattttaccaccactagagtatatggttcaatgcagaaccatcgacaagctcgtgctggctgagtgaccgaataggacccaaaaaaaattaggggccccattttttctaattttaatctatcttaatgtgttccaacatgtttaaagctctttggttctatttttaaaaggcaaattttgctataggacataacgacttactgttttagctgtaggacaccgcacgaagtgagtattgggtaaagacaaatataaaaagaggaacttatggacttgaatcagacattgggttgacatccaaaatagagaggaaaagaggaagcaaacatagctagatcacgaaagaaagctcttgcaaatgtagctagctacgccttctcctccatttttccggtggcttttaccacccgatctgccaccaccgtccagtgcaaactatctagtaggccaagattcccccgacctaccctcctccttagtctctagcggttctcggtccatcggcgccatccttcgcctcttaaccaccccactcaactttgccccctactgtcggacctgcccaccacccattgccaaccctaccgctccagcgccgccacttagctctcctcccacccccactctcaccctgacccaaacccccaaaccctatctggttaggtcaccaccatctcgctgcatggaatcgctgcgacttgtcagagctaaggaagaaggatgctaagcacgaatcacccaaaatctataagattcattccccaaatttccattgaatgctacttagcaatccaaacaaaaaagagaaaatctctcgtatacctctgaaattttacctaatcccttctatacccctgaattttgcttactttcttgtatacccccaaaatttgattttgattccttccatacccctcccgtcagctaaccgttagttggccatctaatttctataaaaataaccattttaccctttggatgaacatagaaatttatgaattacattattaaaaatgtaaaagtttgtcgcatgagactattgtagttatgagtttttttgtgcgatacattatttatcacaaaatttagttttagataataaaataaaaaaatatgtatttatttttaaaaatcataaaaatgaggagcattcatacaaagataggaccaccaatgctcacaatattttttttatgaatgctcccgataaaaaaaaatcaattgtcctattaaaatttcaaataaatattttaatctattacatttgttttattttcaaaatttatgtaaaaatttcctgcactaattatttagtctcattagtttcataaaatgcacatactgtgcattcaaacaaaattttcaatcatttttcaagtttatattcaaatctaaagtatcaagggaaaaaatgatatttgcaaccaaacgtaatactgaaatgaaggaaaatgtaatagtagggacacggaagggatcaagttgaaattttaggggtatagaagggatcggataaatttcaagggtatgaaagggattgagtaagttttcatgggtgcacagggaattcacttaaaaaaaagatggacaatattgcgactaaacagtacatgtacaccaattagtttaacctgctaccattcttatatatctgaaaataaatgatatgcatgcatcatctctctcccacgtgggagtatgcaagaatgcaacagctcctaatagataagtttcaaataaaatcttcttttaaattatttatccgattatactattatattagttctaattaaacatttataataagaatttacatgcttatattctaattaaaaaaatatatgttgtaaattactttattatgtatgtagtattaattttatcgtatatgtacattatttttagatttaattaaattacttcttagatattcataatggtgtgagttatttacatttattgttatttttaagttagttctataatttgtgctgactaaattaaatttctcgatagactcatatttttaccctcgtagcggaattagttttattacaatgataacttactttcattttgtattaacctacttttatgatttatgtaaattactttatgctttattgaatttataaatatctaaaaattaatctaatcaaatttaaaattaatttaaatatatgacaaaagtagtttacaacacatatatatctcttattagaatataggcaaattttgctagatgaaattgtgacttcatggttttatctataggacaccgtacaaagtgagttttaggggaaagacattcagtaaatatataaattggctcatgggtactatgcccattagaatatttatttctagctgaatatgaaaccatatgaaagttataaaatacccatgggcacacatgtcaggtcaaccatctctcaatctctctctcgcacatgaacaatgaaatgggaaaagcatcatggtggtgtcgccgtgccatactcttcgaggtgtatggcgaggtggaagacatcgcggcgcacaccttcgtctccatgtagcaggagtgggcgtcgtctaccacgatggccatggtgctgatgacggtgagggggttgaaggagccgaagccctgagtagcttgggtggggcaatgtggaggagagatgcccgagtctggcacgaagccttgccttgatagcctcgttgctccgtgcgagcccactccatgccttgctcttggtctccgcctgtcggagccgctcctaaagctcagtccagcggcctccacctctacctccttctcctgccactatcgtgccgcggtagctaatgtcgcgttccgtatccactcgaagtccatccacactattgtgttgatctctacgctttgctcttgctcctgctcaacaccatcggctgcagtatgcttggcactatcatgctctagcgcattctcgcgcccctcactccttcttgtatgactttgagagagagatagagataggagacctgatatgtgggtctagaggtattttagaattttcacgctatttctctcccctactctactagaaatgattattctaatgggcacgatgttcattagaaaatttccacgtttacaaagtaccttctcccaaaagtcattttatgtggtacctcaaagttacgatgaactctaacaaaatttgcctagaatataattatgtgagattgtattataaatattttattgcaatgaatgtaacggtgtgaattagatggtaaattagataagtattttaaagaaaaaatataagaaggaaaaacctacatacatgacctaacaaaaacactcaatcaaacattatcccatagcgcacatggctaccaatcaagcctcgtcttacaagactaaatattgtgtgtgtactactatttagattttgtgttaattgtagcatatgtatcaacttgcctgcagcccatttgtcgaatggttggttggcacgacacaacttttagacgggttacaccgcgacaaacgagggtgatgcgattgctcgcgtttgatcagttacgaagtgggatgcaaatgcaagcgataacgaaaagggagcatcgcttacgaaaatcgatcccaaccaatctgctgcgcgcgcgcgcgccgccaaggccactcgcaagtcgcaaaatcatataccttcatcggcgtacgtgagtgagctcgagcaacttagcaagcacaccgcacgccgcgtcgctccagacccggccgccggcaacggtgacatcggccgcaggggcaattactgctcgatcgttgctccactcctcgccatggcccagggatgccgatgccaatgccatcataggcagcgctggcgctgctactacacttgttaataaatggcccgcctgctggctaaggaggaagccaaattccactacgatgcggcgaattcttgaaacttccttgtggcgatcgaggcccgcttgttaatgttcaatagcggcatatataagtccaatagaatggatggtacacccctactgtgtttcccttaacatcataggaggggtggtaatgggttaccctccaagcgataactaggggaaatttgtgcttcttctcattgattcaagtgttttacttgatttgtgtgttcctgccaaaaattcacttgatttgcgcgagcttagttggactgctgtgtcaccagtgctgggttgtacatcgtcgctgtcgggtgagatcctctatcataatgttactatcattatagtcattgttatatgggttccatccttctattgtcccacacgtcagtgcctgtaatgtgagtgtcattatggtagaggatgtgaacccgtcgccgtcgccatgtgagggggagactgactactaagttccatatagtttctaccttggactaccatgttgacatgttacatgggcaaatgtgacaaatagttgaaaaaaacaaccaccttagagggaaaaaaataaaagcaattttaagatgagcattggataattgccaaatctaataatggcaatagttaaattccccaataactagggtgcgtttaggagagaaggttgggaattttctctggcgcatgtaaaacatgataattcatgagcacgtgattaattaagtattagctattttttaaaaaaaataatatgattttttaaagcaactttcctatacaaatttttcaaaaaaaacatctttttacaatttagagaacgtgggtacaagaaacaagagagtagaagttgggaacatgtagttccaaatacaccgtaaacatgtggttcttaaccaaaaccaagaaaaaccagagaaattttaccgaaagttttttttatttaattgcttttaacttagcagatattcccttcgtctcaaatataaacattttgtccagatttatagttaaaagttattacatttttgggatgaaggtagtatatcagattgttttcattacacgaccacaagtccacgacgataaacccggttaccgcagtaaccgacggtaagaaaaacccagcgcggcactcaactgcacggtacattggtactacttcggcctttatttgccaaagatcaaattctattcatctcaaaagatatactccatcatcaaatgtgacgtcagttatcccaacatcaaattttgggaattttggcaggatagagtaataataacatggcccatcacagaggatgggccatggaatggtccgtgctaaacggtgtctggcactaatgcactgcagtctatgaaatctacgcaccacaaaaaagtgtataggaacggtgaagtcgaaattttgtttatactatggaagaagtgataattgcgtaagcaaatttttaaattcatttactaaattttaaaattcaaaagaattttcagccttatgccacaaaggcatgtcagggccacgttaaatctgatgcaagattgaaagtgacgatactttagagttgaatagtgttcaattttaaaatttaaggctgatccagtctctgcaaaagcttgggggggttctaaaatggacattttccttgatataggaatacgtttgatatatttttattttattgcttacaggtaagtaattatgatagtgaatgcagtttgctagatctagagttctagacagaaacatgatatgcttccagtaccctgtatgaagtaacaagcaatagaaagcacatgagcagcctatagcaatattagttcaatcatgacaaccaggccatattaacatgttaatcatgtacttataaacagataacaagaccaaggcataatcttccattaatacaatgcaactacattagttacgcatagttggcaaaaattttaatgtacattaggcagtagcatagcacatagcacattcataattcatagattgatttgacttaaaaagaaaaggggttgtatttgaagcacatattacagaagagcaattaaaatgaaacctactcaatttcgatatggtgatgcaagatttatatatacaaatctatgagatggtagaaactgactcacatataagggaaaattgcaaatattttttatcacaaagggatgctatacgattggcaatatattctataacgatgtttcctgaatcattgaagtatcgaaaagttacaaattcataattaaggaacagacttatattaaagatattagaagtcagcagtttatgacaggaaatggcatcactaaatcaccaatcagacaagaaacattgcatggagtccagttctcccgcttataaacaccattccacattcttccttatcgtagtattccatgtgcaatgtttaatgtgtaaatgtttcattgccacagagcaccgttatgttatcttgttgcatatatcaggtgtatagcaaaactgaacatttaataactaaatttacaaactgagattgttggtaaaaaatcgtgcaggataggagaccataccatagcaactaatacattttatagcaatcgactagttagtgtaatctgagttgattttaacagggttgtaaatggcaatccaaaaaagacgagtataaagcaactatttttttgcttcacaaggggggcaatttacatatcaacaattcagtgttcccattcatctagaaatgcgactaaatgcaacattagagcttcattcagataacaatacaaggacctatgatcagtataagaagctagaatgctagagcaatcccaacaaatggggcaaatgaatcccaattgcacaactactaaccttttcagaggccaaccaatgtctgaaacttttgacttcactaactgtgatccaagttttcatcacccaagtatcacaaaatgtccttgatgaagtcaagattgagcgtgtcgcggacaatcagaaacatgccaaccatgagtaccaccagtatacctgacgacatgatcctctgttcgatttcacgggggatcttctgcccaccacgggccgcctcgagaaggatcaacgccaacgtcccaccgtctaatgctggcaatggcaacaagtttattgcagcaaggttgaggtttatcacagccgcaaactgaaacaagccctcggcgcttgacctggccacctctgcgccaaccgcaatgattgcaactggaccagacaccttctccgccgtctgcgagaagttgaggaacgtctgcctgaggccgtcgagcaccgtggcgctcaatgcggtgaactcgcgcaaggcgaggacggtggcctcggccaggttgttggggtggacgcgagtgacacggaagtagggcgagagctgcacgccaatgcggccggtcccgtcgacgctggtgtccggcacgacggtgaggtcgatggacctccggtcgccgggtcctggccctgttcttgagacggtgacggagacatccttgttggggcttgccttgatgaggtcgacgaggacaggaacggaggggtccggtgcgaggccggggacggagaggatgacatcgccggggaggaggccggcgcgggcggcggcggagccggggatgacctcggggacgaggacgccggggagctgcgcctggacggggacgccgacggtgagcgcctgggcgtagacgatgaggaaggcgaagaggaggttggcggcgacgccggcggagacgacgaggaggcggtcggggacggggcggttgcggaggaggtcggggtcgtcgggcgggaagccggagtccgggtcgtcgtcggggaagccgacgtagcccccgagcgggatggcgcggagcgcgtactcgacggggccgaggcggaagcgcgcgagggcggggccgaagccgacggagaactgggagacgtggatgccgcgggaggtggcggcgaggaagtggcccgactcgtggacgaggacgatggcggcgaggacggaggcggcggaggcgacggactcgacgctggcgaggaggtcggacggggcggcggcggagacggagatgggcctggaggaggggtggcggtggcggcggaggagagggaggtgggggtggagggatagaggaggaggaggcttgagggtgggagagaggtgggtggtaatccgaatcatggtgggagggggagggggaggggaggaaggcggaggagtggataatctggcattctcttgttggggagtttgaggcgcgtggggactttggtggtgcgcctccgccgccggtgagagagtgaagtcgggaaatgtttgtgtggatgataagcgggtgacgctgcacagcagtaagccagaaaagtgagcatatgtttttctttttctctcgtttttaggcgcagaagcccgaaattcatttctcctgttgggctaaaagtcacacttatatgggcctgggaatctgggatgggcgtgggtcagcccgctggtaatgattaattggtccattcagattcaagtaatcaagattcgaaaaaggctatttatactccctccttaaagatcagatccgattgttattcctcaactataaaactgggtatatttactcctccaactattaaactatgcaaaactatactctctcagtggttttagaatggttttggccacatggagtccaatggatagcccaataattagagaaattaaaaactaaagtgaggctcacctgtcggtgattctcccatcttctcttatctatcctctctaatccccattcttctcggcctcctgaaggtcgacgctagtattgtcaagacagaataggtatcagtcggcttcgatatcgaaagtagtcttggccgtgtttggctttaattgggccaaaaacactagacgcaaaacttacaacccaattacacccaacacttcacataaagaaataagttcactttaggtccatcatcttaacgacgagtttaaattgcgtccttgaaaccataatacaaagtataacgcatctctcaacttgcaatataggtgtacacgagatccttaggcaatagagttattggttttagctgacatgacgagttgactacggtcaacccatcttaattagcacaggacccacatgggccccagatgtcagtggccaactcttctttccctccctcaccccttctctctacaatctctctccctcacgatggccctacacgagatggtggcgcgtgcatttgccggtggataaaggtggcgagcgatgggaagaagcatggcaaccagtaggggtgggcgttcggtttattagctcggcttggtttcatcagtttaaaagatattcggttttctagttatggcaaccgagttgtttataaaagaatacaaaaccaagccaaataaaccgagttacttcagtttggttgttcggttttaccgaacaaaccgtaggaacacgttgccatgagttccaaagcacacaatacttttttttttgcggggaaagcacacaatacttaagaaatcgcttgacggcacatgcaatggcagatcaagagacaaggagttttcttacctcacataccaagactgcaagagagtcatgaaacttggagaaacctggcaaccagtagactttaatacagatactccctccgtcccaaaaaaagacaaaccctggtttccgtgtccaacgtttgaccgtccgtcttattaaaaaaactataaaaaaattaaaaagataagtcacacataaagtattaatcatgttttatcatctaacaacaatgagaatactaattataaaaaaatttcatataagacggatagtcaaacattgacacggaaacctagggtttgtctttttttgggacggagggagtatgtggtagttgtacgtgcacacgctcagatcagtcgtctggagggagttggaccggcgcaacggctgcgacggctgcggcgatggtggtaaggtagccatccagccacgacttcgcacgatgatgagacgacgccgaacaacgctgggttttctaggagatgtattagtgttagattagtaggccttgggcccaattaaagagctgttggccttaaagtttgtacgttgccaggtttgtgatatgtgtctaacgtgtggttcagtttctcccgttttctcatattgtttggttcgtgagaattgaaaaccgtagataacaccgaagaccgatcagatgcaaaacagaagccgaagaataaaccgatgcccgaaaaaaccgacacttcttcagttcggctcagttttattcggcttgcggtcttcggggattctaacacgttgtagggttcttaatcttgaagggctactcgagccgctgcgcggcgagtttgaggccttccagtcagccatagctgcggttgccacccgtccaatccgcctcgctcgccgcctctcttcccgtcggtgacagcctttctctccatcacccgacgcccgcttcctagcctggagagatgggtccacgggaaggagaggaagaggggaggaagaagagttggcaattgacatgtgccaagttgatttagccaagttggtcacagtcgtcgtcacgttagagcatctccaacagcttctccatcccactctccaagcaaaaaattagctattttgaacaaaaattgtactccaacagcctctctattagaatagccaagccaaatgacttgccaaactcctctcctcaatggccaaatttagccagcccaaactgccttgccattggtgggtcccacgcgatacgtcttctctcacctcactctacgcgtcgtgactgctgcaagcggagaaggatgtggcggtggggcagcacgatggcaagcgtcaccatggcctcccgctcgccggccgccggcgtcgagggcatgaagggagcagcagcaacgaggtattgtcatcgcccgagctctcgcccattcctgcgcctctcctctccaatctctccatcacattcacgcgccattgcatcatcgatcgagcattcgactctccaagtagggagctggagccaatggccaccgccaccctccacatcgacggcgacgacgtcatcctcgacgtgggccatctggccgggcaggcgagcggcgacaatggcgacgcggtggacaatgcgttgatgaggctcccgtgtgctctcaacgcggtcggcgtcctcaccggcacgatggccgctgcggctgccaggagtggtggaggtgtgggccgcgatgtggatggccggggattgccgacagccagaggggagctcgacggtgctcggctgccgggagtggtcggcggggagagggagagtacctcggcgagcgttggcgttaggggaccgccgtccgtcggcatgcgttggcaacatcggtcgacgcctcgacgagaattcgggaaggaaggaaaggggaaaagaatgaaagagaaagaaggggggagagagaggggaagaagaggggagggaggctgacatatggatccgattttattttggagaggattaatagagagtttgttggagtgagtatctaatttgactgtctaaatcagaaggagagttggccatatgtatgtttggagagttcgatttggagagactatcggaaagactcttagccagaactaggcactgcccctgtgaccttggacacattgattttacaagttaagaaacataatttaaacttgatgtcaagatgatgcatcatgataacccggtccacaggggtacacagggtgaccactcctcttcccctctctgcatatgcgtcagccgccaggcgacggcggacggccaccgacagccgccgcatgcagctagggtcgtgcccgtgcgtgccggctttggcggtggcgtgtggcgatcaccggcgtcctcggaacgagcaagccaacgacgcgaggatgggacgggaccaggggaggagggcagtgccgcggcctgcagcggttgcgtgcaatttgcaaagcagtctggagcttggttgcgctggagattggagcagccgggtgggaaggagacgatcgagggtggatcatcggatcctgtttccgacaccaccacagtaaaggaaggctcgttcccaaatcccatttttatctgttggtgtgtaaaatgagaaatcaatgtacttcagttggttaatttttttttactgtaaactgtggactttatcactgcagagaccaaaatgaaggaagtatgtggatttgaaatcacactcttcttgttgtaagaacaccgaaattaataagcatcatgttctggatccatcagaaatgcctctcaagtcccatgaatcttttcgtatgctatatatttgtcaacatagattatagtttgtcaattgttgtttcattcatggattgaattttttttctaaatatgaaccttacatttagcttttagatacttcctctatccaaaagtctaatacctatttcattctttggttttccaaaagtctaaggcctatttgtaatctctatatgctaaattaaattgttgaccggaaccaagacgtccttttagtacttactccctccgtcccaaaaaaagacaaaccccggtttccgtgcccaatttttgaccgtccgtcttatttgataaaattatgaaaaaaattaaaaacacaagtcacgcacaaagtattaatcatgttttatcatctaacaacaataaaaatacaaattataaaaaaaattcatataagacgaacagtcaaagttggacacgcaaacctagggtttgtcttttttttgggacggagggagtattgtcacatgcatgtgtgtagttcattagttttgtcactgggtggatgagttaattacttcttggtcatggtgataaaagaaatatgtttttagatttttggatgaagggagtatctcttaatttctgagatatacatgcatttaaggtgctcgataaacacgtagctaaattattttattgttaactaacctgtaatctctctatgttaatttgtggtgttttgatattgtgtatattgttttcttttccatttaagtatcccatagtaactctgaataccaatagaaatcttccatctgccacagttttgcagtgcattccattgtatgggcttaaacataggaatctcagtaaagaaaagaatgtgatagttacaaccttttcaatcaagattcattatcagcggtgtaatgagatatatgattattccaaattccaatgcaatgtgcttgcttgatattatgtgaaatcacatataggtgaatttagctttggatgtggatttgtactgcacagtatttaactgcaggcagcgcacgctatccttttttcccactccatacagttctactattcattattcaatgtatgggaaggtagcctatgctcatgtatcaacagagtattttcattgtctgtttcttgcagaataaaccatgcacatgctgatgaaaagtgacagccagcatgtatcatgcatcccgtgagagctactatgcactgaaaattggtagtgttattctgtgttacatattgctactgatgacttgatttttattttattttttcaattaaagctgaaattaaacctcccattctggctgttgttcaagacaaaaggtccatcttttgctattttgttccatagcaataatgtcagaaaaagcctatataacatgtacaatacaacatatctgtgttagttatttaatttcttgcttgatctgtgaagtgaaatcagatttatgcatgattcttctttgtggtttatcagctgggatcacatgatgcagaaatatccaactttggtcttgtgttatgctacaataaggtaagtcattctttgacaaggggaagaaattccagcattcatcaaaattagtaatatttagtaaggaaaagtattacattgtattgaaagggtttcctttgtgacctaaattacaggtgtaacatgtttgcaagtgtaaaaaattatactaagcttccaagcatgcccttacatagtacacgcaatgtaatgttaacaaaaaatttggccatgaacatcgtgttgaatgtcaatttcatgagcacttttagcttcttttataaattcctacttccattgttggatacagattcaagatgatagatgatagacttaggctgtgttctttcccccattttcccaacccacctctctcgttttccacgcgcacgcttttcaaactcctaaacggtgtgatttatgcaaaaactttctatatgaaagttgtttaaaaaaattatattaatccatttttttaaaaaaatagttaagacttaattaatcatgcaataaaacaaacttcgttttgcgtgctagagaggaggggttccac

SEQ ID NO: 8719 - DNA, 11390 bp, Oryza sativa
ttatgatcgtcagctaaaaccacctgtaaaacaggcgaggtaattactttacactgattttaatacttaatgaagatgaagatgaagatgatatatacaattttacaattaaagggtaaaatcatattcgggtaatggttgtgggagttaaaatgcaccttttccatcggcgctcataaaatatcctgagtgctgctatacatacgaacttctgtctacgatgtttgtacgatgaaacacccttctctctctctgcatcagaacgagacaagaagactgacatgctccataagtccacgttagccgtccgtttgatcgtaggaagatcgtactcaaacgtatagcaatttccataaaatatcttgtctagcccaaattgtctttgacgtactaccagtcttacctctgctccggataaccagccaaaagctcttcaaacgcagtggcaaaagactaaaaacacttggacaatccaacaatgcatccggtagtactactagaatgggaatgtcgcgtcatttaattggttttcaacatcaccgcaaatcagaaatcaggagacaacaaaataaagggagcgctaatagcagaaaacaaaccccaactttacaacacttatggcacataaacgcatagcgagaacacacattaagggtagacttatgttgcatatcattgaaaaaaacacgctgcctaagaaaactgataagacgtccaacacttgcattacgagaatattaggggtgaaggttaaacaaatcaaccagttctgtattgaaaacatatgtgaagttgtaaaggtacggaagaaaatgccaaatagaaaaagtctatccgttgcaatttgtttacagcttcaacacttcctgtaaaagagagtataaaagaagttacaggagtgttgaaaatgggcatcaatggtccatcatttgatcagtgccagtacttaaaaaattacagacgtaaaaggagaacttagaaacctgaacagcagacatacttcaattgaagctaatttaagagagcactcaccttaagcttgctgttgcttcttctcaagaatcttcttccagcgcttttgatcgagcatcattgtcatgtcttgccagctgatataaataagtcaatgggcaggaaatatgtcaaccaacttgaattgcacaatgaatcaactgagtgatatgagcacatatggatgcacaatggccaggtttccatagattaacatatgactggcatgatcacatgggaaaaaacaaaaacaactgttccaaaaagtatgctaaaataatcaactggtgaatatatatgatactaaattaagatgctcaacaatgtaaaacatgaaaaataatagcattctagttcataatccatggccacacgtgcattttcagcctaaaatgtgtgaggtttcatagaatacttatgccttataacccaaacctgaacagactcaagtaatgctttatactccatccgttccaaaatataaggcacaaccacccttaacccaaagatcaagaaataattattatcatctcatagtttggatcaccctaataaatataatgcatgcatccaatagaattagagatcttgagggtggaggacttaaaaaagcaataatttaatggagaagaggtcctaattaattgtatgcatgcatgcatgccttatattatggaacataaaaaaaagtagttgtgccttatattatggaacggaggaagtacatgagaaacaaatggtaggagtttgtttgaaatcatgtgaccaataagtatataaataaccatgttagagtcacgtagagattacagaagtcatttaacttattgacatatttttaactttttagtgtaaaatggtcaagtaatgccaagttaattgaccaccttaacagtggagtacccacgaacatatgtacctccttaaaaaaggtgaatctacattctagatatcccctcatgcatccttggccaagacatcattgacgtgaactgatttgatctgtcaagtcagccaggccaggtcaacaagtttcggctaagatgcgaatcacgtctcacagccctgaattcccagctaggtgcaactagtcaattgaccaattccgacttcccaaacattggttggaccggcacactagctaaggtagatggccaggctccaaccacaacatgggagtaagagaccacaggaagaaaaaagttattcacacattgtgaacatctgaatataaattaccctcgtgacctctgtggacgcatcaaaaaatagtggatatttcaccgacttgtagactaatagaaggaaaatgttattccttagctatacagaaatttaataggaaatatgctatctgaattattcacttaatagttgttttaagtggcattatgacaatgcacttgggcccacaaatttgaaacatgacatgctaatcttaactatgaagttatcataattgcctgctatggctaacgtctgctagctactgttaaaatgctacacaccgcaatgcttgactgatgcactcttctctatgttacccgaagccaatccacctcacattgttataccagcaaagaaaagccaaccctggtaatgtcactacttctcaattggatttacagaagtgttatgcccatgttaccctgctgtcaagtcataaagttgagtcaaggtacccctggactgacttggcaacttggtcgactagtccacgacgacgactcggtcgtgtgaaaacaggggattcacttatcacctttactactattatactgtactaagcactatgtgttgtataaactatggactattgagtagccagcaagacaattgagttaacaagaaataaaactaaagtactaaacaaaatgtgccaattagcatggtaaattgatgatttgctatgactaatcacgactaatcgcacaacttgctatttggtcgagtcgtagccctctagtcgtgtggcttgaccaactttacaactaatctatgactaaccaggcaacttgattatgcacgtcacaaacatgtgtaataattcaagtgttactcagatcacaacagtgaaggttgttgatgggggtggtggaggaacgcgactaatgccctccagttctgatgtaattggttggccagttaggtcacactgtgacataaatcactaaaagtgtgggaggaccaaacagtaccatctacaagagtttataaaaacaatgttcaaaccggaagaaatcataaatttgatcccaaagatggaccctttaatcagtagattgaactgaatttcagctagtgaagatcatatttactcgtaaaaatatcacatataacacaccaccaacacaaacaccttatgttgatatatgcacgggatcaaataagcacagggcatttaataatggctgaggctctatctgttcgcaacagcttactcaatactaaagagttttgcagaagcttcataatttatatattgtgggtataaaaacaaactttttgtcaaagaaaacactgctgagcagaacccaataaacatttggtaattattaagaggttccaatacatatactcttaatacttaaatttattcaaatgcactgtgttccttgattcacattaacttaattgctttcctttcctgtgcatcttcaattcagaatgaatttattttttccttgaatacacaaaagaattgcacgccatctcattaagagaagttacaaaggaagaggaacacatccaaaaacaatcacgccacgcttaaaaactaaaaaaaggatcaaaccaacaccacaaggttggactaggtgcctattgctagtgaccgaacaaggaactcacgaagcgcagaggcaacaagcccagcaccacaggctgctctcttccacagtagaacctgaacattggggcttgccccctcgaatacacattcattacagtgattccatattttccagcttactagaatgatcatggagttgagccccttattttggtcttcaggaacacgtctagtagcaccaccagttagagagaagcgcggtagacttagggccttttgggggagattaagattccgagaagctgctgctgagaagctagctggtgagaatctagagaagctgggaaagcttctagttcattttgtagattctacaattacagatctcagaatctgggtaaaaagttggactgtttggggggagcttctggcaactgaagattctaggagaagctgcagctgctagaagctcccccaaacaggcccttaggcttcgttcggcagtgagcttttccagcttataccccacgttttccacgcgcactgctaaatggtattgttttttgcaaaaaaaaacatctatatgaaagttacttaaaaaaatcatactaatccatttttttagtttttttaaagctaatacttaattaatcatgcgctataagttgctctgttttgcgtgcataggggattagttcccaacaagctttgccgaacacagccttaggcatggaaaccaacaaattcagaatgaatttatattagggcaatctactgtagtatatctctttccatacaaaaaatgaggtcgaacagaacaaaaacacatggcacatttataccgaccaaacaataattatggagccccatcctggaaactagaacaagaaagcataagcatttgatttcatatgttggagctccaaaatttaagtgccagattttatattattgagttgtgaacacaagagttgaacaattttcttagtagtttttaacagaggaaaaaaaacaataaggctcaactatgtagtatattccattattccttaccatatttcataatcatctattgctgttatcttggggtaattttactacatgcattttgattttagcactgtttggttcctgaaacttttccctgtgttgtgtttacattaagaaatataatgggggtaaacaggaagcagggaaaaacattgtttgtcacctcattcatgtgattgccatatttatacccatgatccaattttacgctttgcacgcatctgtaataacggttatctgctagcaactagcatgccaagcaagttacgtaatctgggttaatcatttattaagaaaagaataatgtatgattatatatctaaataaactttcattcttcatttgctagctatatcagcatgatttatgcatcacatgtacagcagtagttgtttttcacctccaaaaccttttttaaaaaagataattcacttaaaaaacatattagctcctaatgcatatgcttttgcaattaaaagaagtccataatttctattatttgatcaattgcttagattgatgttgagcatcttgaaatttggattaaaattccttttggttgaagtcaactaaatagttgcatatgtgctgccacaatgtttcatctagtaatgacagatttcctaggtccattgcactacattaggtagcacaaaattaggtcacatagcaagaacatgcatgggaacaactttcaccaaattaaactatatacttgtccatgtaacctttaaagaaagttcactttaagacacaattgcatcaatcacaaccaaccttttgcaaacgtgatattgcatccaataaagattgaaatacacagttgacatccacaatagggcaggaaaacgatttagtggcaatggctaggcaaagcaaaccataatgtatgccacttatagtgaccttcccatagcacacgatagtacacacacgttgccagaatagaaggtagtttacaagataaagattgaatggatttatttattactcatgcattggatgagaagaagaaatttcagggaaatttttgtcttggatggaaggttttgctatggatgaggaataccaccaaaaaaaataaaaaatctactattccctgtacaaatatacctaactggacaaacacctagatccaatacgatgcatccacgaggggtatcaagcacgcaaagggaaattatctatctacacacacacagtagcacccatctagggagtacatggcaatcaatcgaaagaagacgataaaattcagatgaatcaagacgtcggagggggaggagcgggggatggaggagttggaagagcttactagtgggggagggacttgatgttggaggcgagggcggaggcgtggtggtggacgcaggcggcggcgccgagggcgaaggcgccggtccaggtggtgaccagccgctgcgggtcggagtgcggcaccccggagtcgcccctgtacgcccgcgcccagtagtcgtcgaactcgcccatcctcctcaccggaaaacctcggcctctctctctctcttctcctcctccggccggcggcgctaactccgggaagggattgggttaccacgcttcaggagaggatgtcctctcctatagacctgtggacttggtctatggaagatcgccttgggcccacgagaacgtccccgagcccgggcctcatgctcatgggcccattgggcccatgtggatatggctgaatagtgaatatatctatttgatttttgaaaagactagctaaatacacatgctttgctatggataaaatgcattttttgcgaaatgttctacccattgttctgctatggaaaatattcaccttgatttgattatatagatcgctatccatttagattgattattagttttataatgggagtagttggggtggtagatttaccgtcaccaccaccagagccttttaaagtagtacagattttgaatagggtttacaagtcgagtaggaattcatactagagagattttcttcaagcaaaagttttaaatacagataattttcctagagaagggtttcaattttcacatgagagttttgaatatataatggtttattagtttaaattgatttttctatttgtatttttttccaaaatattttcattcccagtttatagtgaaattcatctgtagatgttttactttagaacctcctatttaaaaaaagcgggaaactcatcttcaaaattcatgctaaaaggaaagttagtaatatgaattcaaaccctaatcaagaaaataatattaattcttgaacttgaatttaatcactgacatgttaccaacatactcccttcatatgatattataaggtgttttgatttttttctaagtcaaacttacttaagtccatctatgtttatagaaaaacgtagcaatatctacaatatcaaattagtctatttaaatatatcattgaatatattttttatactatctttgttatgtgttgaaaatgttgtggcattttctctataaacatggtcaaaacttaaaaaaagtttaataataaaaaagggtagaacattttataatataaaacaaagggagagggagtactttgattcctcgtcttacctttgtaaaccatgagccaccattcttctgtcatccagtcatcctctttagctatcatccagtcatcctctttagcgacattgactatgctagaattgtatttgggcttttggcccatacggagagtagttaaaataaaattctcaaaggtccaccttgtgggaggtatgcatgtgaacttcggtattacctttctagttcaaagatagtggtacaattttaaaagaggtggtgtctcctcgccacttgattaatgtgtgtggttgagaactagataacatgcactgcttgctaacctcacctcattgcgatgggggcgctcggcacttgcatggatggtgcgctaaattttgactcctagtaatggtcacaatctatctaggagtagttcggttatgagttgtggagatcatgtatgtcttgatcagatgctctgatatctttatcattttgagcttgagccaagcttcaagcaagttaacaaacctgagctaaaatttcagccatgtcaatcatgtatgccacctcgctctgctcactgcttgtgcttcgctccaccctacgcttcatttatgataggagaggaaaggtcctattgtgtggcaactgtacccaattcttttgttcgcctgctagtgacgtcatccctcttaatgagcaaacaaatcgatgttttatccctcttaatagtatgtcattcctatactcaaatgcaaatagaagggaattatgccaataggaaaaccgtcatgtcatcttctatatatgtcttgagcaaggttttaaatagcgggctaaggctcttagcggttgagccttgaaacagctaagggcagctttagccggctatagctacagttaaagcatttagcagttttgtaaaatatgagaaaaaaatcaaaaatttgatagaatttgagctaaaagttgacatatcacttatttcattgcacatagagttcatcaccaattcaaagttcatcacaaattcatacttcatacatagagttcatagttcctaactcatacaatcatactttcatagttcatactagaacatacagataccgggcacttgagttcatacttcatagttataaatttaacagtttatagtaaacaaataaacatgccacttgagttcttgacacaaataagaaacagttcatcacaagaagtcaggaacatgaccattaattaacaaaataagaacaacaagttcgtagattagaatattgcattccactaatcagattcaaagacaccatgagacttatcagaatcagaggatccctctgaaacatctccagcgccattgccatcaccatcttctgagtcagatgatgaaggtccgggctgcattgtaacatcattcatcaaagagtgcacactcctgattttcttctttttagggcgcacatgcctcttcctttttccttgagcctgtgatgtttctccctgtgatgctccatcttgtggatcatgttcagcaagctcattagaaagaggtacaataccagtaatgaactcattctcattatcagccacaacatcatttacttccttctctaaaggatccctgtctttgctgcctctcttgtttcttatagtttggagttaaatttcacaaagacaagatctctcatcctatcatgaagtagcttgttgcgcctctttgtatggacctatgaatacaaattatagatagataatttaaattactagactagcaatgtcaatgttttggggcaacaagtagcaggtaactcaattctcaagcaatcataccaatctgaaattatttctcaaacatataaacagctaaactatcaacaaatctaaatgtcatgtcatggtgagttctaagcttttacctgttcaaatacaaaccaattcctctcacaacctgaggagctacatgtcaaattcaaaatccttgacaccaatatcctcaaattgggaatgattgtgccatggttcaaccaccactttgctgcacaacaagttaaagttaaacaacgaagacaaaaaaaaaagatgatttccggcaatcatattaggttcagttcttcacttggattaaaattcttgtttctcctctgcctcatggcaatttcctttccaaatgtcccttgttgttcttgatacatgttgagttctgtaattataatgtcttgggttgcctcatccttaaccatctttgaaacacatgtaatcacaccttctctaaaggatccatcatgctcaatatctgacttatttgggtagtaaaagtatgggttaggggtaggagtcaccgctgctgcttgggggcaagagccactaccgtcgctggtcgcaatagccccgccgtcgccggtcgcaatcactgcccctgccgccactctatgtcacagccgccgggagaagtggagactgcacgagtggggaatggggatggaggatttagggtttaggtatggtctttggaccttgtgggcttcacaggccacacatgtcaaaagcccattttcattttatctctttatccaccgctaagtgcggctaaattccggtgttttagcggctatctccggctaaatgcagctattagcggccgataatatgtagcgtcaaactccgctatagccggagatttagaacattggtcttgagggatgtcagtgctaaaaccattttgctttgtattcttcaaatgattgatacggttacttgtagttttaaaagacctcacattgtccatcacgacaaagccttcactcactatttattattgtatttggtcctttagtgctaagcaccttggctgtcagcttgtccttcaccaccgcatggtccactatgacggagcgaccgagcattgcctgctcttcactatcttgccatagtacagtgaagttgttagttccaacgatccagttgtcaacctccacttgttacaaatcgatcgtatatatgaaaatctatgaataaatcaatgagtattaatcaacaccataagtggtatatactcaaatataagctcaaatggaaaggtcccaattaagtgtatgtgaataacctgaatcaaatacatgcataaataaggtataggatttgctctacataaatctatgcatacaaaatatttgtgtgaagtaagagtatgcataaatagagatgagacattgggagtttattgtcatgaccaaaaaatttagccaattttcatattattttgtgtattaaatgtctatccttgaatcaagccagggtacacaaaatggtaaattaataagcagatcgaaacgtaaataaaacataaatatttatagaagaggcacttagtcctcacacttaaaagaaattagcaacggaaagatgatcctactgtgacttcagctccattctacattagggtataagtcttagccctttaactctgtcttttaaatttaggcacttaacttctaaaagggaggaaatatattaaggttgagtaccaatcactatactcagcaagtcacaccaataatatagttgtgcaagggaagagaaagggaggtttatggatcttttgtataaagacagttgtgtacatttgtagtttaaaacagtaaaatttgattaattaaggcaagattaatctctactaaactacattacaccacgttgaacaagcccaaccaacaacctgaactacaccggttcattatgtaaagttaattaaggagcaggactaatcatggtgaaactggtcgatcgctcataactattcgactagttttactttggccagcgatgtatagttgtactcacaagacacaatcccctgtcatgtcaccatgcttggcttgacacatcaccatgcgagtgattgtgacaagacccttcacataacttacctcaagccatttacatcacactgcaggtttcgcccctacccttggcg

SEQ ID NO: 8720 - DNA, 17450 bp, Oryza sativa
tgcagcccagacagggcaatgaaacgtgtaggcgatggaaggggaactgtggaagtccaacaaacacgggggccacatcttaatgaattggagcagatgcagatcgagatagtagagccctagagattaatttgtggcagagggggggggggggggagttcgatcgtatcctggggaatcaatgatggccatcaatacctaccgtgccaggcccggccaggccaacaccacaccccctgtggcaggcgagacacacgcatgctttccccctgcaccccggccggccggagctccgccgggccaccatccaccacaaagtacctagttattgcaaccccccaccgacgccattataatggccgcagctgcagcagaccgcgctacctttggctttgcacatatatcacggtatgatcgtcgatcgatatctgcgtgcatatgcatatggatggaggagagagatggacggaccggggctggagtccctggacccaaccaccggccggcatggcaccatgcaggtatgcatgcagcaattaagccaaccacctctcctttatcatcttcatcatggatgcacggccggcacccaattcaattcggtcgtagctagcatagcagctcaccccctctcttgcattaccattctactcgaatacccaataaaggtggtgtttgaatcttttaaagataagcattaaatgtttcacgcaaaaaaaattaaattgagtttaaatttttcgcacgaaacatgccatttagcagcttaaaaagcgtgtcatttattaagggtttcacccattgttcccaagatatactgggcgcacggaaaacagaacggtccattagcgcatgattaattaattatttactaattttgttataaaaatggatcattatgatttttttaaagcaactttcgtatagaaacttttttaaaaaatacaccgtttagcagtttgaaaagcgtactcgtgaaaaagcgagaagtggtagttgggaacacaaggtttcgaacgcagcctcagatgcataaatactataaatatatccatcctcatttgaaaaaaagaagtagaaaatgaaatatgctcaagacttttggattgagcgagtactaatttgtctagcaacctctagaaataaactctctagagcaggtacaatagcaggctataagctagctataaccacataacaagaagaaaagagaagagagagaaaaaagagggctactaatttatagccagctgtaacacggaccccaagacgttatgtgtgtatgagaggtgggatcggatattaatggtgtagtatatttttatagttaactcttgtatgaataggctacttcctccgttttataatgtaagactttctagcatcactactagaaaaagtatttttccaagcggccaaaagtgatttttgcaggtggggggttggaccgcctgtagcccaacgactacgaaaatctaacagcccgcctgcgaaaatccattcagaaaaacaaacaaaaaatcacgaggccgccgccgctgccctcctccggcgtccccgcgccgggcgtcgtcatcgctgccgccccgcgccgttgtcgtcactgccgccgccaccgccccgcgccgtagttgccgccgccggcctcccccctccctcctctggccagatctgggagggagggggtgaagggaggccgccgccgcggccctgcacgtcgtcgtcgccgccaccccacgccgtcgtcgccgccgctgccccgcgccgtagccgccaccgctgcccccgccggcctcccccctccctcctccggccagatctgggagggagggggaaggggagcggaacgccgccgccgcctcgcgccgtactcgtcgccgctgtccacgccggcctccccctccctcctccggccagatctcgaagggaggggggaggggagccgccgccgccgccgccggccttccccctccctcctccggccagatcagggaggggagggagggaagggagccacgccgccccgccaccttccacgccgccccgtgccgtagccgccgtgggagaggccggccttggagaggtgaggtgaggagagggccggccgtgggtgagggaaggggtgaggttttgagacttagaaaaaatctagggctcctatccaagtctatttatattcaagtctattttcacaggcggaccactgaagtggcgcctgtgaaaatcacaggcgccgctaggaggtccgcctgtgaaaatagatttttggactggcacattcaccccgatttatatttttgtaggcggtcatttggctctaaggtatgtccgcctgtgaaaataagacccccacgtcgagaaaaatgctttttctagtagtgcatcgcccttattcatatagatgctaataaatctagacacatattagcatctatatgaatgtgggcaatgctagaaagtcttacattataaaacggatggagtattaaatcagctatagatgatttggagccaatatttggctatactgtaaacttgctcttattattagagagatttttttttgtttggggggtatataaaattatactccacttgtgtatcgtgtattcattcattcatgtagttgttttaatttacacatttatatatatgtgcttcccagcaacaaaagaggacactattaaatatgctaattcattgcttgacctggccggcggatgacatggaggtagttgacaacataatggcatatagtaaaagatttcaataaagaaattaataaaccatgcatggcatgcaataggttgcatgatatataattctaatatatatataaactgtatagaatagtatgttggggaactctacttggcaagaatttagaaactaattttgtgacaaactgcatatagcataatataatttgctctaaaaagagcagcacttactttaatatgtttatagtagaaccatgacaatagtagtagtagctttatccgtcacacattgaggtcttaaactagtagtagtagcttttatttatttggcacttgtcttaatttgatctgtttccatctgaaacttctcctgctcccagctgaaccagaattatataggacgactagcatatactctttgccggcccgttccggaacttggagagaaaaatgttttggaaacaaaatgagatcatgatgaataatctccggcagcaggcatcaacggcaccaaccgaggttgctgtagcacttccaaacaacatctccctcgattgcatcctgcccttccttttctgcccccttttgggggccaagtgaaaaaaaaggtcgcatcatggtgtggcatagaataatacttccttcgtcctaaaatgaagccatttttgatgttagcatgggtattaagaaagtaggtgagaatgattggagaaagtgtgtgattggttgaaaagagaaagtaggtgaagaagaatggttgtgattgattgagaggaggaggtaggtgaagaaatagcttcattttaggacaagacactgtgctaaaaatagctatattttaggacggagagagtagataagctagtcccgacccccctcctctcctctcttgccccgcctatataatccccaaacatcgctttctcttggagtaggagaagggtagtagtttaagctatagctctaaagacatcaccatgcaacattacttgcgttattactatacctatccaccacctacacattttgtcatctccctctctctttctctctgatctgtctcagatgtttatgcacatatacaagttaatagttctgtggatctagcaatcccggcttgtttgtttttgctgctttggtttgatgatagctagatatatcgagagggagatgaccagtaagcttggaagaggaagaaagagagctgctaggcttgttgcggtctttttgcttgggtaaaaagaggtattggcgtgcctcaatccgaaggcatggctgattacaggcacctcgaccgatctagcgcatgcagccatgtttcttggattgagccgcgtcaatatctctccttgcttccttacttcatgtactgtgtcatgctcaagcatatgtcccctctccgatcttcctacctcgtcgagttcgtcggatcagttcccaaattaaaggtgttatatatatatatatatatatatatatatatatatatatatatatatatatatatatatatatatatatagtaaatttgtttggtgctccatggtgcccgggcaccattgttgaaattgagtatatacccaattcaaatgagtatgaaactttttcaattacctaggtattaacattaactactttactaactagtttaaagcaagtttgaactgaatttgaacttgtttttgttagattttgattctaggtatatagcatccatacatataattagttaggtatgtaatcatgtattgtgaaataaagttaaatttgagttgttttgttgataagtataggtatgaatcaaattattataactaggtatatactcacaatttgaaaattttaaaaaatttgagtgattttgtgcattagataccatggtgcccgggcaccatggtgccccatatgagtgtcctatatatatatatatatatatatatatatatatatatatatatatatgcttcatcttttctggggttcacgagtcacacagactagctgctttagaagtagtactatgtattgtgcatgatgttcacagttaaatctgcaattttttccatgctggagtgtttttataggtttgcggaaggaattaagttgaatatatatagctatataattatatatatatttatcttgcgatcctgagtcttctgacattttccatccaagttgtaggtctgatgcatggcttatttcaagatgtagtttctggtttgcttactaataacatctcttcaggtattcattaattaggaactactatactttacctactggaaggaggatttgtttaaatctataaatttgtgctggttgcatcctcaacaataagttacactgatctctctgaaccaagtacttcctctagcagataatatatgaagttagattttttttttcaaggtccaatgcatggcttaaatcataattttatattagataaatattataagatctaataagtttatgagattacaacagtacttattggtgacggtcaaaatttgaaaaaaatcttattacaaatgttaaattaatatttgtgaccggtgggagcatgtatctatcttaattatgtgttttgggatgcttttattatatttttctgcataataaaatattttttgagctcttttcattctaatccccccctccccccccccaacctgtgtgtgctcctaaaaagattgttccctcttatgataagtaatactccattatttcaaaattaaactaacgtatgccatgtaaaggaaaatagagggattatatatacggttatgcttctaacttcacacaagtttataactatactagttaggcacttcgtagtagctcacacataattagacgggaagatcttggatgaattgtattgttatggctgtagatttgcatttaacatcgttctgcatattaaaaacccaactgttctgaatgttgggtaatttagagctcatctattataagctatgggcttaattatgacaagttggcatatattaactatgaactattaaaacataaaaaaaaatctgtaactgatagtctatactgaagtagaacaaaataattacaattttcaattttataaaattattaaaacaagaaaaatgatgtaattgggaccccaaaaccgcgtacaactacgtattattaacaatttttttattaaataatgccaactctataattgagtctccaaacacgaaacaattcaatttttattaatttcaaattttagactcctcgaagcccttgtagagcaaaagagctgcacgttaactcctcacactacttaaaaaaccatttttccaaacggtcggttcctatttttgcgtgtggttgagccgctcatctgccctaaaatgtctgcaaaaatcgctattttttcatgcaggtggcgcaaccgcatgcggtaatttgattttcgcgtgtgggtgcttatgtcgtcctcacgcaaaaacaaaaaaccaaaaaaaaacaaaaatctcaaaaatcaaaacatcttgccgtcgacgctcgttgtcgtcggtgctgccgcccgccgtcactgtcgccgagtatgtgtggggttaggctcctctcgtcgtcactgccagatccgtgcggagccaggtgagggacagcccccgccgagcccgtcgcctgctgtcgagccgatcgtcgtccactgccgcaagctatcgccatcaccgagttcgcgtggggccccgctccttccaccgccgctggatccgtgcgaggctaggtgggggacagccaccgtcgccaaatccgagtgggcgatgacaccaccgagcccgggcgtcgcccgctaccgagccaccagccgctacccactaccgagtcgtcgccgccgctttggaatgagagaggggaggaatgagaaatgagagagagagagagaggaggtgtgaatgagggagaggaggttggagaggaggggagataataagggacttggaaaaaattgtagtgttgagagggaaaagaaggcaagttagaattctagcggatccccttaagaggcctgcccaccaaaatatattttctcatgcggtcctttaaaagatccacatgtgaaaatatgctcatttttttatgtgagtaagttaagaggtccgcttgcgaaaattgatttttgcatacatgcattttaaggagccgtacatgacacggttaattatggtccacttgcaatttaaaggggtctcattcacaaaaatcatttgtatagtagtgtcactagctgtcgtcgttgataattcatgttttatttgtggtttctctcttttctatatatttaatatgctctatggagaactctttaattatgggaaaataagatcgatacttgaataaagatatatatagatagagagagtgagttttccattcttttaggttgacggaaggattgctatggtttttctagaactagcagaaagaccaaaatcgaaacgaatggacattagtatatacaatttggcttggtagtggtacgagttatctcttggtgtagcaagaaggaatttttttttatatttatatttatttttaaaaatatttaaaaaataaattaccattttaaagtttggcaaaaatatactcctcccgcccaccctaatagagggagagaagggcctaaatgtaaaattttctacaacacataagacgtagttttgtactaattgtaaaattctcatatgatgtcggatgaagttaaaagtttatataaaaattgtagagctcgacgatatttataactttgtagttgacaactttttcattaaaataatttatgggtcataatatttatatttatatttgtatttagccccctctcgtgggttttcactaatctgaaaattaatattgattatttcatgctttaatagttttaaatgaatgaatggctaagtacaaaattatagatctcgtcgagctctacatctttgctatagagcttgtctccatcggaggttgtttaaaatgtagatatgagaatttgtaaaaataaatctaagacattataaggaatatttggacccataagttattttaatgaaaaattaatcaactacaaagttgtagatcttgtcgagctatataattttcatgtaaactttaacttcatccgacatcatacgagaattttacaatcatacaaatacttcatgctatgtgttgcagaaaattttacatttagagggtgagaaggatttaaatgcaaatatttttgaaccccgtgctgctacatcacataaatcgctctctattagagggcgggaggaggatatttttgcaaatatttgaaacggtaatttatttttgtaaatcttttaaaaataaatataaatataaaaaagttctagcaagaagcagctgtatgggtggtgtgggtcaattgggttgggctgcaaggaggaggggttgggttggaaggggtctataatagttgaattggatacatctgatttacgcatttttacatatatcttattgaattgaattcctttttgatgaaaaaataaagagcaaccatgcttctacagtagttgtgactaggggtgaaaatggtacggaaatggacggaaaccatcttttatcggtttcgttttcatattttttttcggaatcggaatcagaaaccccggatacgaaaacggaattgaatattatcgaaaccgaaaacgaaccggcgcgaatacggtaacgaaaatttatcggaaaaaacccctcaaactgataaatccaattgtcaagtctcaacggtcaacaattcatcataaaacacaatcatataagtccaattgttaagtatcaacggtacatcacaaaacacaatctatggaataaattatctatctttaaaagagtaatgctgttgataaatcctaaatgcaggaaaaaaatattcttatgtaattttagatttgcataacaaatattttttaaaaaaataacagccaaacaccatggtattcaatattcaatgcttaagaaaaaagaatccagggtatttcagttacaaaaattccagtaattccgagaaaatttccgaaaagtttctgaccaattctggagttccgatggaaactgcccatctcattttttagtccgttaccgagaaaatattgctgaattcatttccgtttccgaaaaattctgactgatagattccgttttcaaaaataggttcggaatctagaaagttttcgtacagttttcactcctagttgtgaccatatggtgcgatcagatccggcctgcattcatcttggcgattaaggcctcgcaagaccaagcaaagtagcatgcatcccaataaaagtaaacaccaaggtgatcttgacatccggtgatttccggcgaagcggcgtactatattccggcccccatcatttgtcttttagatggaacaagccaaatggcatatttataaaaaaaaataatttgtgaataaaacttttatataggtgttctaagcgatctaaaagcaaaatctgaaaaataaacttcgatgaaaaaacgttaaaatcaatttcaaatttatggttgaaaatttaaattttggctgataagcataagcgaaaagatgaggctgtcgatacgacggcgggtttcagattgatgagtgttgataccaactgtaggaccaagcaacgtagttgagaagagttattgttccacatagtatgtggtattgaaaccttggaaactgaagcatataagtagatgatagtataaacaaactgaatataaatgttgttagaatgcattttgttggaccaaaatgctgcagtttggtgggaaggaaattggaggaaatgactgattcatgtacatcaatacaaattgatggggtagagccgtagagggatcatcagactgcaggagaatttttgggaggaggatacatggggcaagagaaataaatctactcatttattggttcaaaacataactggaaatgtaaaccgaatttattcaagaagggtacaatctatttgtgcaagtaccctatatatactacttagatagcttttcagactgaaaatgtaatagacaaccttatcagagtgcttaaattcagagcacaaatggtaaaagagaataggcaaataggcattccttccctactccttcagaaacatttttctctaaaagagaaatagcaaattgaaaattgtagtatccggaagaaagtttaccatcactaccatgcaggaacaatgtgccaatatgtatgcatactaaaatgcgccattctgctatttttcttaaattcttcatgcttcccaatttttacttgaattttcgaagcaaacttaatagttttaaagcaacaaaaaccaatttccgagtttataaaaatgataaacctaaatataatcctctccttctctttgggccgaatctgacccaaagctcttactctttcagcccgtgcaaaagcgtccacttcttatacccctccactcttctcctgaaaaaaaatgcatactaggtcccttatttttacatcggattacaaagtcatccctcaacttagggtgtgtttagttcacgctaaaattggaagtttggttgaaattggagcgatgtaacagaaaagttggaagtttttatgtgcgtagaaaagttttgatgtgatggaaaagttggaatttttttttaaaaaaattacaactaaacacggtgttacaaaaccaagtcactctagatagttttgaccggttttatccgatatggcagctgagtcagcgtgagaccgatatggccagctaagtcagcgtgagacatgtaaaccccacgtgtgagagtaccctctctctcccttcctccttccccatctctctctctctcccacttttctcgtttcaagaaaatttcatctgggcaggccagccgacggggcgatcgaggcgggagaggaggaggtccggcggcgcggcaatgcgggagaaggggcaacgcggtggtggcggcagcgacgcgggagaaggggtaacgtggcggcggtggcggtggccgcgacggggcgcggaggaggaggcggggccgcctgctggagcgtgcggatgcggctccgtcgtcaccgccggctgtagagcgtcggcgcggctccgtcggccaggcgctgcaagaactagcgggagtgcgcaggaggaggagccagacgatgaggtggcggcgacgatgatgtccggacaggttggttcaaacatgaacctagacggcgagctccggaagatcaaggaccaattcgcgacatggaagaaagactacaagtctcggttgaaggagaccaaggtaaatattcagaaggttggtgaggagaaatgccggaaaagatggcgggggaagaagagctcaaagtgaatgcatttaatctaaatccgagtgcatttcgcttcattccctgctactgcatcaaagacgagacaatggaaaagactggggagtgaaaagattgcagcctcgatgttgaggttcttgtcttcctcatcacaaggctgacaagatgacgacgacgatgagctccatcgtcaatggcggtgctggtactcgtccggagttcagcttatcgaagaaaggattatatatgtgaaagcaagaagtctgtacatgcatattagttcttcgttgtcagtgcatgtatgccatcttgtatgtagagagatgaacctgagatatggaagggtaattaaatacagattatccgccatgagcgaatagagataatgtaacatcagtcctgtaatatgtgtacagtaaaaaatcatcgaatttgcaaggtgtttttactccattcctgccttgtctgcaaatatcttgtctctgtcgcaactgaagtctgcaaaaagattgttccttcagaaatctgaatgatgaactctggtgtactttttccctcttctcccatccctcgtgggtctccttctccccgttgggccgcagccgcccctagcctcctcggcccgcagccacagtggcccagctccccttcccccctcctctcccgcacgtggtctgcgtccaccctgtcggcccacgccgctcgcccctgcgcggaccagccggcccaagaaggcgacgcgtcatcgtcttcctccagccgcgcctgttcctctctcccccggccgaacccgagtgccgccaccacgcccatccacctcctcgctcgtttccacttccgattgattgcaaaaattgtttcctggcattgtggtcgtgggcattattacccccataaaatccctttcagcggagctttcaatcgtcggtttcaagtgcaacaactccaccacggccggccggccggcaagcttctccctgccgttcccgtcctcctcggcctataaggccttggtaggcacgtggggaggattttcccgggaaacgtcaccagggagggattggatggatcctctcccatcaccataatcccctctacccttccgtccagaaatttaactatttgccacttttagatttaccaattatttaaatatccttcaaaaggtttgtacttaaatttttttttgccctgcttaatttttttcccctctaagatggtggcatcttaattatttgccacttttgtctatctggcatgccaactaggggtgaaaacggtacggaaatttccgagaattccggctaccgtttccggtttgcaccgaccgtttcaatcggtatcggtaattgtcggtatcggaaatggaaacggtaatctttttcggaaatggtagcggaaatgatatggggttttttccgaccgttttgtcggtaaccgttttttatcggtaatttccgtcaaatttccgacaaaattccgaagaaggaagtcggctgggcctggctagcaggaggaggagcccattaggcattaaggagcagcccattccgaataaagaagccaactaggcctgaccgcatcgtcgtcttcatcggcgctagggcaccgccgcgccatgttgggcgccgccaccaggtcgccgacgccggccgcaacctccttcgccccgacggccttcgtcgcagccggccaccttccctcccccatgctccatcgccggcttccgtgccaccgagccaagcaccgagcgccgccgcaccgccccagcctcctcctccccaccgatgccgcccctttctcctctctccttcccccaccgccgccctgcgccaggccgccatctccggcgcctctctcctctcgggcgcgcgtgaaggagccaaaggcagagaagagaacgagagagaaaacagagaagaaatcgagagagcaggaaaaggaaccgagagaagggaaggataagagagagagagaaaaaataaaagaaagagaggaaaagaaagactgtgggatccactggcgggccccaccatcttgactcctctctgtgatcgacctggaaataccaaaaagtctagtttagcatgaaacttaattacaacagtagttatacagtgtcaacataaaagttcttatgcaatgtgccactgtaggacgacgatatagctatgtcaattgatgatgaaataatgaatgatgtttgacaaggagctgatcagctgaagccatgccagcttgtgagcttggtgttctcgaagacttcaaatctatatcctaaaaaaagtcggacaatattagttatgctgtaatcctatcatgtaagccacattgtatgctttagccacattgatgttgaagtatcattgaactttatttatattatttatcaatcttattgtcaacttattaatcatcatataacggtgttgtgtggcagcgtaatgatgcaagggtgaaattataaggtcatcttcatacatagttaaatgcgggatgataccacagttcgctgtttccgacatgaattttcgacttccgtccgatatcggtatattcccgttccgacggttccgtttccgagataccgatataaccgatatcgttaccgtttccgagtataccgttccgattccattttcgagaaaataaaatgaaaatggaaatggtagagggtttttccgaccgtttccgaccgttttcatccctaatgccaacaccgtgtaaaaatcgacgtgggacccacttatcaaccgcacaactctccccttcctctctctctccggtctgcttgtcggcgtgctcctctctttcccggcggcggtagtggagcgccggctcgcggttgcggaggaagagggggagtcaagcgctgctcctttctttcccggcgaagaaccatctcggcggcagcgacggcatgctggctcgcggcggcggaggtgggggagccatgggagggagagctgagtgccgccacagtcgaggatgggtgtacgcgctgtaccagacgtgcgagatcgtgctcacgtcgtttgcgccgacgatggttgccgtcctcgccgaacgcttgcctgcctccctcgccagcaagccatggaaggaggagggggagccgagtgctgccgcgagtctgacctccgcctcgccgtgctcagccgcaatcacggcctccaatcggccgatgtggcctccctccctcgccggccatccaccgacgacgctgacggctccgcatatctggtcgacccgtccccgccgccaacgactccatcccccgcggttctgagcttgccgcgctcttggcgaatcgcgcggcgaagcgaaggtcggactcccggcagggctcggctcccccctcctcctccgcaatcgtgagccagcacgccgccgccgtcgccgggaaagagaggagcagcgccggcaaccgatgggcagaccggagagcgagaggaatgggagagttgtgtggctgacaaatgggtcccacgttgatttttgaactgtgttgccatataggcataccacataggcaaaagtggcaaatagttaagatgccactaccttagagggacaaaaaaaaaagagcaaatctaataagagtatttggataattgacaaatctaaaagtgacaaatagttaaatttcccgattacaaatggcagggaaagctaatgtttgcttcagacttcaaacttaggccaaacaacattcaacactgctacttaatcttcatatcatagaaagtgccatgataactagaaaacatatagtcttgaaatttaaaaatagctttaccgaaaatttgaaatatcgtaaataaaaaagtaaaacttccggagaaaaataagaaaaatctgaagactgcctcaaaagattctaaaaattctcaataccacataaaaagatctaaaaattgcttgatataagggagagtgtcgaaaaaaatcaatgtactgaactggaaaactaaaacattataagggttactttgcatctttgttacttgcatacattgccaacctgacgcgctcacgtggcattcacgttggcataaataatatgtgacatgtttttttaccagatttgcaccctcaaacaaattaaatgattaatttgagcaatttataaaatgagtgactaaactacacccatcttacaagttgtcgtaaatgtgggtgtattttcctaaaaataattataattccaaggtgagctgctaacaaaatgtcaatcaaaatgtcaatggagaccaatcattcacccattcgcaacacctgatttactcatttttaacatcatatccatcagcacgatcaactaggataagtacactgaagactaattacattgcatacaaacagaaactaagagttccaaaaatccaaattctccataagtgcaagaacaaaagcacattactgcaaggctattagtagctccattacctgcgagagggagaaatgcattattggcagtgctctgcattgggcactaatccacgctatgaatagttagccttcaagcaaggaaaataaggctgcaagagttacagaaccaattttggcatgcaaatccactatcacgcacatgtccagactgaaattaccggagctaatggttaaagattaatcagtaactttctgaagttattagatgtatgtcgtacctcattgtgcacatgtatgatctaggactaaatatcacaagaagttgaagtcagtactgcagaagtgcatatcattagcacaacaaatcaacaatatgagtacaaaggactatctaaatgtagaccgcacctttctacgctaacatatagagagcaattgatttatgccctagtataaattccgaacagggcatgtcagtcctcactcaagtctgtttcctcttttgaatgtgaggtgagtaaaatgcatagctctcaaaaatgaaatagcttacaaaaatcaagcaaattttagaactttctatgtggtattcagaattttcagaatctttttaggcagtctacagaatttcttattttctccagaatttttttattagctcataatgattaattcatttactgaaaacagggcatggcagtagcaattgattgaggccatgtcctgtttggacttttctctatatgtttgtaaaattatgaactcttttcagtaaatgaattaatcaagaacacacagaaacgtttttttgagcttccatttttatgaaaacaacattatctacaatttttttttatgaaaacaaagacaatcagttttcatttggatgtttagcagcaaacataatagagaaaattctatttatgcacttataaaaattccaaacagaacatggcctcattcaaacctgcttcctcttttgaaggtaagtgagtaaaatatagctataaaacatgaaatttcttttaaaagattcaagttctttaatatttttttctgactttactaactcaattggacctttgaaaggtaaggtgtaatctgttatatgaacgcaaacaaacttgattgcattttgcgccctagtgcaattcaactacaagcaatcaccaaaaattataaccttaactcacccataatacacacatactgcttggtgaatggaataaaaaatagaagcagtagctgattcacgaggaacaaattaagcagccaccttaccaatagaaacgagcttggcagctaagtgagctaggttggcgaacaagcccttcggcctctggatcccccgaactgcttcaactagacagaagagaagatcatgtgagaagacgagagcggcagggacaaaccaccaactgcttcaacaagcaatgatgtaacagcagtaaatcttttttaaaaataatgaatttaaacatatttccaacttattttcaaacttgaaatgcaatgcttggataataaaatttgtgcatggtttgtttatttatacacttctaaaaattctaggcatgattacgattaaatcttcatttataatatctcatcacttttctttctataaagctaatgtccactaaacacctaaagctcaacatgcaagcatatagtaattatatctacaatttatttcattttaaaactaaacatatacatgctaaatcatcattttcaaacaattttcataatatttcaatccaaatattttcatcatttctctattatctaaaatatatcccgcaacaaagcatagggcatcatctagtttatattaactcttctgtccacacgaacagcaacgaggagaggagcaaggggtgtactggtgccgtggatctgggcttgaagaagactgcttggactctatgcagcacgtacaacgggcaggaagggaggaggct

SEQ ID NO: 8721 - DNA, 16304 bp, Oryza sativa
tctagaggaataatattataagccacaacatcctctgttctttctgcatctttttgcatgactcttttcatctgaatataacagaaagggatgttatttatgcacaaaaaaatatatgaaacattttattgatctcaaaatgggttaaaaaaggagcaaaacgaattcattcaacagtgctgtttgaactcactgttaactggtaacaaaacattcgagaaaaggtactactgcctgcggacctgaggttatttgcattcaacacatcatactagcaacaaaatgtcagaaagaataatattccttgccagacagaaattattactttttactgttcagagaccagaagatacaactttgaccaacaaacaacattatgtccataagggttgtgttattaaagaatgttctataaatagcatggacagtaaatatactaacgtgttgaattccgattgtcagagcaattgtcttgttaattttacttatttgcaactagaacaatactacaatagtcttctagtaaaagctactacctgcgtcccagtatataaggatttttagggttgaacacaattattaagaaagtaggtataattaaatgggggaaggttgtgattagatgagaagtggaggtcggagagaaaattgaatgatggagggttgtgattggttgggaagagaatgttgcagaagttgttacattttgggacaaattctaaaggctaaaagatgttatattttgggacggaggagactatctatgatgacaaaaaatctatacatatgcgaaagtggctatagcctagcggttacagtgctcaagtagcacttctggtcctgggttcggctccccaagagagcgaatttcaggcttgaataaagaaaaaaataccatgggggcctccctcactgtttccattcaaaagaaaatctatatacacataaaagtacatcacttcactcttataattttagtgaatacattgatacactaacactttaccagtatcttactgcagaccagtagttaaaacccattccatactaaccactcaaccataataccaaaatacatggcatggagagcagacctatttttgtttcctttttttttaacataattgaaatttagtaggaaaaaaatagcatgaactatatattatcaaggtgagcaacaaaaacctcttcagatatcaacttttctgcatcctcaggtgaaatttcccttgttatttcctctataactgaccataagaccttcaaagtagcaaggactttcttgcgcttcagagttttgcgttccaacctactcaaacaatcagggtggttaaatcacatactatgggtgacatttaatgttcaacaattgtgcttgaaaaacaagcatcttgaaaaaaaattaaactaccaattcagcattttagctaagtgacagacataatttcatagagaaatacatactctccaaggttaccgctgaacacagcagattctctcaacttcatttcatcttcacacaattcatcaactttatgcttttctctgtatagcttataaaattcctgcagtttagcaacatcctgacttcgatctatagcaccaccttccctttttgctagcttttgctgaaaaattgagatagaaataatcacttttagaaaaataaaatttaaatgtcaaacccatctgcttaatttgtataattcaacaagccatggttccggagatgtgacgtgttgtaaatgaggaggactcacaaggcgatattgtatgttaaaacactagagcgctggccatatgaaataaacattgtaaatccatcacaagaacagttcaaaatgatatacttttgtagcgctggtagagcataagattgtggcggttgacaccataggtccatactatcattctacttcttaaaaaacaaagatgtgaaatcacttatttgtattgtattctctatgtatggcttttaccgacatggtttgactgtatatatgaaactcaataaggttctatcttggaggttgtgccagatgtacaaaataacatgtgattatgaaaaataataataaatcatatagaacagtatgaacataccctgataactgacattaaacctgttttgaactgcagtacacctctcccttcgctatttggatccagattttgggctagtgtgtatgcatgctcacatactgcacattgaagtataaacacaagaaattgtcaccgaactgcatttaaacttcatatgggaaagtgaattcagttgctaaaagctgactcaattcatatcgttgatatacccttcgattttgtggagcaaaagccataaaaaaattcattgccagattagtggctgaaaacaggaaaaaaccttaagcaaccaagcacagttcaccgataaaacaaccttaagctaacatcggtttttacctaaacagggataaatactaactaatctcctttgagttagtaaaagtttactattaataactgactggagaaattgccaaaagcataggcagtagtatcccagtacagagatttcagaacatagctggactaattatgggttgtttgcagcagattcagtaagttgactgattttcaatttagcttaatgaaaagaactaaagactgacaggtgatgcagattgctaattgcagaatgccggattgtaaggcactagcatacattggtcagtgtacatccaatcagagcaaatcaagtttgaaaagtcactttaaccatgtcaacgagttgattgatagcaaactcaggcgagtaggagcacgaaaccagtaaagcattagtccgactgtaacaactaaggccatgtttctttcagcttaagattattatgatctagattattgagtcagattactataagctagattgttataatctgtagtagaataagcggttagttgtttctttcctaaattattagagcatagattattgggtttgcaagtctaaagagggagcggggtggcatggtgggtaatttttcacccaataatctggaaaaagctcacctaaatgagcttatcagattataataagctggactccagattataataagctacttcaataagttgtctgtttctttcaacttgctcccaataatctggattataataatcccaagctgaaagaaacagggcctaaatacggtagatggtactaagcctgatcataacggttgacgaaatttagtagtacaaaaggctgtaacaagcaaaaaaaaaagcaaaagtactcctaatggactagcataatcaattcgtgtagccgatgctaactgcagaaaataccaggaaaaacaccactaagtgaacactactaataactgtataggtagggcaattctgagccgcggcgacccatacagctcacaagcctaacggagcgagaaatggtaacgaaacttacgaatcctggcgacggtagggtcctcatcctggatctcgtcggcggcgcgaagcacctcgtcgatgtggacgttgtttccgagagacgacggcacattcccggcgatgccggtgacgggcaccccgaaggcgcctgccaaccgctctccccgcagcgccgcccgcaccaggcgctcccagttcgccgccgccctcgccatcacgaggccctcagatctaaccacacgctcgctcgcacactcagaggccactcgtcatagcccctgctcaccaagctgcttgcgatcgacctccgcgtcgaagcggatgggagatcggagattcggagctagggttttccgctctcggcgcgcagggaagggaggtggccgtgtttcaggggctcaaacgaagaggaggaagaaagcgtggggaactggggatatgccgagactacttttttttctcctttttttttgagagtgcccttttcgcgtttggcgagaccgcgagacggtttgaaaccttttgatgcgactgcgatctggaacggggggcgtgtcagcatgtgatgccgcatcgcgcgtcgcacagggcagcccgctcccactgtcaactgtccccacacgagaatgggtctagggcgcaagagttttgcggaatttttatatggttaattaatgtaatgtaatcttcacaggttctttataaacagtatactagtagaattatcgttgattacctagacgcgtgacgattagagcagtacaataagctgacacagcaggctgcaaaaatttccacgtcatgctattcttacatggagaagagaaaaacgaaggagagagaataaagcgagcgacatatctgcagcccggcgatagcacaagttcccatgcggaaagctcgcgtgcagtcgatctcacggattaaaaacacatattgtgggcctcatcaccaccccttttgatcccatgcgccagattcatgccatggcgcggcactggtacttattttcaggcgacaacacaactacctacatagacagagttcactcttgatcatacgcaagtatgtgcatgcttaattaattcccggattatgaaactgtaattagcatagtatagccattctattgtataggttggctctattattaactgtaaaatgacatggatgtaattagagccaactactggctatactattgaccttgctcttagagcaggtacaatagcagactattagccagctataagcatattttaatgagataaaagataagagagaagagcagcgggctacagatctgtagccagctgcagcacggactccaagacacagtgtgtgtatgacatgtgggaccatatattaatagtatagtaagcaactattgtataaattagctattagattgactatagataaattggagttagtaatgggctatactattaaacttgctcttagaggtggtgtatctgtgccagtgccacctatgacgcgtgtcttgtggacttgtggtgtttccgcgactagtgtacgaaataattggcacgcaataaagacgtgaccaaagctacgcggattttgagtgcgtaaaagtcgtgtggtggatgggatcatgggaacacgagacagttcgttcgtcaaggctttcctcccggtgggctggcgaccgggaaaagctaggggaataagtctatttgtactccctcaacttttgtctttggttgaatcacgtccctcaaccgaaataccatgtataatacctccttcagctttgaaaccagggcaaatcacctcccttggtggtttagagggcgatttcatatgtcgtggcagctgacttcgatgactagctgagtcagcttgtgagtcccatctaccagcctcttcctctattctcttttccatccctcgtggcggcagcgagacaagcgccgaatgccggatggaggacgccaaagctcggggaggttgcggcggcggtgttccggctccgtccgcgtcggaacagtgatgcgcagtccactaccgcatccgcgcgctgggcgaggtaaggtggcgacactaccggtcgctgctcgtcgcggcggaggcacgccggatgagggagaaggaggcggaggcctcgaatgcggtgtgacgtggctacggacgaaggcgcttgcctaatcggtccaccgcggcggcgctccacacgcagctccagcaagtggcggtcgcggcacaagcgagaggcaaggcggtggaggacgacaacaacaacatcggcgcggcgaacaatgctgagtcagggttcatcgacccagatagagtataggaggtgaccccaccgccgtcgtcgaggctatgttggacatgttggtgtggcagtctctatcgggatgccggtttgtgcgcaggagaaggcgatgacgtgaatgaggtggcggaggagaggcgtgagaagggaggcggcggtggcagggagggagaagaagaggccacggcgatgccgaggaggcgaggatggggatgaggtggcgaggcttcttcacctctgctctctctctctctctccgctcatgccaagctcttgccgctccgctgagctcccgccgtcccgccgctcccgccgagctcccgtcgccccgccgctccactatcctgctgctcccgccgagctcctgctactccaggtcccgccgctccatcgcttctgccgccgagcttgcgcaactctctccatctcgctcgccgctagggataaagagggaggagaaaggtgactgacagatgggcccaaaatttattttattattttactcactgacatgtggttcccattcaggtttgtttttattttaataccatgtcgatgccacatgggatgaagactaagtcaacccgccacataagggccacgtaggacgaaactgccgagagagtcgatttgcaacggttttggaaattaagggatgggttataacctgttttgcggttgaggggtgcgattcaaccaggcgcaagagttgagggagacaaagtagacttattccaaatgttgaccagtcttatcgttagaccttcagataagtaggaacacatcctatgcaaagttttgggtgcacaattcatctacaccaataaaaataatcataacaaattctaagaaaaattgtagtacatatcgttatcattgtagggaaaaaattgggtaggttccatttggtgtgtggcattcggagagtttcaagatctccgatcaccaactgtaatctaattgaaacttggcggttaaaaatgaccggatgtagaacatgaagcccttacgctcttagccgtaatttttcacctccttggctgccagtgatgccgaagacatcgacggtagttggttgtggatcatcctgtaatgggcttgaaattgtccttcgagtttcttcaaacgttttcatgggatggagaaattagggttttgggaacaaaaaattcttaccgtacgagagatcatcactcatacatgggacttttggaattaatgaatgggccttagcccacttgaaaattaattctttggaaaatcacaaaagcccacctcgtaggatgacatgcatgtggagtttagtaccaccttacttattctaggataggggaacctccttaaaagggaggatgccctcctagccacttgaagcatgtgtggtggagagaagagggggaacacacgcgcgcgctcgctcacctcgcagggcaggcggcgcgcgtgcacgacgtaagcgtcgaatggtccgccaaaattggtccctcaccttgcgcagatgcagcctccttttgcagttttgttttgctgcaaattcggattcgtttttgtttttggaaacgttccgaaaaaatccggtgcgtacaaacggcgtggagtccggataagttacgcgtgacttatccggttcggttacgcgcagtggagatcgtgcgggctccctgatcaagcgacccttctctatataaaccgacccgccgtcttcacgcaacacacgcgaaatcaatctagggtttgcctcctactctgtgctgcgccatcgctcgtagattactccatcctgctcgccggcgtgcacctgcgattgggagagcaggtctccggaacctctgccttcgacgtcctgcaccgagagaaggcggcaataaggtttttgggaagcgctttgcgcgactgctccctgttcgtccgtgacggctcgtcttcctcttcgctcgcgtgctgcgtgccttcgtagacgcctgcgaaaagtttcgaccgaacagccggtctttccgccacctcggtacgtgttcaatatgttgcgcatatttgatctgttcatgttatattgtgtagtttacatgtgtagatctaataatgcgttcatgctagttttcgtctgtaatgtcatgatttatttatggaatatattaaatcattatatgcctataatctcaacagggacagtactcttatatgcgttagtgggacttggggccgggggtgtccaagaagaaagggaaaacaccttcgatcatagcgtctctctccagcacacacactctttctctctctttcacgtagacgaaggttggctactattagccagtttgtacccgctcatcttatggttgagtagcaaacgtatggtacagccattttcatggttacagactacggctcccatcggataccctattcagttaaaggaaaagtcaaattttgaattttaaacttaattttgatattaattttaatatatttttaacattattttttatcattaatttttaagttatcatgaacacttatataaaagttttacctataaaattatttttgttttctaataagccattttaacttattactagaaaatatgagcaaacaatgggactctactcgtttatgcgttggattcaaaccccacattgtgacgtataatgacatgacagtatgacacactctccttctcggacaccaattaagctgtacagacagttgaccgcttgattgtgtccaaagaataattattcagttactgtcagacaactgtttaccggtgcagtcttattggcttaacctgcacgagtgcagcaagcttagagcagtggtgttgtaatgctacagccccaagtcgtattatcgtatatacatcaaagtatcgaacaccctgaaaggatatgcacaataatctcgacgatggtcacttcagaaagaaaattacactggcccttacccaataataacccaaacaaacactcatgctccatagctaaaggactactctctccgtccaaaaaaacccaatccagattcaaatacaggattgagttatttttgagacgaagggagtacactatgtccagattcaaactcaggattgagtttttttttcaggacggagagagtaggagagttgcaaagatagtttctgcaagtcccacacccctactcaactcagtcactttgctagctagtactattgctctgtagtactccgtattgtactactgccaactgtgacgcgaaaatgtgatcagttatgagagcagtgacatcaaatgtatatttcttctgatgaatcgccataatgctggcgaaggcgactctgtctgtctgtcttctccccttgcatatcgttccgctatgcagtgggcctcttgcactataagcatcaatcgacggagctgatcatgattcatgagtagtagctgatgctggacgacaatggcgttgtttggacagatagtagcttaaagttcgtagtaggagtattaattgctttttttgtctgaatcatagcgattcattcctcaaaaaactgaaagttaacacagcttttcaggtggcgaaagcaactacagaaccgcatggataaacgcaacgctcgtcgtcagcagcatcccctttattcttcatcatgactgacacgatacaacttacaaacagtaaatcgtaatttacctctggtaccaggagaagtgctccaagctgtttttttttcccgaaaatgaactccaagttacttttagtgtaacaaccgaacatgttacctcttgaggcacggtaaatttctgtgcaattatattgcacggcttgatcgattcggggcatgcatatgaagatatgcacatccaaagcagaggcacgcatgcatagaaaaagaagtcgcaaccaaacaagcagatgcatggctagccagctgcattggcgtttggcagtgtaggcagccttccattcccgtctttgatgaccgagcaacccccgctgaattggaatggtttttcgtagacagacgttatttgtcgtatgggcgtctccatctgacggctgttccaggacaggatgggcatgcaagatcgatgctcgtgaaagcgacaagcagctctcgccgcgcaagagatgaagacgggagaaatggaaatgctggatttttttaaaatatattttgctctctttaaaaaattattttacaaatgtattcataaaaaacttattttaggaatagatatttttcttgccgccagtgatcctggcaccgagatctaacgtctgagcatcaacgatattagtgacgacactctcatccccataagccgagatacagaagggttagctcctaagaaattagcgcttaggacctatttgtaattttttttaaaaaaaagactacaatctaattttttattacaaacatgtcatcgacgttaaagttttgtaagattttttttacattttaatccttttttaaataataataataaatctttaacgtcgatccccttcacatcaacagtttggctattagggggatgactagacgagggtgtcgtcgcttagacattgaagcttgacactgagaaaaatggtccatttataacataatttttttacagtgatctatttataaactaaagctttcaaaaagtatgaaaaagtaaggccgtgtttggccctgttcactttgttgtcaaaaaaaccttaccaaattttggcatagttatcaaaattttggcaactgacaggattttttatatagttaccaaaatttagtagcaaactaaatgtagccacttttttgacaactttactaaaatttggtaaggttgaaaacggcatcaaagtgaacaggcccttagtttcccccctattcccaactttccatcacatcatatcacattaaaaactttcctacacacataaacttttaattttctttaaactttaaacttttttcagaaactaaacacaccctaaaacaaaaattctagaacggaaatgagtgatgaatggtgccctgcagctgcagaggataggagtatgggtggcctgaggtccaaatcagcagagggccgggacggacgacgtgtaaacgtccatccaggcgtccatatgattccgggcgggcaggcatgcaggccattgaatccgagtctgcgtcagcgcaatgatatctgctcctactacgcctctgcctgactgcctgcatgcgcatgtctgagttggacatgaacatgacctccatcgcatcgattgcaatcaataatcgctggccaggacgtactcgtacagtacgtgtcattggtctcctgtaccaccccaacgtagtacgccgcattcactgatccagcgcacgcacgaatgcacgatgtgatcaagatcaatcgatcgagccacagttttttttttttggccctttccccttgcgtcacccccggccgtacgcgcggccgtgcatccctgcgctgtgtttcactgtgtggcgtccatccatccaacaacgcgcggcgcgcgcggccccggcgttttgcacgcccttcgtccatccggcgctggaattttgtctggttgatcatcggtcgccttctcccccgaatgattggatttcgtatacggccggggaatcgcgacggattctggggtggggggtggtcctcgcggcggctctggcacggctcgatcggattcaagcaatgcaagctgtttggattgtgtgtatagcatcctcaatagcctggacctctctcaactctcatctgaaatgagatcgaccagttggcaccatcgagtggctactggctaggcagtttggtacgccgttctccgcgtacattttttttttggactgttccttgtacgttactactacctacgtatcttcggcacgggcaccggcccatctctgacgctgcactgcatacctcataatctcgacctgttacttgagtttgtgttgacagtttttgaccacccggattgaaatagtttaggaagtttttcagtcggataacacatgcaagctggcacagctgatatatatatatatatatatgcaatgacggcatttcttatcattaatcgatcgtgttattccaactccgctaattacaatcatcatccaaatgaatagtattaattagtttggttgattattaaacaaattagacacattattgccttattggactgaagaatttattctgctgatcactttggacccgcgagtagactgcaagtcttttgaggggactcctacgagcaagtttaatagtatagccaaatactaactctaattcatttatagtcaatctaatagttcattcatacaatagttacatactacattattaatacttggtaccacttgtcatacacacactgtatcttggagtctgtgctacagctggctacaaatttgtagcccgctgctcttctctctccttattatcttcttaaaatatgtttgctattgtacctgctctactaaactcatcatcatggtagcaatgtactgtcaattgtcctgctgcgaggttaggagaagctactactaattgtctagccctttaaaactttaggttaggcagacgtagcactcgccgggcttgcatgattaagggggtgtttggaagagaaggccaaactttagggggtgtttaggaactagggactaaactttagcctctctcacaaaagtataagtctctcccctagggacttatgtttttgagagaggggctaaggtagtgtttggttggagggactaaagtggggctaaactttagcccctctcacaaaaacataagtccctaccatagggacttatacttttgtgagggggactaaatttagtccctagttcccaaacaccccctaaggtggtgtttggttggagggactaaagtggggctgacttatgtttttcaaaaacataagtccctaccatagggacttatacttttgtaagagggactaaatttagtctctagttctcaaacaccccctaaggtggtgtttggttggagggactaaagtggggctgactcatgtttttgtgagagggactaaatttagtccctagtttccaaacaccccagtctctcccaaacacccccttagtccctctcataaaaatataagttcctagacttatatttttgtgagagagactaaagtttagtccctaatttccaaacatccctaagcttagctgcatcgacgttaacaatttctattcccttccatttgggcacctgccgtgtcaggtaggacatcttgaaccgggagggcttatctgcagggaactcatggcccatggggtgcccattcttcccaatcgtgtgcccgaataagaggtgcgaaagcgaaatggccatgcaaaagtaaagtgatgacgatgaactagccagagaatataatatccaaagactgatcattagctctaacactgacaacttaacaaaacaatatactccatctctatctcattagcacagacagctgcctttatttattccagataagattgtgttagagctgactagatatgtcgaaaaccacgttttagtttaggcgtcctgtgtatgcaaattgcgtgctgtgccgttgtgctgtgcatggtactactactgtagaaatatgaagtctggtcagacgagacggccgcatgcaagccagctgcagttgcaaatgcaagcagactgcaagctgcagttgcagcctgcctgcaggttttgcccttggctgtacctggcatggaggatcaaagtcagctggcggatataaatatggccgcaagcagcaagcaagcgtgcgacctggcttaccagtaccaaccacagctggtgcaggcagtatcagcagctcatctccctggagtatctatccagtatatctacgcatgtgttggtacgccatgggcaacgtgttggttgaattcgcgataagccctcacgttgactagtttaatccgtcaggctagctcctctcgcgcattccattcctaggggcttcgaccgcacatcgcagtggaggagccaaccgagggagtgcgtgcgtgcgtgtgtgtggactgctctgttgtgtgcgccgaggcaatttctttatcttacgggagacgaggaaaaggtgggcggcgcggcgagctactagcagaaaagatggcgagagagcggaaaaaagcctctccggccgccgtgccgtctgttcgttccattattccagccacgtacgcgtatatgacaatacggtgcactcgatgtgggggtagatagatggtagatgttccgatcatatagtataatccatcggcggacatcatgaactgcaatcatgtattgcatggatacattgagagcgaacaatcatgagcgagttagatgcaccaattattgctgtagaactaatttggccgatttgtcaaaaaatggaacccagggaactctgctacacacaaccgagtatatggagggcggatgaagatctatctgtttaagcttaatcgaaccaaatctaacatatcttcactgagctcaaaacaagtctcctatacagctctatctccccggtacacgaagagatgtctctttccggttacagggacacatcggaattctcttttccacgtcgagctgtgggagcattgttcgataaggcaggctcctgtaagagcacccgtaatgttaaatataaaacatatacatctcagcaacaaactagattagtattaaaccatctcaatagtatgtctacattggtatctatagctctctaatccattgcctcgtttttctttatagattatctctaaattagtagatagttttgctctctctccatttaattttttccaagtagaaaaatatgctgacatagatctcttgtagagagtctatagataaccattgcgggtgtcctaatccaaaaacaatcgtaatcgaagaaagaaagtactccctccgtcccaaaataagtgcagttttgcactattcacgtttaacgtttaaccgttcgtcttatttgaaatttttttatgattagtatttttattgctactagatgataaaatatgaataatactttatatgtgattaaatattttcaattttttaaataagacgaacggtcaaacgttggacacggatatctactactgcacttattatgggacggatgtattaaagtctgaactcggcgaccaataaataatcctctagcatatcagcacgatcgaattgtatatttgtttattcgcgcactgtcattctccccacgcaaagcgacaagcagcggctcggaaaacggcttcgtggctcggacatctgtcgacaaaagcgacaccccgctggagtcaaagaatgattgaccctcgtctcatggtctcatccactgcttcttcttcccctcatctccctgccccgaggcctctgggcccatgagctagaccatcattagccctgtcgttgacaggtgggcccaatgtcccttggtccctgtgggccccactggcaggcaaaagaggggaggcaatggactggtactgaacgttctaaaaagacgccgccgagtcgctcccgtccacggcgtccagctagcgttttgccgcagtggccaacaaacggccagcgatccacgggagcgacgcggattcgaatcatcggcattgccgcccctgcacttccactggagctagttaccgcccagcattggctctgtggctcagtggcgcgcatacagctcgctccactgacgtctgcttcacaagtcactgccatagccgcggaggtcacacttttcttctcgtgtcaaattaaagatgatgtgactgaaaaattgtgtgtgtatgacaggttgatgtgatggaaaaggaatgaagtttggatcaaaactttgaatctaaacacaatctacttttgagtaaaattgatcccatcagtgaggaatgatttattagcagcaaaaagaaccgttgcttgctgcacatttaaaacttgtggcaatgctaagctagtaagctcatactagcccgtaaaatacgagtatcttggagtgcaaatgtgcaatgacactattcaaccgagctatacgccgaccacgccattccatatcttcgaagcagaagttacccctaccttaactggtgcagttacgggtaagtgtcgcttcagatatgatttctcggaaggaaatcgtggggagtccatacgacatccatggacttcaccggaaagtaactccacctccagctccaagcccgggcttcttctagaggaaaggccatgaacccatcgttttctgatccaacggtcaccctgctcaccgggagcagtttgcagcaaattcaaattcaactgggtgaccccccctgcattgccattgcctctctctcctctcctcctttcgttcgtcctgcttctgctctccagctcaccgccagtgccgcccatcactcacgcctcccacccactgcccctgtccctccctcccctacataaacccccgcactccccctccttgttgcacgccactcccccctccccaccaccattgttcaaatcatatcacctccagtttttactcacaa

SEQ ID NO: 8722 - DNA, 36550 bp, Oryza sativa
cagactttggtttagccagggcatttggaattcctgtccgcacgtttactcacgaggtactatagatttgtgttcaacattttgttttcttcataaagtacattttttttcgtcataaagttcatttttcatttaccttttctatacactagcacattaactcacaatggatgtctatgggaagtatttttcaggttgtaaccttgtggtatagagctccagagatccttcttggatcaaggcagtattctacaccagttgatatgtggtcagttggttgtatctttgcagaaatggtgaaccagaaaccactgttccctggtgattctgagattgatgaattatttaagatattcaggttctattattgtactgagattacctttttttgttctgttaattgtgtttttgccaactctatgatttatgtgttgtgttctggttacttttgaagggtactaggaactccaaatgaacaaagttggccaggagttagctcattacctgactacaagtctgctttccccaagtggcaagcacaggtatgacaaaacagcataaagattttattaggcgggtgaactgcatccatatactgtgccactaatattccttgactgaaatcttcatcccaggatcttgcaactattgtccctactcttgaccctgctggtttggaccttctctctgtaagtcgaacaccactcacctttgttcattagcatgtcataatataccccaaaaaaaaagtatcccatccttgtctcgtttcactgtcagaaaatgcttcggtacgagccaaacaaaaggatcacagctagacaggctcttgagcatgaatacttcaaggaccttgagatggtacaatgaccctgctatggctttacattggattggcatatgtatgggctgggctcctcatttcattccttctgtgaacgctgtgcccttcgtttgggcatttttgtcattcagctggatatttcaaatcttgtgtgtttgatatgtattcaggaacgctaaatagatcaccgtcttggtctctatttgttcagagtaaatatcttccaatgctgcctttcagtttccattgaacctattcagatccaaatagcccttcgttgctgttacacacacctttctggtgttccactgggactggggtcaactgggggacacgcatcattggtgctcagcaagatcctttctcgtcttgttgcatgcgttcgacatcatcagaccagagtgccacaacgactgatcatgaacatgcactgacaaaggattccactaccaaacggaaaagaaaaataaagagcttccaaaagccgaaacgtgcggagcaaaatctgtagcagatgcgaaggattccacgagaatgagaataacaaattttgcactggttggcccctctattccatgcttgatgtgtgagtgatgtggccataaattagacggcagctaatgagattattatgcggtcacgccacgccacgccatgccatactcgaatcgaaccacaacttgaggtttccagctgcataccataccatgcctgatggcagcatgggaaggagtcgtcgtcgccgcctagtgatggaagtcgtttcacgtcggttaaagtggtgcactctgaaagggcaggagtagcgagtcggctactggggtgggtgagtggagtgagccagcagcagccgcgggggcaccgaaaggggcttgtcatggacagggaaacgccacttggaccgtcattgggtccactgctgcactgcgcaattgtaggcgcctagccggccaccatttcaggctctcagctcgtcacaagttctcaacgaaccctatgaaaacttcgtttcgaggctgcacgtttgcaatgtgagtaaataaaatcatttattgaagattacaattgtatttgcaaattcagttagctagagggtaaatctttttcagttacagtatctttcctaggaaattcataccgaattttgaatcatcatgttctgaatttgtactatcatacactacaaaattgattcagccactaattgtttaggctatccaagatttctgctaattatttcacagaaaatgcttgccatctctgcacggcaatagagggcgggtatctcgtccatccctcttggtcccgcactctctcgcgtggagcttatcttccaacggatacttgaacaaagctaatcgccttgtcagacacccgcatccccaccatccaaccccaactcattcccgctatataaaccctccacccagcgcagcggcaacaaggcaacaactcgcactcgtcaaagcagagcgaactctagtgaacaagcaagaggccgagacgccaacgcaagcttagcacagtcatggcgagcagcaggcggcagcagcacaagggttcgtggtcgtggacgtcgcgggtggcggcggcggcggacgcggcgtcgtggtgcctggcgctgtcgctggtggcgctgctgctggtgtgctcgctcgggcccggtggcgccgccggcggcgagcagcggggtggtgtggcggcggtgttgcgcggcgcggcgctgtcggcgcgggcgtgcgaggagatctacgtggtggcggagggggagacgctgcacagcatcagcgacaagtgcggcgacccgtacatcctggagcagaacccgcacgtccacgaccccgacgacgtcttccccggcctcgtcatcaagatcacgccgtccaagcccaggtagattaccacaaatcacatcgacacgggatatggactccatcgccactcgagggatgaactggtcaacgtgtatgaaacacacaagtgttcgtccgagagcatcgcgcaggcctggaatggatcgatgcatcaaaacgcgcgatctggattcgatcgatgtatctctgcaaatgtaactggcaaggaacatcagttctgatatgtgaatatacacgcgatcctagtgcaattctatgagtagcttcctctgttgttttggtccaaactccaaaggaaactcttgtttccttcggcatctgtttctcgcatgacaaggcggcggtgaccgcggagagagggacacgcagcggatggggtggtggcacgtaagaccaacggctacgtacgtcgtccttagccgtttcgttagcttgtccttacatgtgctgtgctacagttgagttgatctgatctgaggttgggtgtaccggagcagtacacgtgctgtcgtatgcaggctcttgcctgtatctaaacaggtgaaaccaatggaaggaagattccagctactccctttgtaccgttggagagaggctccagtgacagtggagacccggccccttcagttgccacttgccagacgagggccccgcgtcctcgacccaaacgtgcccgtaggagtaaccggcggtgcggtttgtcaaatttcatccggatttaatttttcaaaatgaagagaaaattcagaatataatcctgtaagtagtacttaaattgtaatactatttggtgaagaattcttttgtacaaaagagaaagttaacatagccaaactggtaatgacttaaaatgacaaaagaataaatgggattcttaattcaattgttgaatgcaaaaaaaacatagcaaaggtcatgccgaattttcctatattacatcaataggtcagttctacatgttctaaatgtctcctatatatattcttataattttcgccctaaattttctacgtactgcttttttttttttaaaaaaaaaataaaccaaactgctctggaccataaggtaaacgttccaaaacagtgaaaccaccgccggcttaaaaatattgaattccaattttttgaacgctaatttcacggggttatttgcgctgtattcatgataccatgggaagctagtgacagaaggccctattcagtggatgcacatcctctacagtactgctgctgcaatagcagtggctgacatgtggacccggacccccacattagcgtctgctactgcatcagcagtacggcagacaatccctactgtgattccgttaatctctctaacaagagaattaagggggatttagaacgaattaattccacatctattgtagcgtggagatattccaatcaatccctctaaactaacaaacagccaaacggtatggtaacctggccggtacgcgtgcaaccaaggcgatttcaagccacacgctagctgcgttcataacaggataagatagctcaaggtcaggcgaacagaaatagagagaacataactacctgaacctccctttcatgtaagctcagtcttcagaacaaaatcatggctactttatgccactctgctcataccagaacattcggaaagattggcaggagaaatgcagcaaaggtcctctgctcaacgcagatgccgccatctcagagcacaatcaaggtactgtgggttatgacattatgaatgttcttctctaatagcactgcaacttcctctgaaggcaaaatctggtggtatattgaaaaggttgttatcattggggcgacaaaagagattggaagaacggcaatagcggcagtaagtaaagcaaggggaatggagcttgcaggggccatagattctcagtgtataggcctagatgcaggagaggtattcaccattcactcaatgcgccatttcccttgtaattaggctgtctccctgctgcaatagctgcttgttctttgtctcttacagtttataaatgccggcattgttcttctagataagtggcatggaagaagccctggaaattccggtgctcaatgatctcacaatggttctgggctcaattgcacaagtattggcctcttcattgtactataaaatgcttatatccacttgtacagttgtactgttatacacttcacgggtttgctatttgaaacttatgttctttcagaccagagcaactggagtggtggttgattttagtgaaccttcaactgtttatgataatgtcaaacaggtaagcaatccacctacaagatggggaaaaaagtaagttacattgtaaagtgagattgtgaaataccggactatacaaagtacgcaccaatgtgatccattcaacgggaagcatcatggcaatataactgaatcttgtccaaagtataaccttattaatctagaaagttacattattatcgattcatgagtatatatgagccaaagaattatttgttttatatgagccaaagaattatttgcttcataaccaaataacagaaaaatgtaacagttcacatagaatgagctatccagtaccagtgaccaggaccacaggagtgcactctaattcaataagcacactgcccaacactgataaagaagtataatgccattcagattctgtacaatcctctgaaatctaattctgtacatggttcataaacaggcagcggcatttggtttaaacagtgtggtgtacgttccaaaaattgagttagatacagtaactgagctgtcagcattctgcgagaaggcaagcatggtaacactacatatcattattgcatttatcatatatgtaccgctttaacaacattggttattatcagggttgcatttatcatatatcttgtgctgatttcattatcagggttgcttggtcacaccaacattatcaattggctcagtgctcctacagcaagctgctatccaggcctcgttccactacaacaacgtcgagatagtggaatcaagacctaacccatcggtaataggcttttccatgtaactcttaattcaccatataaatatgccttctaaaaccaccagatacagaacatcatgtgcaataaacattgtatattctaacaatcaatcaaatgccaaaggaaaaggcacaacatcatctatcagcattagaagaactcttgtcaatacttagttacatactagacaagtgctcaggtgtgcaaaggctgatagactaatgtttgaaattgacaggatttgccatcgcaagatgcaatacagattgcaaataatataacagatcttggtcagatatacaacagggaagatatggactccgataatccagtaagtgtgagaaaaatattttgcattgctatttatctaatgatacagaaacgggcattgcaatctgttcagttcattctaaaacagtgaaagtacaaactggaatcagttttcacctctataacagcttacagctgcacaatattgtttcacaaaactaatggacaaatgttttggaaaaggcaaggggtcagatacttggagaagatggggtgcgtgtccacagtatggttctaccaggccttgcttccagtacatcgatccatttctcgggccctggagaggtattaataatatttttgcttgaaatgtcgctgaattgaccacctatttttaactattgaattgaccaatcaccaacatatccagatttacaccttaagacatgatgtgacaaatgttcaatgcctaatgccaggattaattctggcaatacggaaggtgatacgcttgaaggtaactggcgccaaactttctgttgtgcagatgatataatgcattttcactgaagaaaaattctatcttttgcagaacttgatttatggtctggagaagttcttgtaggattttattagaatgctggtaggaattttcatcccacatatcaagagaaatacaagctatggatattcatggtaaggataatgcaaaacagtaagaaagccagcaggtattacaagactatgggacaagaaagatgcgaagaatggctccaccaaacatgactgaatttttttatgcagatgttacccaagatacacaatcttgctgcaagttcaaggtggaaaccaaacacatgtcagcaatattcgggaaagcaaccatggtgataaccattgtcaccaaaattgagccaattaataaatgagtggttgaattgactcaaggcctcaagcatatgagttccatcacagaacataagggaactctagctgtaaggaactatgtttggtcctgggtgatgctgacgcaaaatgtttataacaatgcatggtgcgttgatagggaactgttttgatcccttgagatgaagtgatgtccccttgtttgtaaaacccatcaaaatagttatgagtaacctttaaaccaatttgcgccattcatacagcatacatataccactccacgaaatcttaggtctaaactcaactcgcgcattaagacatataaaaaagaagacaaattcagcgtatgaataatagtggtactattgttctttttcccctcaatgtataggtcgaatttaaacatgatttttggtggagagatagatgttactaaactctacattgttaaaaaaaaaaactagatgttacccgtatatcacatatgcacaaaggcaatcatcaacaaggtgacgcagtctctagtctgtacaggagagttgcttaccgtagccaaaatgtgatgactgatcaaccggggtcaccgtcttcactcttcagttcttcacgaagcaatcgcgaccgccaagaaaccgaaattctttaagatagaaaaccaaagaccgatggttcggtctaaaccatcggtctgattgtggcgaccgatctggcgtggaggtagccggtaggcagcggcgcggcggctggattgcagtgcagaaggcggcggcgcggcggagatgcgggagtaggacgaggtaccgcgcggggagccgcttgccgtcgcggtggactcacggaggacgccggagtggtcggagcgaaaaggcggcgctgattcctgctgctactagacgccgacgggcgacggcaagcacgaagggaagttagcggcggtggaggtcggactcctccgggaagcagtccacggagggttttgctggccgctgccgacgttgagctcgacgccatggctgcggcctttcgagccttcgaggaatagtagatttgggcccaataattgagtgatttggcccagtccaggaactagtaagtactctgcagagtacgcagaaaaatagtctccacgttggtgaactcgttgcttgatgggaacgcatgcaaaggctctgatcgacgctgatctcaaatatttcgaccaccattgcccgtattcctcggtgtccatctttgacatctgctgcaccctaattggtatctactcctcatctaatcgaatcgcaactcgtcatgtataaattaactccacacctcctcctttatcttcaaatctcaagattactctgccaaaatggcgcctggtcataggcacggctcagtgccaccagtggtgttactcctactagtagccactgtgcttggctccctctgccttagcctcaccgcttcacccgaaggtacatgagaaatcacgtacgtgttgctcatgtgttgtgttttttttatagaactttgacaatgtggtcgtgcgtgtgtcgtggcagcgcaaaaagggtacaattttcggttcgcgaggcacgcgcgggacgcgccgctggtgtcatattacaactacatcgtcgtcggcggcggcacggccgggtgcccgctggcggcgacgctgtcggagcggtcgcgcgtgctcctcctggagcgcggcggcctcccctacggcaaccgcaacgtgtccagcgagtaccacttcgccgacgcgctggccgacacgtcgccgaggtccccggcccagcggttcgtctccgaggacggcgtcgtgaacgcccgggcgcgcgtgctcggcggcggcagctgcctcaacgccggcttctacacccgcgccagcagcggctacgtgcgcgccgccggctgggacccccgcctcgtcaacgcgtcgtaccggtgggtggagcgcgagctggtgttccgccccgacgtgccgcggtggcagtgcgcgctgcgcgagggcctcctccaggccggcgtcacgccggacaacggctacacgctcgaacacgtccagggcaccaagatcggcggcaccatcttcgaccgcgccggccgccgccacaccgccgccgacttcctccggcgagcccacccgaggcggctcaccgtgttcctccgcgccaccgtgtcgcagatcctcttccgacgcaccggcacgtaatcgtcaacttgcatggtttgcgcaaccattttttagctctaaaactgacacgacaagtgtttgcagagggcacggcgacgccggtggcgtacggggtggtgttcacggacccggcgggcgtgcggcaccacgtgtacctgcgtggcggcgccaagagcgaggtgatcgtgacggcggggacgctggggagcccgcagctgctgatgctgagcggcgtcgggccgcgcggggagctggagaagcacggcatcctccccgtgctggaccagcccagggtcgggcagggcgtggcggacaaccccatgaactcggtgttcgtcccctccccggtgcccgtcgcgctctccctcgtccagatcgtcggcgtctcccgcttcggcaccttcatcgagggcgtcagcggctcgcagttcggcatcccgctccacggccgcgccgcctcccgccgcgcccgcagcttcggcatgttctcccccatggtacgttaggctagctagctgcatgcagcgtgcaaactaattaatggatgtttcattacgaggcagacggggcagctggggacggtgccgccgaaggagcggacgccggaggcgatgcggcgggcggcggaggcgatgcggcggctggacaggcgcgcgttccgcggcgggttcatcctggagaagatcctggggcccatgtcgacggggcacgtcgcgctccgatcagccgaccccgacgcgaacccggccgtgacgttcaactacttccgggacccgcgcgacgtggagcggtgcgtgcgcggcatcgagacgatcgagcgggtggtgcggtcgcgggccttcgcgcggttcacctacgccaacgtcaccgccatggaggccgccgtgcttggccgccgcgccggccacctccccgtcaacctgctgcctcgccgcgccaccgacacgcggccgctgcagcagtattgcagggagacggtgatgaccatctggcactaccacggcggctgccatgtcggcgccgtcgtggaccaggactaccgggtgctcggcgtacgtggcctccgcgtcgtcgacagctcaaccttcaagtactcgcccggcaccaacccgcaggccaccgtcatgatgctcggcaggtaatttaacccaagtgcatgccttcattttcagctaaattttgtttggtttggcgcttgcttggatgaaattcagtcgaacatgcattgcgcacacaggtatatggggctgaagattcagaaggagaggtggacgaggaacgacgagacacattagttagctcttctgatcacttctgcttgatcttattcacggtggcgtacgataatttcttcgtgtagttggtagctttgagagacccagatatttctttcttctttgatagagattgataatagtctgattgtggactaggatctgatcctgtgatccatatgtacttgcagtctagcttgcatgttttctgcattgtttgatagcgttatttagacatgaccacacatccaacattcaattagtattttggtggatatgtgtttgcaactctgcgtcaaatattttcgggattgcctatccatttgtcgggtaatttctagcaaaaaaatcacccaaattttttctacccttagatttacatccaacgagctaaaaaagaaaataacaaatatatatttacttacacggtatttttatcaaaattacagtgtacttacatatcatatcaactgaatttataaatgtaattttagctatataggactgtaattttatattttaaagaaaataacaaatacatatttacttacacaatattttttatcaaaattacagtgcacttacatgtcatatcgacggaatttacaaatgtaattttagttatataggactgtaattttatattttaattaaaataacaaatactcctttcgtattttaatgtgcgatgccgttgactttttgacaaacgtttgacctttcgtcttattcaaaaaaatttatgtagttataatttattttattatgacttgatttatcattaaatgttctttaagcatgacataagtatttttatatttgcataaaatttttgaataagacgagtgatcaaacgttggttaaaaagtcaacggcgtcatacattaaaatatggagggagtacatatttacttacacatcatttttattaaaattacagtgcacttacatgttatgtcaactaaatttacatatctaattttagttaaataggaccgtaattttagttagagaggagaacgtacgagaaatgaagagtgattccgggcggagtttgcgagagagagaagaaagaaacaggcaggcgtgcaaatagaaaatccgtaccgtgaaaaaaaaaaaggggtcggagcatcgaaccacgaccttatcaacatgtgcacaaatcttgttggcttggtgcacacatcgtgtggccgaaatatccgtgaaatcgctggaaacaaatcacccgacagatttctagcgaaatcgaatattttcaggtaggaatccatgtattgaactgtacatctataagcttcagaggtacacttgcccaggtgggcccattcatttatgcgacagcagcaacggcccatgggccttagaaatcacctaatctgcacaaaatgaaatgaaagagcactttggaccttttttttttaccaaagtttcactaggccttgtttaggtcccaaaatctttttttccaaaaacattacatcgaaactttggatgtatacatgcagcattaaatatagataaaaacaaaaactaattgcacaatttgcatgaaaatcgcgagacgaatcttttgagcctaattagtccatgattagccataagtgctatagtaacccacatgtgctaatgacggcttaattaggctcaaaagattcgtctcgcggtttccaggcgagttatgaaattagttttttttattcgtgtccgaaaaaacccctgtcgacatccagttaaacattcgatgtgacacccaaaattttcttttcacgaactaaacaaggcgtatatatcactattatccagtattttcactttggaatatatattttcatcttactaataaaatgctcattactttaccatggataaaatgtacgtgcttatttaaatatatgttattcacttaatttaaataaacattagactattatatgatataaaaaatgtcatgaactaatttataggataagcaaaattagtggtggtgagctagtggccaccaccactattgtattttatagtaaagtatagatcgtaatttggactacccaagctacttcttcggcacatcagcaaagctcaaacacattggcgaacttccctacgctgccaaatgccaatatgccatacctttgtcagagtagagattagatatggctaaaagaatagggctgggttagtttaaagtagaacaaaacaaaagctgattagtccaaagtaaatatattaaataaaaagtgatcaaaagtgaaactatagcgataattcaaactacaattcactggaaatgcaacgagtgtagaaaacacaaggaagctttgataagctccttgaacttctccgacggcgagtcggcaccgaataatcacaaatgtaggcgagtaaattatgggcttgtttggtttggagccaatttttatccaaccaaaatcttggtagtgccaaaacattggtaaattttggcactaccaaattaagtagtattcaacttaaactattgtgggtagaatttggtagcaaaccaaatatatacttgctactatttaagttaccaaaattttggtagggtaataaattagaaccaaaccaaacaggccctatacaactgctatacataagatcagacaaagctttcaatctcccatgattcgtcgtggtgtggatggatcaatgatcaatcgatcccgattcccaatctcaagctcccaacaagaactgaattgagttccggcgcgcgttcacgtcggcatacacgtatatactcgacccactcagtgtggcaactgccaaccaactccattgtatcgatctcctctcccatcccatggccctgcgcctcagcctgcagtttcctcctcgtagctttagcacaagcagacgagcaccacctactacctggcacctacccaccccgatccttaacactccttgtgaaaaatgctgctacagaccgcgaagaaaatagtactactagtactatgcatctccccttgtttgtcgtcattgattgtggtcaatcgtatgggtcgtgatatgcagtttgaaattagtactacctccgtcccaaaataagtgcagccataaatatccgtatttagcgctttgaccatccgtcttatttgaaaaatctatgaaaaatattaaaaaaattagttacacataaagtactattcatattttatcatctaataacaataaaaatactaatcataatcttttttcaaataagacgaacggtcaaacgttgaacatgaatagtgctaaaactgcacttattttgggacggagggagtactagaactgttgctgagaaggaggaggaaaggaagtactgtgagcgtgtggaaccccgcatgaatgaagatgctacaatctacaccacccgtgagggaaggcgaacatttgagacttgagagcagagcatagtgtgccgttgtcgtagcgagactccacgaaatcgtgaaatcgtcgattccaattccgcctttctaatcgaaatcaatttaatcgtttggcccacggctgataagaaactttttatgttggtgtttcgtaatctaaagactaatattaaaaactaaacgtgattaaataaacttcaaagtctaaaattttactactaggccgagtttagttctaaaatttttattcaaacttctaacttttccatcacatcaaaacttttctacacacacaaacttctaacttttccgtcacatcgttcaaatttcaaccaaacttgtaattttagcgtgaactaaatacacactagctacgacgcaactgaatcttagggcctgtttagcacagcttcagctccagctccaccccttctgtaggtggagctcagctcccatcggatggcccaataagccaaagaataagccaaattttgaattttcaaacttaattttgagattgatttcgagatattttcaacatagttttttttcaacattggcttttaagttacaaagaacacatatataaaagttttatctataaatttatttttattccctaataaaccgttttggtttattagaaaaaaagccaaccgatggggctttcacaaaataaactagagttatggagctgggtttagcagctacacaacttcactcctaacccaacttctaaagctaaatttagtaccaaacagacccatagctgcaagacgggggatccgattccagtatagaatcatgagacagaatacttgtactactaccactcaagggtctttaccgtgacgccatcagtctgttcatctgcagggtgcttgcttgcatggcagcatggagtcccagactcatcatccagctccggccggtcgacgcaggggaagatggcgccatagatccagattctgtccacgtgttaggatccgagggcaaccagcgaatcgaaggcgataccaccgagggatgtcagctgtcacctcagtaattaccaaataagaacaggtagactattagtcagctacaaatatattttaattttaatgagataaaagataagagaaaagcgcagcagaatacatatctgtagccagctgcagcatgaactccaaaacgtaatgtgtgtatgacaggtgggactatatattaatagtacagtaaataactatggtatgaattggctattagattgactatagacactaaagttaagaaaagaataaccacacacaaaaaaaaaacacaccgtgataaataaacggactgaaggaggaggcggcatgcacagtaggaggcgtatataaaaccgaccggtgcgagaggagaacccgcatcacatccacctcctcctcgctcgatccgctcctgtaggtactcgtactactccaattctttctctcgcctacgccttcctcccaatcttgttgtttcggcggcggcggcggcggcggcggtgagggagatggcggcggagaggaaggacgtgggcattctcgccatggacatctacttcccgcccacctgcgtgctccaggtcagccaccaatcgatctcatctcccgattcttccctactgatcaacctcgtcgatcgtatcatatttctcccactacaatccgtgtttttcttttacaaatttagtcccatgttttcaacttttcataacttgcaaacacgagtgcaatcaaaacaagatttggaggaagaggaatccttcaaatatttttagaagaaaacatgagcgtattgagaattgaacacattatctcgagttaaaaccacacacctcttatcactcaaacagagtgcaatcgcaatctagtcagatcttttgcctttggataaccctttccgttttctcgtttgttcgggagatcgagtaaaaaaacacacacaccctttgcgtgactttctctgcgtaactgtggtggaatcacggttggtgagaggtttactttactaccggtttccggtgaagattttccagctttccacccccttcttcgccagcatcgcagcggggagaaccagccacgtgcgcctgggccacctccgcgcattcggtgaactggagcagagagcaaagaagagttcagagttgcgattccaagtttactccatggctggactatccgtgaaaaaaaaaaagaaagaagcaactaaaaaataatttaccagtaaaacttttataactttggtctcagtggtttaaaagccaatgctaaaatatcaaatataaaccgcgatggaaaaaaatatatatcaaaatcaactttaaaattaagtcagcaaatatatgattgctgtagtgagtactaatcgtgctactcgttgtagcttacgttaccatttaggagtatagtacaggggagattaaagctgccgttttcagggaggcgtgattaattgctgaccgcttacgtgtggaatgtttgcacctgcttctgcttgagttgagagaaattaattaaaatgctgttccgcgggagaatttgctgtggaagatgccaattgaaacagcttggcacagaatcagtagggccttgactcgtttaagattgtgttgacaatcgatcaaatcactagaactagatggtgatggcttccaagacatggcggcttactatgcacatgtgtacattgaattgggtgctgataaaatggtttatgttcttctgccgacgaccgggatatgtcgggaccttttctttatggtagtagttctgtcagtgatataacttgtacagagtggttgtgtgttggcaatatctcaatgctgtacatcatgtcgatattaataatctttatttcgtgtttcacctagtattagactgcaaatgcatgtgatgtttgctacaggacgagctggagaatcatgatggcgtgagcaaagggaagtacaccattgggcttggacaggatagcatggccttttgcactgaagtggaagatgttatttccatgaggtatgcctgttcctatgtagaaaagcaccattggtgtggtagagttgtgtgtcctaccaggctcaaatcctattcctatgcattttcagagaacatgtgcaacatagtatttgtgattctgaagacaaatgtgaccctcaagtgtcctatccgtgccctataaagtcaaacagtgataaactatgctagatccttagccaaggattttatgttgaaattttaatttcaggaataaagacattaatctccattattcatttatcccttttttatgcatttaattgatcgagagtttaacgcagcttgacagtagtgaagtcactcctggaaaactataagattgatccaaaatgtattggacgtttggaagttggcagtgaaacagtaatagacaagagcaagtctataaaaacatggctgatgcaaatatttgaggtttggacctttcagcagaacataggagtacatattatggtttatgtgctttcataaggcttatgacaactttgtttaaatgcaggaatgcggtaatactgacattgaaggagttgactcctcaaatgcatgctacggtggaacagctgctttatttaattgtgttaattgggtcgagagcaactcatgggatggacgttatgggcttgttgtttgcacagacagcgcggtatgtacaactccagtgttaattgggaatacttttcctttcatgtactcaatttcgtactgtacagattaccagtgtacaactccatttcttttcctgggttactgatgatggctatatgagtacatgtattcatatatatcacgtccttgtttttctcattttttttcttagtttctgttattgaccaccaccacaaatccacaagtgtttttccttaagtactgaaggcaagcataatataggtttgctactatggttctcatgcttacattttgcatccaatattaattctatagctgacatttgtctctttaggtttacgctgaaggtccggctcgtccaaccggtggtgcagctgctattgcaatgttgattggaccaaatgctccagtttctttcgaaagcaagtatagaggatctcatatggcacatgtctatgacttttacaagcctgatcttgctagtgaatacccggtctgcctctggcccacacaattcttacacctcaaacccaagttcggattagcacatagagaactagcttgaaataaactggaattgatttatttatggcatctgcaatttgttcaggtggtcgatggaaagctatcacagacatgctatctcatggcattagattcctgctacaatgtcttctgcaaaaagtaagctgtattccatattgctttaacacattagtcaagctgagcctgttgattgaatcagaacccactggttttcatctttcaggtatgaaaagcttgagggaaagcaattttctattcatgatgcagactattttgtatttcactccccatacaacaaggtaccataaaaatctcatatcatgtaccttagtagcatcttggtggtatagtggattacagccacaattgtgcagacacttgatattcacacttatttaaggcatcttattcactgaaagaaatagggcatcttatttaaaaaacttttcaaataaatagaactcgaggttcccgacatgagtagtgagtagaatatatgcatatttagactgattcttgattgcatactgtcacatgacatggatatgctgatcttaccagtctgcacttcgatcttggttaggagtcgcatgctcgcataacttaccttgcccttttgatatgttgatgtaattttcagaacttatttttttcctttttcattgttttctgcagcttgtgcagaagagctttgcacgcctatactacaacgattttctgagaaaatgcaggttggtcggtcatgcttagcatattaggatataggaagacagttgactggagtaatattgttcagtttttagtagttaactagaactaactataacgattttttatgcctgttaattagcacggtggaagatggatcaagagaaaaactggagccttattcaggtttgtcatccgaggaaagctaccagagtagagaacttgaaaaggtgcgaatatttctgcttggtcataccatctggttctggacttttaataagctgcgtggttctgatactaactttcaatatgcaggcttctcagcaagttgcgaagcacctctatgattcaaaggttcaaccaattacattaatcccgaaacaagtcgggaatatgtacacagcgtctctatatgctgctttggcatcagtgatgcataacaaaaatgaaactctggtaaaaaaggaaaagaacacttagccttgtcttcattatattttcatgtgataagattaccacttctcaccctccccttttgacatgtccaggcaggccaaaggattgtcatgttctcatacggcagtggcttgacatcaacaatgttctctttcaagatcaatgaaggccagcatccattcatcctatcaaacattgcaggcatactggatgtctccaagaaactggagtccaggcatgtggtaagtgcagctgctgaccactgcttcatcttgttgactgaaaacctgaaactagtagcttgacatgaacggatgaacctgaattcctgatcaacaaatgctttgggccgcaggttgcgccggagaagttcgtggcggcgctgaagctgatggagcaccggtacggcgccaaggatttcacgacgagccaggacacgagcctgctcgctccaggcacctactacctcacccacgtcgactccatgtacaggaggttctacgccgtcaaaggtcaagccgtcaccgaagtgtccaatggccattgaaaaaattgtgttgtgatgtgtggttcattcaacctgaagctgcaataagccaacggcatagagggttcagggcgtgggtgtaccaagttttctgatgaaagcttgtaaagggtgctaggttagagctgttggattagttggttcgctattcgctagtaaggcttacttggtgaaatggtatctccacttcgttaatgttcttcagtggaacacacggtagcgagctgtaagaattcttaataatctgccgtcccgttcttttctctcccacaagagtaggatgaagattaagattttcgtggcacgcttttcaaactgctaaacagtgcgttttatgcgaaaactttttatatgaaagttgttctaaaatatcatattaatctatttttcaagtttgtaataattaaaactcaatcaatcatacgttaatatcacatcgttttgtgtaaaaaacttaatcttcatcttcaggagaaaaagaacacaccggatcatgtcatgttgattctaagctctatgtttccagtatatcgcctacagatccctttacaaaatattagaactaaaaaaaattggtgcgacgatataagcatttctgatgcattgattttgaaatcgagctatctattttatgtcaaatatttcagttgaccaccaacaaaaaaacattaatttgtacatggtgaaaaaaacataatcccatttgaaatgtttaagaataatgtgaaacacagtgaaatacatgttgaaacatttcgctatcacgcgtgcaacattaaattttaacaattaaaacacatgtttttctttcaccggaatgcaatcacataacatcttgttataaagatttacaacggttttgctatcatgcaacattaaaatttaacggttgaaacacatgatttcctttcattcgaatataatcacatgacatcttgttatgaagatttaattgtaacgaataaaacagtgtattccacgttacaaacctgccgtcgtattagtctctcccttttttccttgttttttttggtcttttctctcttcccttggcataagctggtctgggctggttgcgttgtgtaaacaaacactcttttcttctaatatattgatgtgcaatttttttgcgcgttcgcgaaaaaaaaagaatacaacgatgtactcgaattgtaaaccggattaataatttaagagaagaaaataatttaaagcttaacaatggaatatggttaatttacacggaagaagagaaaaggggtgggagagaaatactagcaacatgcatatgagaacgaagaatatgcggaggaagtagctagtgcgcccgtttattttttggctagatcggacactcgacctgaaccattctgaagagaaatctaaacaatttataattcgaaatttaaccatcgagagaatggtaagaaattccttaagaaaattactattgctgaacagcctagaatatttaaccatcgagtactactgacagaaatagccaaaatggccggcaagtctcagccctaatatgctgatctgtgccgtcgattgcttgatcgaacggtcaggatcatgactgcgttgatgaaaaggggatatgatacgccgccgtggcccgaggccgccgctgcacgcctgcacggtatccccattccataaccattccagcaacagctgtctccttctctctccgccgccggcgaaaccgcaacggcgcagaggagaaaatgtgggaagccgaggagatcgaggacgaggaaactctagaggcgcttctagaagcttcccgaagcgcccagggccgggccgcgctctccgacgccctcgccgacaccctccacctcctgccggcctccacccaccgcctcctgctcctccgcctccgcctcctccgcaacctcctcgccggcgacgacctcaaccagggcaccttcgtcctcctctccggccccgccgcggtcgtctcctccgccctctcctccccctccgactcccccgacgtcgcgcgcgcgggcctccaggcgctgggcaacgccgcgctcgccggggagcaccaccgcgccgccgtctgggatgcgctcttccctggctcgctgctggagctcgcgcgggtcagggagaagggagtcctcgacccactgtgcatggtgatcgacacctgctgctccggcgaaggcggccgcgggaggctcgaggagctctgccacgaggagttagggctgcccatacttgtggaaatcgtcactactgcctggcaaggtgcgtgcgccgcaattagttgatgccttttttttttattcagtaaattcatctggtagatgtcctgcaagctttacacaggtcacacttgctattgtatgatcgtgggagcacgaattgtttagctgtttgtttctgtgaaactaatgtaaatcaacatgagtaggatgtgtgtatgtacactgtaaatcacatcataaggagtaagtaagatgtgcattctgtagacttcagcaatagaaaagtttgcgaactgttagttgttcattagtatgacaggaagtggtaatgtgctggaaaagtttggggaagtaacttgttcattagtatggacaggaattggtaatgtaatatctgggcctttgggtccaattgggtatcagatgctctcctgctagtatgttgagtgtggatagaggaaacggaatttagtaacttaagagggtggtttgtgatatggcattgttgaaatttttagattgacattttggcagataatgcctgttcacctacttcatgtgtggaaatatatcgccactgtgttgttttaagtaaaaggagttcggaccacactatcacaggtttcatatgttacattgaagtaaaaaaatatatatcagtgattggagctgtgatcatgtatatcttcacatagttgcctgcatcatgtctaaagtgctggatctgtgtttcctcacatattgagggcaggatttcacgtaactataacttgagaaataatacagtcatattttttttctttattatgtaactttacttcatagggactccttaggctgttgttgaagttcacattttgctctcaggttgttttatttgtttacatttttaatttatggttactttgatatgagtctaatccgaggtataaaatgcagtggggcatgatgaagaatggttagaatggcttctcttcaaaatctgtgttgaggagcaaaagtttgaaacattgtttgtagctttatgctcacgcaatgatgctgagcacagtgatggtgatgaatgcaaaactgagtttaatgctaagcatgcatatcttttgggtaaattgtcaaaatgtttggctaaccgacctaaagaagtcagtgtatcgatcagttttgcacttgatattttcaatgcacagaagcatgctgctgagattgtggattttacttgccgagttaactctcctcttccaactggtcaccctgcaattgatgtacttggatattcattggtgctcttgaaggatatatgtgcttgggaatcccctccgtcagacacacaggctcctgttgactcactgatgcagactggtcttgtaaagcatcttctaacgtacttacgtgagctagaacccccaagtatgatcagaaaatctatggcaaggggacaaggagatcatcaaccagccttaggaactgcaaaagtctgcccatacattggttacaggagagatgtagtcgctgtgattgctaattgcttgcatagaagcaaaaaagtgcaggatgaggtgaggcacctggatgggattattttactcttgcagcagtgtgttgttgatgaagaaaacccatacttgagggagtggggtctttttgctgtgaagaacttgcttgaaggaaatgaggaaaaccagaaggaggtatctggacttaagatgcaagaagctgttataactccagagattgctgacataggtctaagagtggagatagacaaggaaacaggacatccgaaactggttaataactgatgatgtaagtatctcggaccagaagttaaacttaattacatgtatacatcaactgtatctgcattttcttgtcatcttgtaatcctatgatggtttttgatatatggttggtcccacatctagttttgtagtatttcaaatctcacttatagttctgttatttaaatttgtgcatatattatcttgtgattggcaactatgtgcttgattcataactgagatgtatgttcaaattttcatatgaagaaatttggcttgcatgcaaacattttagtatcttctggcttctaaagttgctgaaagactggtgtttgtgtaaccttggtatgtcaaatgttgcattgcgttgcctgacagcatattttgttgtgcagactttccattttgatccttcatgtttgaggtgaaaagaaaagggagatcagactcacgtaccgacgttcctctcattaacggaagcaaactaatattgccgctgccttctgcacccccgggaagataggtgttgctttttttcattaatgttagtcatgttaatattgatggcgagcatttgaaccaccgggattcagatactttcttggagaaatgaatgctaatggttttttacgttgcatcaaaacagtgatgtgatgagatgtttctagatccactcttatcataggcgtccgttttttaatcctcggcgtgtgctgttatttggtggctaatatgttgatcctggtattctttgatagcctttgggtatttagctttcactgtggctgtcagatttccactgtaatcgctttaagcaaagcatgattcccatgtttggctttcagccgtcctgtttcttatacgtcggcggagctgcagcatatcacagccaatgcagtaacagaagataaaacacaaatttgatgtcatcaccttccaagttcatgttggatcagttacatgctttagtacaaaggtttgtaaaatggaaaagttagccgttcgtctatagcatgctcaggtctatagtacttcaacacaagcatggagaattctccagctaagcaaatacaacatcagaacgaagcacatacttgatattctttttcacaacccgtgcttcatgcagcatgcatttggcaccatgaagatggagtagagccagtccttgcactggagcaacctacaacagaagtaacctcaggttaggggttaggaccagcttcgacggtaatggcagcattataaattgtgatgcagggtagactcatgccagcataataaaggtgatatcatcaaccccatatggatcaccaaacttcaagtgggcaatctcttttcgtcagagcaacgtagtttttcgacaagggtgtcattgatggaattgccaatggagtagatcttgctagtttttgtatagcataagaaattaaatatgtagagggagggtgaatttcgtcttatttattctttatgtatgatcctttcagtttcatgatcatatatgcatctcaacctctttctgacttagctagaaagaacatgtgtgcacattaatttcaaggttaacttccagatgaatgacagactaaacatacaatatatagcttgataccagacccaattttccatagaaccaaacaaaaaacatatgaaatggtctagcaaacagttgatcttataaaacatattgcaatttcagaatcagaaaatacctcagcgacaactcctccacgatgatcataaaaaacagtctcccctccaacaagagcttgccctgatgattcctttgcacttcctttgccagagaggtatattagcaaagtatacaatgttcttgaaccatctccaaggtcgacactctcatcaatatgcctaccgaatcgctgaccttcagtgtacctatgaggatgagcaacaagcagcaatcaagaacagtggcaatttgtccaacagtgtggtgctagtgcatcatctttgttcaacttttgatagcacacatacctgtagaacctgatatttggattcaagctggttgctactttgccagagatgctgatgtcctcaaatattttgtttatcccagattcccaaatggtctgagcaagcaaaggatctgtcacagatatccggtcattatctctataagcttcacccttcaggggtccgaggctgccctggtgcgtgaagccaatattctcagcaatgtcgacaaaggccttcgcctcagcggaagtgaagaagtttggcacctatttcagtttcaagtaaggcaattgtccataaataatagggaaacaattatcaactctgtaatgaaccctgttatgctttcttagtaaagctgggcgcactgcccctgatctaaaaacaattatcaactcagccaaaatattgctatgccaactgaacggtctcttagcattttctccttgtgcatcaaatagcatttcatcctagcatacgcttcatcactttgtattcaggaaatctatttgattactgcatttagaatcaaccgcacaacacaagtagagccaacccagatgattccctaacactcaaatcaaaattggcgctcctggtggttcgcggaaatcaagcatctagtctctaatcgccttctagaagcactaattcgagcagcagtatactagatgcagacatcagaattcagacatggttggggtcaaaaggggaaggtaggcttacggtgaggaggtgggtgcccttgaggcgattgacctggagatccttcttcggcttgaccggtggccacctcccgccgcctccgccgccggaagcgccgcccttcttccccttgttggccgccgaggatttgttccgacgctgctgctgcggcggcggcgcggcgtcccctcccgccgtctccatggctgcagccctcttccgcttcggtggcatcaagctgtgcagcgacttggctacgcggctggtaatcccctcatcaccgttggattcagaagattctcccttcctgacattgaatctggaccgtaggagttgattgctgggtcagatttgaccgcaatcttgacaaattgaaccttctataaaacttatttcaataataaaaccgcggcaaaaattattttgagagatagatcgcgacctagacatgaggtataatgtttttagcaccattatatttgacatgaacatattgaccgatgtgagtatgtgacataatttgttagatcaggattaatcgtgtcacgttagataatatatcagcgcaaatgttaataacattgagatgttatatcaacgaggatggcccctaggtcacgatctatttttaaatagcttttagcgtggtgtattgttgaaataagttttgaaaaagagctattttatcaaaatttcggcagatatgatccaggattccaatctggaagggggtgaagttgataatctaacacgtaggaagggctcttatgcaaatagaacttataaatcatgaccgttcaatcaggatcgaacggtgtacgaatcacgagttcgtgtcggcgagcgtccggcctcacgcgacgggagccggtggagctccggcgagcggcggaattgtatgcgggaggcatcgccggcggagaaccctaatccctcacagggttcgatcttcgcggcagcccgggagcggctggagaccgtgcgccgctgcctgagatcgccggcgagaagcggtgtataccctgccgctgctggagaccaagataagaaacaatctcgcggcgaaatctaagaaatctgtgttgatcccaacccaaaatttcacatcctccaaatcgtaacgaagaaaagagaaaaatctgcacatctacaacgaatgcaacgcgtccagggctgctttcacaagaatcccttctcaagaatcgcaaacgaaaacatctttatcctgtttcatatggtgaggttttcttggatgggcaggaacgtgccgcagatgttgccgccgaggtccgggaacgcggcgcatcccggcaggggcttcaccttgccgtcgcgggcgacgctgacggggtacttgacgaggtgccctctcatctcgctcacctcgctggaggcgaactgcctccagttctgctccccgatgtgccgaacctgcctcgtgcactccaggctctctgggcaactgaagctttcctccaccgctccaatgtgctctgcccacagtgacatcctgtacccgtagatcttcgagctcaccaaaaccaatccatcagcgcaactgtgaaatctgtggaattttgggtgatcaagggatcatttacctgtccacgaggagcagaaagcatgtttgcccatgtgtactggggctggtacgctcccatggcgatctcggtgtctctggttccttccatggatctctggttaatgttagccgatccaattatcacgtattcatcatccacgatcatccctttcgagtgcacatacaccatgaacctccggttcttcttagcttgatcctgaatgtacaggtcgcagcaagacaaatctgaactctgaatgtacggatggcatacaatttgagtatgctgcgagagaagcagaagtactgcagtctcacctggggattgttggctgaacttgatcctctgcaagtgctaggactgccgcctgcttcacgattgccaagacagaagaagttcaggtaatcctgtggctcatatgtgttatccagccctacttctttcaatgccttgtgaattacctcatacatcatttgcattgtttttttctacaatgacaacaacaatgacaacaaataagttacattgctatactgagagaagttagctctgtagaatgtagtagcagatagtacacagttgagcagactagaagacaatgctagagagacgctctaacctgccagtaaagtattctctgtgtaggagcaccagtaggattaccttcaggccacattggaattactatgtacgctgaaaacctctcattggcataaatcttgttggcaattttgagagctatttcaatcggtattaagttattagcacctgcagcagaacaaattttaagtcctgaaattaggggcaaccataagtacttgtcgtatttatttacgtcatgataagggtcaagaaattttgaattattctccaacataaagcagcaaattttaaatgaagttactattagagaacgcaattggaacgtgccataaaaggccagaatacattgagttgaacaacaagatttgaagcaaacaaagctcatgcttacctacatctttatgtgaatcccaattaaatgaagaaccaaggaaatactgattttcaatatagatgaagtgttgagctcctcggattgcattcacataagcggtttgtacgctcatatcaattagtacgtttttcccacaaacgagattctgtcaaccaaaggaaaagtctgtgtcaggtaaatacaaagaataaccaaacatagcataattgggtgaaatttatatcttagttaccttactggttgcttctcttggatttttgggaaaacccttgacagaatttgaatcaattgaccggaatatctgcttccaagttaatactgttcagtgctgtttggtcacatactttgtttatctgtagctgtgaaaacctttgaaggatcttacctgaacatcccatcgctctggatcattgtcacttgaatacacttcatcgtcaatgcttgcaatatcaggtatccttccaatccatagcaatgtgtcattatttgcctttgacaattttttaaccccgctgcgcttggatgcctttaaccagcgctcctcaaagtttgtcaagacatcatatgccgctgggccatcaatcttagaatgcaaatcatgccatggttctcttggcccttgggcatcaagtacctgcaaatacaagatgcgtcaattacaggaactattttcatgtgtataaaccacatacagtgatacaggcacatgaacaataggacaaagtaatctcaccgcaaagtttgggttataatagtcgtccttgtgcaatgtctggagagaccgaaaaagaggatgagtaggtgtatcatatcgtccaccgcataaatcaaggcctccaacaaaagcaactattttccttttatggttgccggcatcagcatccagaatcactgttttctgatgatgtgtaaaaatggttccggtctcctggttcaattttcaactgttaacatcattacatggtccacaagaacagctattttgactaaaaagatgttagctggtgacatgtgtctatatgaagcaaattatggcattcagaggagacaaagcttactgaagaaaacaaattgtaaataaacaacctgctgcttaacccagctgtgccttttcccagcagaacgcgggcagagcagtatctgaactgaagaatgcttgaaaaatctacgggtctcctcatcccgtgtgcccatgtaaccttcctatagagaaaactctgacaacaagtcaagctgtatttgcatgaatatattattcacaggttttcagagatcaatgtgtcactccatcaaccccaactaccattagacaaagcaatgaaatttggaccagaagccaaataagtggtgtgaccatcagtttgatacaagaaacaaatagccgaaaattaattttgtgattgcatgttgcattgtgcataccatctggataccaaggacgttccttgacgttggatcgtcccagacgaggagcagcaccctcaccccctcctgcgacttcctcttcagcagatcgcccagcgagacgccggcgccgccgtcccgcacaagctgaatggtgtggaacaccgaccacccggtgatatagatgagcctcctcgcctgcgatatcgcgtcgtagacatcgtgccagcattggccttgccggtagagcgcgccattgcccagcctgatctccggcagcgagccctccggcacatgcgcgtcctggtacagcgtcacccggccgccgcggcgcagcgggaagtaggtgttggggacgccggcgaagtccgggcccggggtgacgccgtggtggtacatggttagcctcgccacggggatgtactgcaccgacagccgcagcacggcgccgggggcgcacggcttgccggcggcgggatcgaggaccgggtagacgccctcgacgtgctccccggcctcgagctgctcggcggggacgacgacctcgccgatgagctcggcgccgaagacgtcgctgtccttgacgaggaagtggacggcgggcgcctcgtgcgcgacggggatgaggaagtgctgcgcccacacggggttctcgtcgtcgttgacgacgtaggtgcgcgcgacggtggcggacgcgagctgcacagtgacgtaggggtcgctggtcatggcgccgttggccgccttcttcttcttcttcgtcccgaggatgtcgacgacggtcttggagacgatgtccatgtttgggaggttccgcgcctcgtggatccatatgtcaaggctgccgtggagcatcgccgaccgccgcgacgccgacgacgagccccagacgccgtgcccgtgcggccacaccacatccatcccgctccaattcgacgatttcgcgtcaactgttcgtgctgttttaccttgatcgatcgatgatctcgttgcatgtgcctcgtgtacgtcgcatgtcctcctctcctcccggttgatcgctgcttcccctgaaatggaggggagaatgaatgggccgtgggcccatggacaaatgccgtctgatctgtatgtactctccagggcccacttgccgtattgcattgcaccgcgacaagtttgtaatgctgtgccagatcagccgtacgatcaggtgtaagctctgaatcgggacatcacttgcgcgtgcgcttgttgggctcaaaaaatgatacctggggcccacaatattgcgccacgtcagcggctcagggttggcccatataatcacatgggcctgactgccccgtgtgcttggaaaggacgctactcaaaaaatatccaacacaaacacagtgtgtaccccctggaccatatatatcgtcacattcaccgctggcatccgtgtgcatttgatttgattttcatctcttttggtcctctccctgacgccatgggggtgcctttttgcaggtcagtacggtcggtctgtgaatgcaccgctgttgctggctttgggcgcctgcgactcgatgcgagctcatgcctcaagtgtgaggagatcaacaagattctgggagacgcacacgcgcaccaacagtgtcagcgtatgtactcctcggctccaatgctctcaagtcttctcatcaggctttgatcgatcgatctgtatcctctctttctgctgctctctgatgatgtactgtgcagatgatgcgcatctcgtgagctgctactgctctttctgttccaaactctgtgctgagaagttcaatcaacgggcctgaatatatagccatttttggtgtattccgatcgactttttggaacgttttgctgatagggaggagggaatgccggaatggtaggtgcccagcatgaacgtggagggcttgagcgagatgcctggtcataacccggcggatcacgcgagcaaacaccaccaaaacttcggctccacctcctgtttaagcgtggctaaccttttggcaggctggcaggcagctgccaccagcaaaagagtgtacaaaatgagggaattagggatgttgtacctctcctgagaaaatgtgatgccttttcatgcagatccagttctgtttttatctgaaaccatcatgggttatattcatgcgcgccggaggaaagcacaactccaagcaaagttgcttgtactacgtactgtatttgatacctctcccttcttgttggtgatctcgttcctctctacgagcacataggagtagtagaagatagtgacagacaacccagctggttctttcctcccagatgctaaaatgttcgattagtacaaggcgatcgaaaggcacttttctctctagacgaaattagcggtccatgaaggtagcacatgcctcggtttttcgtttttaagtacaccatgtttaatgtttgctccctattagcagctttccaatctcaatgcagcaacagcatgagcaaggcttgtagtaacaaactttgaggtttacaaaccaggaagttaattagatcctacccaccaaagtgtggctagttaatatgctactactaccactacgaaactaaatctgaaacagtacatctttttctttagacctgaacaggcatttgttggtgccatggtgtacctagcaactgttcggtgtgtaggagtatttgttgttaaccgagaaacgagaacagcttcagaaaatgcagcaacacgcatgagacagtacaagtccacaaggtcggaacagtacagaattgctcatctcgctagctcagctcagctctcatgcgtgtacggtgtcgcagcgaatgaaagttacaggctggaaaaattgatgttgccgtctgaaagtgaatgtgggggtaggaacgccataaaaacgaccgagagttatgatccctgtgcgcgtatgacagaacgcgtcttcagtaatggcgaaacccgggctagctatgctattgctatgcatctctgtctctcgttattactcctgtgacgttttctggttggcatacggtccatacggatcgagcaaagcagcggctccataattttacagcagctgcagctggccatcatcagttcacggccttcaaactcgatcgagcaacccaaaggaaaaatctcaagcaaaaaaaggcggtggttttagtgctccatctccgatctccaaacgcgttggaattctcagtgcacatcttaaagcgtactccctccctccgtcaaaaaaaaaaagacaaatcgggaaaaaaagacaaaaagaaaaaaaatttatgtgtccaattttgactgtcggtcttatataaaaattttttataattcgtattttcattgttgttagatgataaaacatgattaatatttttgtatgtgacttgtctttttaatttttttcataattttttcaaataaaacggacagtcaaacgttgggcacggaaaccagggtttgtctttttttttagacggagggagtaggagtactagtccaattgattttatgatctgtaccagtactagattcaattaaacggaatgattgaaatgccggatcgatcgagtcatcttacagactaaaaatccattatttttccagtatttacacaactccgttgcagctgagcttgctgccgttacaacgatcggtagccctatacaacaaatcgatccgtaatacgcctacgtcgccatacgttacgtacaccggacacgtactctgagtgcattctactctcgtcgaacacgagcagagaagctgctgattttgctgctcaattcgatccactacacgacggccttcgctggcggtatcacgatcgggctcctcacgacgtgctcgtcggagacccacttgaggttcccctcgacgccggcgacggccggctgccctgcccaccgcacggtcaccgtgaagctctgcttctcgtacgccctggagaagcgcagcaatggcgggtgcacggtgaccgcgacgttcttgggcatgtccaccacggcggtgtacacggagttggccttcccgacgttggtcacgatgcggtggacggtgatcggctgggacagcagcttcaccaccagcgacgggtagttgagctccgcctcggtgatggccttgagcttggcgcaggagacgcggcggtgggttatctccttcacgccgtcgtcgccgatgccgaggccgcagaggtaggcgatgtagtcgttggtgtggaggtcgtagacgaggcccgggtcgacggcgcgggacgggttgacgtagccggcgcccatggtgtagaagctcgcgctgcggtactgctcgtccttgatcggcacgccgtcgtggtcggcgacgtcggacgacgtcatgatcgccgacttgatcgccgccggggaccatgtcgggtgaaggctcttgatgatggcggcgatgccgctcaggtgcggggtggacatcgacgtgccggactccatgaagaaggagaggctgacgccgtcggcgaactcggtgtgcatctcgccaggggcccacgcggcgaggatgttcatgccgggcccggtgatgtcaggcttcagaacgcccgggctggccttgttcggcccccgggacgagaagaacgcgacggacggcgccggcgacgaccccatcaccgtccccttgaatgtgacgctcgccgtcggcttgggagtggacttgatgtaggacaggatctttgacccggcggcgtagctcacatgcgacgccggcagcacgtgcgcgtcggcgaatgtggtgtatccttcgaccggcttgttcatcaggatcatgccggcgccgccgtacgcggacacggtctgtccctgctcgacgtgctcgacaatgctgcggctctcgcagagcaccaccttgccgctcacctcctcttcgaccagcgtgctgcagtctcgtgagtcggagtcgccgttcaggcccgggaacaccagcgggagctggcgcccggcggtgttgttccgcggctggtacagggactcgccgtcgaacacctggccgttgccgagcgtcaccgtggtgcgtatcgcccggtccatggtgccggccgcgaccgtgagcatccatggcgcgccgttgcccacggtggcggcgactgggccatcattgccagcggcggagctgacaaagatgccatgctccatggccttgaacgtggcgatggcgacgaggtcgtagttgaacggcgcaccgggggacgcgccgatggagaacgagagcacgtcgacgccgtccttgacggcggcgtccagcccggcgatgatgtccatgatggagcaccggctcctggtgcacaccttgtatatggccaggtgcgcgtgcggcgccatcccggacgccgtgccatgggcgttgccgcggacgtcggcattctcgacgaagttgcccgcggccgtgctcgccgtatgcgtgccgtgccccgcgtcgtccaccggcggcgccgtcgcattgaccgcggcgctgccgaaggcgcgcgcgccgatgatcttgttgttgcatccgccgccggagatggccttgaactcgcaggtgcccttccacttcttgggcggcggcggcatcccggcgtcgccgaacgacgggtggctgggcaaaataccggtgtccaggagcccaatcaccacgccccggccgaacccggagcggctccagaacccatcattgccgaggtgaagcccaaggaaccccggcgaatgggtggtcgccaacggcaagaactcctcggggtacagtctgatgcacccctccttcttcctcatcgcctcagcctcgtcgtcggtgagctgcgcggcgaacccggacagcacgtggctgtacgagtaaatgatcctcgggccatcatcccccgccgcctccggcgtggcctccggcaagaacgagcggtgccacagctcgaccgagtcggcgacgccgccgtcctccctcgggtcgagatgaaccacgtagttcttcctctcccgcgcgcaggagacaacggccagcatcgctgaggaaacaaccatggacactactacggcgaggaggattcgttgagtcctcatgatgtacactggttggatgctggctcagtggctctcacttgcgacttgtgagtaaaaactggagctgatatgatttgaacaatggggtgcagga

SEQ ID NO: 8723 - DNA, 87532 bp, Oryza sativa
  unsure (1)..(87532): unsure at all n locations
gacagaataagcacaaggcataatatcattgagggaggcacgagctttggaactcgttccaaagcgacactggcttgaaatctgaagaagagaagaaaaaaagagtcgcgagattttttagaatatttcagagaactttgcctttcctcccaaacctgacatatattcctccaacaaacacttttcctgccttctgcaccacttctctcagccggtcaatcactaagcaaacacttcgtttttgcagagaaatcagtcactaaacactcttgatactaaacacttgataagcctgcatttacataatctcttgtctcccacgctttgcagtgacagtgtctctgagtgtttagtaggcgttgcaatcgagcgtgagtttcgaaagggaaaaaaaatgacaccttgcatgcgtgattctgaatttccgaccattgttctgttgttggacaattggtattgtaatttgtaaagaaacatgaagaaacgggaacgctgaaatgtgaacttcaccaaaagacactcgctgccattcgtgtccgttctgatgcaaaaaggctagacacgagcatcattcgccagctcatttccctgcatcttgagaatactcgtctctctttttctagcataattagtacttacctgtaacaagattccaaggattaatccacggatgatgtggcagaacaggtgtactggatcaatcctacgccctttcctcacaaaccgggggccccctttcacccccatttcaagcaataaaatgagggggaaaggcaagggttctacactacactgccactgcaacaccctcttctcctcttcctcccccaaaaaaaagcctataaaaaagtataaaaccattgcaccatcgagcaaggcagtagcagtgatcgaggagaataaaagcagaagtagtagcagaagcaagaaaacactttgagcatttttgttttgttctccttgcagttacagctgaagcagcaagcagaagattaaccctcttggctaagattcaggttaacctgcagcgagaggttagctcagctcagcttagcttagcttaagctttgctcgagcttgccgtgcactccactgtctcttttccggtggtataatttggtgcggcggtgagctgccggccatgtcgaccgtctcctccgcgctgtcgtcgttcctctactgctgcttctcccccaccggcggccaccggcacggccaccgcgccggcgcgtactactacagcagccacccgacgagcaccaacacctactactacgagggtggcctcgccggacgcaggatgggcaggagcaggccactgtcactgcaggtatttgttcttcttcagcttgctcgttcgttcttgctttgcttgctctgttcctcgcttcctctgtttagctatgctacgcatgcagaagacggacatattctttgttcagatgaatacgtatttgcaagctagcttgtttatgcgatattgcgattgcgactagtcgtgttcagattattctcctcagatttttgtccgccacttctgatgctgtctcctagcttaacgctaattaatttcctagcatatgctcgtagcgataatctgtgctgctgtgcacgttgctgtctagaacagcccgcgaaaccaagctcatgcatgcgtgcgaaaaagagagcgataaaaggttgaaggaaaaaaaaagggcaacttacataggacaagggaaacttttccctcggcttgccgcatgcgccggtgttggagacagtaaaaatgtactcgtaccagtagcaaaatactacagtaggtgtatgtatcattcatgcgtgcgattgattgaattgctgcatgcgagtacatacagtaaaatatgaacggttgtctcctctgttttcccccagacagtggagctcaaggttcggatgtgctgctcaggctgcgagagggtcgtgaagcatgctctcatgaagctcagaggtatagtttgcaaatctcaattatcataaaaagtttttgaatcttggcaactaagggtttagatcaatttgttgtgacaaatttttttggcaaaagttttggcggtaaaaaatttggcattgaagttttactaattggtgcatagatgcatggtaaagttttgtcattttactagcaaagagagagagagcacggctcccaacgtgcttttttgataaaatttgctactctagacttccaaatgacaaatgttaaattgccaatttttactactatggcttcgattcatattgataaaaagtgctccaaaacagtataacttttgtcattttggagcaactaaacatggcttaatttggtgaaatttgcatgcatgtaggggttgattcggtggaggtggagttggagatggagaaggtgacggtgacggggtacgtggagaggcagcgggtgctgaaggaggtgaggcgggcggggaagaaggcggagttctggccaaacccagacctgccgctctacttcacgtcggccaaggactacttccacgacgaggagtccttccgccccagctacaactactaccgccacggctacaacggcgacaagcacggccacctcccggagccccaccgcggcgccgaccccgtcagcaacctcttcaacgacgacgacgtcaacgcctgctccatcatgtaaaaaaattcccatgcccgcctcgcattgcacgcgtactactactactactagtagcagtgagatcgatcgagtgtgtgtgatcatcattgtgtgttctctcttgtgctcggcgccgtggtgacaggtcaggtagtgtgctgtgtgtccatggagtagtagtagtagcagatgctaaagtcagtcagtcagtgtggcaatatcgaatgagtagtggcgccctttacgggttacacaatggaaagccaggctctgtgtacgtacgtactctctgtcgatctgcaaattgtcaatgggcccgaaactaaagccaattgatcgaatatcgttttttaaaagtagtatttttttgtttctaatataccaacatcgtattgatgtctctattaaatactactagttaaattcataaatatggataaatactggttagtaggctgtgtttagttccaaagtttggatctaaacttcagtccttttctatcacatcaacctgtcatacatacacaacttttcagtcacatcatctctaatttcaaccaaaatacaaactttgcgctgaactaaacacaaccaaagtttgaaattggagatatgtgactgaaaagttgtgtctgtatgacagattgatgtgatggaaaatgactgaagtttggatccaaactttggatctaaacacagccgtagttaaattcataaatatggataattctgagaatcgggtttccatggacaattcatgtgatgatgttcctccgtgtgagtatagcaacgaatgggatgccagccagggtatcttcttgtgctcgtagctatagctagcagcagctaggtttggtcgttggtgattgtggttatgccagtttaaatattctccactgctggctgcatctgcacgatgatttgatggatagtactactccagccaccacagagagaaaaagcctgggaataggacgggagcatgatggtgttcgtggagcctgcggaacatacaccaggccaccagctgccaaaactcagccgccaacaatagtgaccctaaaattaaaaggcttactactagcttcgagctcttcagttcaaaattgaggaccgattttagttacaaactttttatttgaacttctaactttttcatcacatcaaaacttttctacacacacttctaacttttctattacatcattccaatttcaaccaaactttcaattttagtgtgaactaatcacaccctgagttcactcttccaactttatcagatatataggcactcgattcagaaattccactctcaaaaatcataacacacacgaacgtttgagcataagaattcaatctatctttgaggtttcaaactaaaatcaggtggtttttgtggtgttcatgtataagctcatctcctcacgttctactccaattcacgtgtgtataggctgtaaattaaaaaactaaaatttcggcccatatgtttacatgggccgtgacgacgcctcgagtagcatattggcctgaagccctgaacacggatgagaaaaaaaccggaaaaaacttggccgatctcctcctcaccgcacggcaaaggctcctttcccctttcccgcaaggctcccacgctgacgaaatcgacgccgatttcccgaaatccccaatccccaatccagaatccactcgcttttcgataaaatttctgttgattgcgtcgaaaccttcgcaatcctctcgcacgcatcacgccttgcgcgccgcatctcgtagccctgaattttgatttgattctgctgcctccggcgcgcccctgattggcgaggaggtggtggtggttgtggtgggtgcggccatggcggcttcgacggcggcggcggtggcaccggactggtggaacgacgtgaacaactcgccgatgtggcaggaccgctccttccacgccctcgccacgctatacggcgccgtctcgttcgtcgcgctggtaagccctagccctacgggacacgttagaatcgatttaggttttgaaaaacatgggctaataataggggaggatattgggtcgtgtagccgagcagtttggaagtttcgtctttaattgtctcgatcgagggcttagatttgatttaagctgatgttttgtgcgggaactttgtagcttaccgtatgcttgaattgtatagtgatggagacatgggcatcagtctcatttgagtcgtttgcacttttgggagaatttttgcaggtccaattgatcagaatcgaatgtagagtacctgagtacggatggacgacacagaaggtgttccatttcatgaactttattgtgaatggaggtgagcatacttttgcactttgccactgcttcattgatacatgctagctttttcggaacttcagtttatgattttggactggtttgtttcagtgcggtcaatcgtgtttgtgctccgacgagatgtgcaacttgtgcagcctgaggtttgtggggggaacagtttatgtttctctgacttgtttctgcaatttttttcgaaggtgcaaagtaggaatgatgcgtaaccatatggcattgtaggtatttcaacatgtgctcattgattttccggggcttgcattcttcacaacctatgctctgttagtgctcttctgggctgagatttactatcaggttagttttacttggatatattttggttttgtcccatgggtgtttttgttctcattggttcatgatggcatttgttaggcacgggcaatgtctactgatgggctcagaccagctttttatacaatcaatggagtggtctatgcaatccaggtgactttgccatccacatttcttactgttgatataattgcttctctctacaaactcatacatgaaactcattatcatgacaattggaaaacttgttactggacggatcatccattgataatgtaaagtgattggatgagtcccaattgaattgttatgtttgatagtatgctatcagaaaaaaggttaaacagagaaaataaagcaaacactatcataaaaccctcgaaataagttagttagcgtagcatgattccaactgactaaatcttgactgcataatgtacaattactcatcattgcacaaatagtttattttattgtggagacaatgatggctgttagcttgtggggactccctggatgtacactttctgttgtgctacattttggtgggcatggatgtcaaattaacctaccacttgccattcagagcatttttcagtgtggacatgttcacaaatttctaccgtattgagagcatatttcaatacatagaattacacaaagttttgctacctttcctttttgaagtacttttggaatgatctgatctttgcatgattttcagataatactttggatggcgttgtggtggaaaccagttcgagcaatggtcatcttgtctaagatgttctttgcaggtaaatcttgtgtaatttgccttgtcttgcagttagtatggattttttattttgaatgagagcttgtggaaatcatagctggagatagatgggaaaactatctgatcataagttaaaaaaattctcgcgtacgtttagttcctcacatcccctaaatattaatgaacatgaaggaaatacattgagtcatgataaaccaggcgtagtgcaattttgagttttcttgttatacatgataatttatcatttattctactaatacaaagttatttgccagcgacatctttatttgctgcccttggatttcttctctatggagggaggtaagctgtccttggttttcttatttttgttgttttgggtgtttgtcttttgaattatggacaagaaattagtatgcttctgaagttatttcccacatgttatgtccatgagcttttgtatattggattatttggaaattggaagtaggcatgcctgggtgggtgtgcagttattgggtactggttgcggtgattcttttcatagcatgttacttagtgtaattttgtggttatctttgtaggctatttctgatgttacagcgttttccagttgaatcaaaaggaaggcgtaaaaagttgaatgaggtactatcttttatcattggcttctattccagaattaatactttagataatttgcatttctaacacatctactttttcataggttggatatgtgacaaccatatgcttttctggcttcttgatcagatgcgtaatggtacgtcctatgtcaatattatgttagggaggtcttcagactttaattactccacttaattagagcatcttacagatgtgcttaaatgcgtttgataaagaagccgatcttgatgttctgaaccatccaatcctaaacttcttctactacttggtatgtcttcctgttcacttgctttgtactcaaccttgtagttttatacattgtttttgtttatctcgtggcatttatatcttgatctcctctaatgtcattgttgtttaatgttagaggctctgtgttggtcattttaatttgccatgttcgaatgttcacatcgaggaaatcatttcttacataattttaactggtgtcaaacaagggataatgctagaatgtgatatagacttgtggaagatatgtttcttttgcttgtttttaccctgattggaacatggggcacatggtgggtatgctgatatcctaattaagtgattgtgtttacaaaaagagctgaactgaaattctgttgggaatgtgactcaaggaaaaatggttttgctacattgtataaaacaagagaggaaactagtgaaagctatttatttggcagaacacagaaattgtatgtgcttatctgtgcataagcattccaaactatagcatattgattttgccgaatgagtttacaaaatgcttttgctgttggagtatattcagattgtatgaagtaattgagactcaagacagtcactgccatatttatttgcttttgtaagaatggtcattaaaaaatggcttgccaagaataaactgcaaaagcaatttctttgtcgtgttattttgaatatgtctagaccaataattgtacttactgagtgcttgttgatagcgttcattttctctttggcagttggttgagattgtaccttcagctttggtgctgttcatattaaggaaactaccacctaaacgggggatcacacagtaccatccaatccattagatcagtccagggatccccaatgtgcccttgcaaattgttccttcaaactggtgagtacagaaatgtaaatcttaaccacggatttctttgtaggtaggttgcttggttttcatgtgaaaaaagctcaacaaaaattctgggatatatatagtttgtaaaaagtctaacatcccgtcatcccaaattcctgcaattgctgtactgcgacccaggagtattctgcaactacaggttttcttctgtaaactgaaggacaaatatgctttgattatttgtttgattatttgtaataatgtcagctttggtttattgttcctggtaaaaagccccttgcacgcttcctcctgactccccagtggtacacattgttcattactacctttttttagcctggacaatactgggcaatgttgtgttccttggcagagtattttcccttttacaccttcctgttcactggattgcttatacaagctctgatgggcctggatgtgtagtagacattgggcctcgttaacatctgtaaacttgagcaactgatattccaaagttgatcatagtgcgggaagtctagcaatgaactgttgagaagagaagatagatccatgttttgctatcaaacattgcaattataggttttgccacccaaaaggtatttacatacataatttgctgagttttatgtattacttttagtttcctttgttttcaatctggagatcattttcaaattgatcattagctgaaactggtagaaacaggacagatgtgctgagcccttgacattcaagaaatttatcaaattttcatcacccagttgtcaaatatgtttgggtgggtatgagatataggcaccagattgattccaatgaaccaaagccagtttggtcgaatccctaataattgtctgatcaaagaaagagagaaaaagagaacacatcgaaggtgacgaatcatgagtgaaaccgccgttaagcaaatcatattacgaacagtggcagatgatcatataataaggagtagcaaattctagagttgcaaccttcgagcgacaaataggcctaaggaggttggagaaaattacgaacctccaggtacaagttaccagtgttattagtcctctgtccgtcccaaaatataagagattttggacggatgtgacactatatccaaaatctagtgtcttacccgtccgaaatcccttagattttgggatgaagggaatacgtggaaggaacaaatgagtatatgaaagaaaatgaaagcacgcacctgtcaatcaggtcgacagcttgtatataccgggagcatcaaattcagaaccacacgaacaggttgtccaattgacagcagaggaatggagacttggagagggtataaacaaagctcatcttcatcttaggccttaggagtgcatttttagaggcttctattctgactggtagctgtgtgttcctgttgggaatatctcaatccaactgcgattcaactcccaatctaactgccatttcccgtttctgttgggagtagtagcgttaatgacgttggaccagccctgctggactgtttatgaactattgtacgtctgaattagtaattccaactctgctttacttgtccggacaaactctgacgaaattcttgtaaagatcttgtgaaatttgaacattccatatttccattctacatctactactgctacatgcaacacaggattctggtccaagacagtaaaatgcttggatgctctctcggatgccggcagggggaagggatcggcaggacgggcccaacaggaaggactcgtgtgcagacaccggacagagtgagagattgctgtgctttgggcagcagatgtgtcagtgtttatccatccattcctcggctaccttttgacagcaagaaatggatctccatagaaaccgcatggccccagcgaattcagcatccacggattctttgcttggatttgatgttcttcttcttcttgtgctatgctctctccttcaggccatccatcatgctcaagtctgaatactgaatccatggctttggctgatgctgtcatccatatagtgtgtgtgtgtgtgtgtgtgtgtgtgtgttttaatgcatgattcttttattgaagtgcattttctgatgagtagttaccgtggatgattgacttctaagcaagtgcggagttggtaagttgtaccacagacagacaacacgtatctcatgtacagtacagttcagcagggtaacgtagtacccttgctaaccagggtcgacagggactcgcagtagttgtaaatgggacatatacactgatagtggtactgttcattcattgattaacggctacacctacacctttcctttcagaaacattattgtggtcatgttattaattatagagaaaattgcaaaaaccaccccgaaagtcacttgaattttgacattccaccctataagtcattttgttgtaaatacccacctgctactaagttttgtttcaaaaaccaccccaatgcgcacgtgtttaaccgaatcaattcgttattgctgatgtaggattaccacaggctaagctagccaagtcaatcttgtctaagtgcttgcattagacttattttccatatttgattgattttttttttgcatatagcaaaactcagtgcaacaatgtttaggctctcgtcaacaattttatatgtggaatctcacaaaaaatgtatcacgaatactctagaagtatttagttttggcaaaggccatattgatggctcacattttataaaaatatgttgattcggttaagcatatgtttaccggggtggtttttgcaacaaaattgagtaggtgggtggatatttgcaacaaaataatttatggggtggaatgtcaaacttcaaatgacttatggggtgatttttgcaattttcccttaattatatgccaaagtagcaaattactccctctgttctaaaaaaactctttttagatgccatagcaacggtcacttaacacattattcaggtaatgttttttccccaactgtttttactgaactgattagtgctaacaaaacgagcggtaactcgccggtgatatatttttcctggctgaagtatgatgctttaccactgaattacatttggggaaaatggcctagcttagagtagcttagcaaacatccacacacaaaggtgaaaacctacaaagacaaccctgcacgcttatattttggaaagtagtatgtagtggtagttggaagatcaccatccagaaatgcgttgagctcccaacttgggacctatgcgtttgcaggaattagtggactatggaggtagttggtgccggccggccttacacttctttttttttttttgaacgaatgccggccttacactcctgaatttgctactccctttaaatttcgaattcagacggcatggattttgattataaattaccactagctcgtagcagatggttcttggccaccttatccatgataagcttattactgcatttttgtgccttctggttggattcaatctgaaatgtggctagagtagtttattactcctatgttgcttgatcattaaaaaaagtactcggttaacattgggatcatctctaaactaaattccattgtccgtaatttacgtagtaggctagtagttgtagctgaattcattgattagctctcatatctgttcctgtttatctgatgtacacagttcattgccatttgtaaacatcaatactttgcctagaaaacacaccacaactacacttcttctaatcgggacaactaagcaaagccaccctttttggtcaaagtcatgtattgcctatcattaggtgattgcataattacatgaacctaacccactgattatcctatgatgttagccatggaaggagaacactgaccaggaatgcgaaacaacagtactagatatcagcaagttgagcatttagcattcttatctgtgcttcccactaagaaacaattaggcatctttgtcggagcaatttatgcttgattagctgcccatgcagatccttgttgtcatttgtcaggtagtagtagaacacgtccacctgtttctaaaggaggacagaattttttcttaaaaaaaattgctgacattgaaatgcttttgctaccagaaaccaagaaggcaagaataatgttccctgagctaatgtttgcacgcccaaaaattaatcatacacctttggaaaagggcgtgccaaagagcatgaaccaaagagcaggcataagtttttgtttaaagaagatacggaacatgaacaatatatggaaaatggtgtaataaaaatacgttgcataacatttacgggaggaattgagagggtgaaaatggcatttcctttttacgctaggaagacagtctcaaagaagtttgcaaccgacgaaagtgcaaacaaataccattcccttgttctaaaatacatcattcatccaaaaatctaatctaaggtatatttaattttttagttttttaaataagataggtatatttatagtttatatgtaccgaattaaattgttaactaaaacataagaagtcattttaatacttattggttgcatgcatgtaagtaccctctccgtcccactgaacaaggcacgcacacattttaagattcattataaaattaagatttatttgataaatatttcattataaattaagatttatttgataaatatttcattggattgatatttgaatttactttcatataattgtgattttgttactataaacatcgtagtatttaagaatttcaaagttaaaagttagttttaaaaattgttacaactttgactgcacctcaagcttagtcagtggaacgaaaggagtagtttcttgatttgtcatatggtagatgagtttttttttcttggtcttgatgataaaagaaatatatcttaaacttttaaatggagagagtatatttatttctgaagactttgatagagaataaaaaacaaagataaaagaactatattactctttattaattgtcccgattgatgatagtcggatggaggttgtctagatacgaaacaatccttttaaaataaaatttaaatactagaaatagttatatttaagtgatcaaagggtggtaacttatatcacagggggaaacttgagaaatcaaaaatagaaggaatattagagatatacaaacaatatgtctctaacttaagcattgagttatactccatttatctcagtataaatatggcctaaagataagatatacgaacaacggagtattctcgtagttctgaaatatgtgcacggatagagttgtaaacgaaaaacccgagcattgtattgcaacaagagcctggacgctgaagcatgtgcctgcctactggctagggctgcacgttgatgtgagcccctagggttctccggtcacgtctcatcactatatgacacaaatattttcgtcctacccaagttttctttcacatattaatggactaataattaattagcacgtcactcagattcagagattcagattgccctccacacgtgcatctcctgtcacagtgtcacacaactcgtaaagtctgttggattaagtagcagtaatttgttagagctgcagcaataattcagtttgtctacaattatttgttggagctgtagcagtcactcaggcctgtttactcgaactaaaaagtaaagctgggtttagttccaaactttttttaattttttttaattttttcataacatcaaaatttttctgcacacaaattttcaacctttccatcacatcgtttcaattttaattaaacttttaattttagcatgaaaacacaccctaacctgaagaagtttggagagcacgtttgtctgtctcgcttgcttgctgcaatggcaaagttgtacggctcgagatattgctacattcaggcctgttttctcgcttccaacgtcgaggcatgcgtgacaacttcgactcctaccttcaggcacgctcttactacctctgtagtatttttttaaaaaaagaatcaacttatattcgtagttagaggttgactttttaatagagagtacgtccaaaatattgattacctaaaaatatcaattattgaaaatgaaataagattcaaacagggtcaagtaacataggaaacatatgaatggcaatagagcacctttatggtgctttctacggtatgatagtccagatttgttagaagagtttctgacaaccgcagtttctcccaaatccagaagctcctctaaacaattcaacattttgtctagatttttttaaaaaaatgtagttataaaattttagaaataaactagaaacgaaaagctataaagcctaacttttctatatttttaaaagctaactataaattaattgtttctcacaaacatatcctccatcagagtattagtattatcgcagtagaagtgatatcattttctgctattagcaaaatattttttactagtagttgatgtggtagtatgatattagattagaaaaaaaacggcttaaattagttcttttacccattagaacattgtaaaacacttcacggcagaattggtatatatatggtgagcatattgctatcgataaaaatgcctcataaaaaatgcttgtgtaatttgctccaaatccaagcacattgcaacaaaaaaaaaactattatcctattatagactaaataatagtctttcacgaaacaaggaagaaaggatccaaccaaatcagcactaaggctgtgttcgcattcaccttttcccatcccctttccctcgttttccgcgtgcacgtttttcaaactgctaaacggtgtattttttgtaaaaagtttctatacaaaagttgcttaaaaaaatcaaattaatccctttttgaaaaaaaatagctaatacttaattaattacgtgttaatggactgctccgttttccgtgcgcagaagttgggttcccatctcccccatccgaactcagcctaagggaagccttaattaatcagcttaatgagccccactaccactaaccacactataatacggtacaaatagatcatatatacactagcatagcacgaaatcgcaaagtccactaacatcccactcccccttccaagcttcttgtctcctctcctctccccaactcccacgccatctcgccaccaccaaccgattcaggccgcgcacgccattaatggagtacgagcgcatccacggccccccgctccaacgtcaggtggcctcctccccgcgattcccgtgtgaatttgctctttcttcccggatttttcgactttcttcttcttcttggtttgctcttcttctttcttggcggtctgcacccattcggagtccgagctcatctccgagtccatggcgcctctcgccttcgatggctggaactgaaatactaggcattagcgccacttatcttgcttcgatttggtaaattttgctcgattccttcatcgtggagttgtgctgttcttcgtactggaggtgtgtcctttttaatgattgctaatattcttggaaagcaggcacgcctgccattgctgaactcgatgttttctcatcgattggtcgggatattgccgttgatagattcccctgcagtgctccttttcgtctcttccattctcctctcaaattcgccttgacattttggtcggcactgtacttttgtggtggtggccactggccaacaatgttcaggcctggaacgatcgcctgtgtggctaattcggcgcgcattttgctgaaaagtttgcgggcttttatcctgtttgctgctctaccgggtcactgctctgccagttttgtctcaatttctgtgatgctttctgtgccatagctttcaaatgttggctttggtaaggaggggattgagataggttgggttatctgagtgcacacttcactaaaaagtttggatccttttgtccattctgctgtgattccgtcggaatttggcaattttcgcagttaattttgcctcatttactgatttgattcaccacagctttccccaatttctttcagcttccactaaaatctttccttctttcctcttcctgctccagtcgggtggattctccccagctaagctacgagcaatgcttctcggactagagaaaaatcagcacaacggggaggacacatcgcctgaggccaacgattccggcgagctggacgaccagagtaagtccactaccccagaaatggtgttgcacagctcaatcattctcatttacggattcaccaaatcgctaattgcgtcaacagggagcatggagtgctccacctccaccgaaatgtcgagcaacagtggccacagatcaagaaaccgagctcaggacgacgacagcttcgactccgagagcagctcgtcgggcccgccgacggtgaagaggccggcggcggtgaccgccttgctgccaccgttctctaggccgacgccgtcgaagtgggatgatgcagagaagtggatttctagccccacggcgaaccgcggtggccgtgtggggagtgcagctggggctgcgccgaagaaatcggcgctggcatttcctgaacatgtaagccggcctccagccgttgctaaggtggttgctgaggtccccatcaacactggaaccttggtgaagaattcagttggtaagcaagaaacttcaccatgccttttttaatttcctttttgtgctcttgaatatcttaattgataaggattgtggatttgtggtgtaatcaagaagttttagatgatgttctagtgacctgtgagagccacatctgtggtttggtgtgactagaatttcagcctatctttgtctgcaagttaagaggttgaattagcatttctcctgattgtttgtgatgtagtctgttactgttaggttgaaccaagtattgttcggagactcgtagtgttaggtaggcaaatttgaagtggagtagagtgaattgagaagacacgtaacattgtgagtagccggtgcaaaaagggtctgaaattgatgtttagctgtttttcatgacaggaggaatattataattcatatacaaatttgttaaatataaaatcagaaagcaaacaaatccatctgttttcattagataaacctgcttataagtctatgtgccttatgtatcgcccatttaaatgaacagttccggtatgttgggtgaatgcctattccagggatagtttatctttcacttactagttgctataattcaaaatctctctggcttatacttcttagatgacagcaaataaattttgtttcctctatgcttctaccttttgtaaaattcagtatgccactgacggaaatgtcctgttctattttgtttgcagctctcgcacagcctatttcatttaatcctgcacaaagtgcttcgatagttgatgaaccagctcctgcagttaggtctgtttcgatgagagacatgggcacagaaatgactcctattgccagccaggagccctctcggactgggactcctattatagcttctagtccaacctcctctcggacaccaacaccacaacgtaatgcagaaatcagtattggtgaatttggtccaaataagatggaaatgtctgaggaggaactacaaatgaatacaagaaaggaaatcatggatcttggccaacggctgggaaagacaactatagctgcatgggctagcaaggaagagaaatctacaacaagtttcgcaaatgtcataaccgacaaggctgtagaaatcgacagagaggctcgtgctgcagattgggaggaggcagagaaagcaaaatatcttgcaaggtgtgtgctcattcttggctatctactaacagatactagtgagcttgtaatgtgataattctcaaatcaggattaagtagggaaaacatgcaagcttgcattgattaatattaagatttaagaacaactagggtagcccatctcgtagaaatataacgcatggcaaggaaatcaaaacttcatattgctaggcttatctgaagaatttgcacatttccctgacagcatgtttatctttcttttttctcctaccctgcaattctaggtttcagagggaagaggtaaagattcaagcttgggaaaaccaccagaaagcaaaaattgaagctgaaatgaagaggatggaggtagaccatcgatctccctttgattattttgatgatgataccatgtatactcttcaaccaggccaatatatgcagtttcctagtttttatcactggataaaatagcttcagtaacttgtcaaaatcattaaactttctctgcaaaagggctaggagtacatcattagcaccaaaagtgtcttattctgcattggaatgggactgtttatgagtttatctcatgacacatctatccaagtccaagacacagaattgaacagaaacccaagaagcttcaggcaatttcaatttctgacaatcacctacctctgactgaattgcaggcaaagatagagatcaagagagctcgcgagcaggacaggctttcgagcaagttggcagctgcaaggcacaaggcagaggcgaggagggaggccgctgagtccaggaagaaccaagaagcagcaagaactgaagagcaggcggctcagatccggaaaaccgggcacataccttcctcaatctcctgctggtgctggtgcctgtgattcttcactctgccatgatcatctgttatttgggtagaagaaaaatacttgctccttgcacgaccatgtaaaatattcgctactggttggttcatcgttcagtgatcaatgccaatgagtcgccatttttgtcctctcgatttcactgatagaatcagggcgtatctacctgcataactactccctccgtcaaaaaaaaaaaagacaaaccctggtttccgtgcttaacgtttgatcgtccgtcttatttaaaaaaatatgaaaaaattaaaaagataagtcacgcctaaaatattaatcatgttttatgatctaacaacaatgaaaatacgaattataaaaaaatttcatataagacggacagtcaaagttggacacggaaacccagggtttgcctttttttgagacggagagagtatatattattactcgtagcgacgacgaggaattaaatctcgctgttattcagagtgcagcgcgatcaagcctggtttcgattggggagggggaaattttaggctgtgtttagttccacgctaaagttgaaagtttgaagaatttggaatgatgtgacggaaaagttgaaagtttgtttgtataggaaaattcgatgtgacggaaaagttgaaagtttgaagaaaaaaaattaaaatctaaacagggccagggcctgactgttttagaagaaagctgccacttttaccttgtaaacccacgtacacaagccatatatggcccggatggacggatgcgaaaaaagccatatatggagatgatataaaaggctaaaaattgtttcctgtagtgctctccgtgcctctttcaaatctacagattgccactcgtccagtcatcctctccgcgcgctataaaaggctaggaaatcgcagcgcccgccatcaaccgatcgatctcctctcccccgtctaatcgatctgttcaagcggattccgacgagacgatcaatggaggcgccatcggcgtcggcgtcggcggaggagaggcagcggatcgagcgggtggcgcggttcgtggcgcgtgaccgggacggcgacatggcggaggcgctgctgctccggctgttgaagatcacccgcaacgcccgccgctggggattcctcgaccgcgaccaccccctccacccgtattacctccagcagaaggtctccgagcagtgccgcatcctccgcccccgccccgccgccgccgccgccggtgatcgctgaccagatcacgtccatgggactcttcttcttcttctacgcccacgcggacaccaccacttgtgctcagattttttattatttaatttatatatttttttaggatctttgtcaacattaatgaccccatgagatttcctcttgagattatacgagaatcagcggctgttcatcatcagccagatcaaagctaattaattaattgctcgtaatgcggcagatttgaggcatgttcttgccgtgtactcgcatgtgacaactatctgaatccctgaaattgcaagggcaaactgacacccaaatgggcctaatctcgtcggcccaggtatcaaaaccaagccgggccgtcccaagcaaattgggtctcaatcctcccgaatgggcctggggacatgtggtatcttgaattgggcctcaccttgtcagcccacgtgaataatttcagcgattgggtcgacgcgtgccactgcgagagaaacgtgttacctcgggttctctcgagaaatttcattatttgatatccaattcgtaggcctttcagggcaagccactcaatacacactcctttcagattttgtcactgagatagcaaattcctttattccgtgccactccgtcgccgatccgtccgtccgtccccaacgccagcttttccgtcgtcttccccacctcgtcacgctcgtcaccggcgccggcgtgggccaaactcttggagagttggaggggctcgagctcggactccggcacggatgggaggaaccagtcgtctctaatcttgcgaagcagcagcaactgattgtgcatagatatagcttgtgtgttaattgcagctcgctaatttcttccctagtttcttcgttctctcccatcaattagttgcgtaatgtgatttctttcttcttcgttctgacttctgaggagcacgcttggtagtttatcaatgaaaacagtagattcctctgtcagttttctcaatgcatttgtttgggaagattaacaattttttgctgattatggcatggaagagattagctctgcagttctgcctggtgctgaggtcgcacgtctgcgggattagatatggccttcgttcccgatgtggcccgggttcgcgaaggtggccgctcgccggctacgtcgaggtggaagacgctggaaatttcttctccgagttgcccaacgattctgcggtgtggagggcggccgcgacgtctgcggctggccccgcctcgtgcgtctcggctcgcccgtttcgatcggctgctgctttgcgagattacaagacgactggttcctgacatccacaccggaatctgagctcgagcccctctagagcgcagcccacgccggcgccggtgacgagcgtgacgaggtggagaagacgacggaaaagctggcgttggggacggacggacggatcggcgacggagtggcacggaataaaggaattcgctatctcagtgacaaaatctgaaaggaatgtgtattgagtggcttgccctgaaaggcctgcgaattggatgtcaaataatgaaatttctcggttctctctctctcccactctcgccgtcgctctccgccattctccaccgcccacccacaccggaggtcgcccaccaccggggcctcacctcctcctcctccccctcgtcatcaagcagagggggtgatcggggtcgccgcggtaagcttccctatgcttcgatctcgccagctccaatccctccctcgatttctccgattcgattccgtatctatggccttgtactgtttggttgtaatcacaattttggtgccgctcgggggtgcgcggatgcatgtgaaacggagaaaaattaggtctcctgtgcgcgattagggtgagatgtcgcgatccccatgcgattggcggacgtagatatgggtgtggtcttggtagggttaaaggtatcattatcacgtaatcacggtttagacagagacagaggagataaagcatgaaagaggcagtcatatcgtgatgggccattatattagtgagtaaaagagactgtctttttctatggagggttttgtttagtatctagtgggtccccatcaccccaaactccacaggttttgattctgatggcgttgaagattctgtgttctgtagttctcactaatccagttgtgtcgggctcctgtttcgttttccatttccgtgtgtgtaaattgttaaaagtttctgcttccattttggtttctcatacagatggatcctttggaatctgaaggtggctcacagaaatccaacaataagcccaaatgtactctctttttgtccccgtgccattttttaattggcctcgaatacatgttgtattgctttagggatttttatattgtttcatggggttgatgatttattttgtatgcagattctaagtttacgcaacaggagcttccagcatgcaagccactactaactcctggaattgtaacttgcccatcaccaattttactatcttcaaatatgcatattatactacctattagatttatgagttccttttatgcgattgtacgtgaaaatacataggtggttgctaccttcttgctgattggtatcatatttgtcccaattgggctcgcgtctctatctgcatcgcaagaggtaaatgcaaatttgcgtggccagattgttgttgtcttttgtcatttttatggtgcatttgtttattctattactcgggtacattgtagatcgtcgaactggtggatcgatatgacacaaattgtgtgtccacgcttgacaaggttgggttcattcagaacaccgatactgacaagacatgcacaagaacactgactgtgagtatcgaatggaaatgtcaatataccttgcctaccacttatcatgttggcccttaccatctcttagaaatatgcattcaattgtttttgctaaagaaaaaaaaagatccatgatggattatctttttgttgtatgtgttaggtgcctaaacatatgaagagcccaatccagatatattaccagatcggcgacttctatcaaaaccatcgacggtaattcgtgcatgacattcctcattttgttttttttaaaaaaatacttccttttttattccagtttgggatttataagaaatatgaaattaccggtttgacaccttttgatttgatccctaaatttattgtattcttactggacatcatttgatttgaattatgtgtactttgagagcatcctgtctgcatgacttatgttgatataatctgaccaattgttgacttcttatgtatataggtatgtgaaaagtcgaagtgataaacaattgcggtataagaatgctgtgcacttgacaaaggattgtgatcctgaaggtaatactgttgatggtgctccaattattccatgtggccttattgcttggagcttgttcaatgatacatatacaatttcggtgaacaagaaggccattgaagtgaataaaaaggatatagcttggaagagtgacaagaccgataaatttggcagtgatatttacccaagtaattttcagaagggcagtctaataggcggtgctaaactaaatgagagcatacctgtatgtgtttttcccctatgtacgacatggcatattttgttacctttatttcatacattttcgtctcattgacattttgttttttctgtctctcctgtcataaatagttaagtgagcaagaagacctcattgtttggatgagaaccgctgccctcccaactttcagaaagctttatggcagaatcgagacagatattatggcaaatgatcaattaacagtggttatacagaataactataacacatatagttttggagggtctaaagcgttggtcctttcaactacttcttggattggaggcaaaaacaacttcattggtgttgcatatctgactatcggaggcctatgcattttccttgcagtgggcttcgtagttcttctctacatggttaaaccaaggtacgccatgttattgctgccttgctggtataatgtgctcgctactatttcatatgcacacatgcatgttttgaggattacctccctcgcacatgatcccttcatggggagcctgctattctgttatttccatgtatttttacctgattatgtatgacgcgcttcatcattgtgctaattttggtacgaagatgcgatatagaactatttatttccatcgttgctttagggcaaccacaatgtgcatgaaaactaaacttaaggaataaagtagtaatttttgttgtacctttatacattgggagatgagctagggagagaatagtgctatgggcaaccttaagcttaaggctataccataagaattaaaaaaatatatcatggctttacaacatgcatgcacactttcaatcttgagtaaatatgtgttttttctcagtgggtcccaccttaaggtcaagaagctaccatatactccctccatctacttttgatagtcatatttcatcttggcacaatgaccaaggataagtaattctacgtatcatccatttaaacatgctactagttattcctcgtaaacaagtgattcattaatatttacatttctcgatgcctatgtagccaatcttgtgtggaagaatggagagtcacgcattaaatccaataaaatcattaagaggataggtggttggattgaaatatgcctatcaaaaataaatttttcagattttgaaatatacctatcaaaagtagatggagggagtacattgtagcatgtactataggtaaaaaaacataagaatgtgggtctcatcttatggctcaattgatcttcaacattgaggatgtcctaagtaggaaacctgagctctagggaccagcgtaatgcaatgttcagcattgacatggttgatattgccgaacataccatgtatatttttttgaagaaatttgaacttcgaactgttgcactaagaaaatcatgcttgattcctttcaggactcttggagacccctcgtacttgtcatggaatagagatactccagaccgtccaaactaatagattggaatctcttttctgatatataaatttaataaaggatcatttcaatgggtaaaatgtgaaattcctttacctgaatctatggatgatgttatgattcctatctaacgtgtttgtgatagcccgataggtccataggcatgagaatacatgagacagtgtactctgttgactccaattttacttgacaagaacaggagttgttcaacttatttctgactataaattaacccagagttcaactatagtactcattatttcagtgctcttttcacagtttcctgtctgtatcacacaaagataacccaaatactgtaaccaacagtaactgaaattacaacagttagtacctcaatcttatactatatttaggagattattcaagaagatattgaaatatcatatattgagaacaattctttcattgtcaaatgatgagatagatacatagtattccttagacatcattgtcctttgtcaccatgattctttctcaaatatgcaatctagtctgctttgtttaaaacttcaaatcactttatcggcaacctgtaatggtctcagtggttaattgccatagttttgtgggtacagtagctgtaaggtcctctgtcttcatattcatctaaggtcatcactggcagggcaagattgttggctccatgggtgttgatatgcttctactacacatttcggggacaacttcagtgaccccttcatcctgagtaatcattgttttactgataagtaaccttgttctggagagtgagtgaattagtttaaattaagaaaaaaaatagttagcctgggcattagcagcaataccttcattagattcctgaagtaaattgttgtgtaattccccgttggaaagaaaatttctattagatcagcaagaaccaactggggctgggagatagctccatcgaaccaatcttttttttaaaaaaaaaaagaaaagcaaaagcaaaactccattagacctttacataggttgaaaaacatggcactggagtttgagcatggttttgtaaaaacacaaaaacaaaactatatcaagagacctagtgtagagcatagagaaaagaattaccaagtttcttcgaatatcctattcttttatcaaatctccatatgctacggttggctacaaaactaaaacaagagtcacggtccacattaatgctctccaagaatgtggatagtttgtactctgcaggatctgaagcatatgtctgatctatgaccacatcaactgtctgaaaaatacataaaccaaagcttaatgttagatgcttaacaagtgagggtcatttaaaacttttgtgaagtactaaaacctttggtgtttcatagaaatgtccaattttgcccttgtctagtattagcattctgacattattttaactaagtaacagttctccagctctccaaaaagaaacgatggatctttagtgcatcatgagaaatagtgagacagatgattactctgacagttatgtattatcgatactcacacaaagaatagcatggaagttatccatatcctctggatcagaattgttgaatctcttattagtaatagttgcatcaacaacctctgctcctgcatctgtgacatactgcttatggcataaataccaaatgcgcatgagttgtctccatttcatttgtttagttgacagttttatgttcaaagtgctgcaataaacaaatgacattacctgtacaatccaaccatcactaacaaatgtccacataccctacagtggtagaaggaacatattgacaacaaagtatggtgcattccaaaagttacttatatggaccagaaagtgatgattttatttagtaaactgcttacctgtgtgaattcaatccatgccactataggtttgaatcttgtgctaagattcgcagctgctttgcttaagcataagtagtttgcctttatctgcatcgacatgctagataaatgagatcaattgtctataggtacttgattggacattgcaaactaaagtggtcttaaactagtttctttgtgctaatgaaactacagttactttttttttcgccgggacggcgaagaatgccgaccgatgtatattaagtaaaaggggaaaactgtacaaatgcagtgcgtcagagcaccgcctttacaacaaaaagcaaattacaaactacagttactttaaagtggtactatagtaaatgcattatgagcgcataaatgacaaagttcttgcatggtcatatcaatgcaaataaagttaaatttgctggtcttaactgcgtcataaactgtgttagccctatcttctgaatttgtgaaagctcccaagtacttgatccactcagccctctggacatagacgtttgaaacacaatattagtgtgtttgaatgctgtaatatttcaaatggagcattaaaaaaaataatcattgtttacttgcaatggtgtcccctcttcagagggtacataagctgcgaaattgcagccttcatctgtagtgctcaagaaatgtgcactaaattgtgtgagcatctgtgcatcggtcttgttaaaaagctggacatttccacttgcatatgattggagcacacactgggaggcaatttgatcagatgttatccccttcaagttttgtaatactccaagtagctgcatagagtgtcaaaaagtgctgcagggatcaattaatatgagagtcagaggcataaaacatttgcttctacagatgatatgtttttcctgttcagtttcagctgttgcttttgcttcattatctacgattgtacagattccgcattgaacagtacttaatttgtcccgcattgctcacctcgaagaatgacactgcagatgaaacaggaaagaacagtaatctgatcagtttcctatattgtgtacaaaaaagaaaaagcaactctaagtacttgctatgaaacaaattgaagatttgaacgaaaaatatcgaattgaagtttcgtatgtgctgctttcagtgtgtcagtttgcattatgtaactgttgcaagctatggcgccactccgaacagagaccgtttgaattgaaatgcagtctttgctagatcatactttgtacacatattaatatcgaatggttaacataacaactatataacagtggattaaacttcagtgcaagcataaatgcatacataatccagggtgtgcttgatttctacctggagaagccgtggtgtcgacggagtaattggcaagagggataacgaacgacttaatcctccccgtgcaatacttggtcttggtggccatcttggatgtgttctacgcagctcaccaaatcccaaaaaatcagcagaggtttatgtgccattttttgtgcaagagcaatgcgtactgtacctacctgcattagaaggtagctcttgccgttccagttgttcttgacgactttgaagctctggccgtagtatatctggaacctggtggcgtcctccaccttggacaccggcccggccaccaccggcggcgccgcggccttcggcttccccgccggcgacgagctcttcgcgccagccgccaccgcaatgtgcgtccacggcaggagcaactgccacagcaccaccgcctgcaggcagctactacacttataacccatcaccgatctcttcttactcggatgagcctgaaaacttctgaagtagctagtataagatagtaacaagactagctcgagttgggcattgctgtttcttttcttttcttccgttttggcattattgtcgggcattgtggttgtagtagtagtctagtctgaatgtctgatagggagcccgtgagcgagggaggccgtacgtgacagacaggtgtggtggtgttactcggaagaagagctggagagtggcggcctctttttgtcacggcgcggaatcggtaggattctcgtgaaaataatggaggatccatccattatttttttttgaacggaaaaaacagcacagatgtgccttttcattgaatagagcaggagaaaatacaacccctaagggtaaagaaagagaactatggtatacactatacaaagtgcgggactagatcgcgcaatcttttagctcccgctagagcccaaagactagcctcgtccttgattcttgataggaggaagcctgttgccatctctttgtggtcgaatatccgtctgttcctctccttccaaatttcccagacgactagcataatgagggatcgaaggcccttttttgggacgccaggtgtatttgctaaactctcccactaatgttggactgaccgtgcttcctcccactcattaggctccaattgctgataacccgtccaagaagcaactaggctccagattctcttcgtgtatctgcacttgccgactaggtgtattcctgtctcaggttcagaacggcagagagggcaatgcccattattttgccagcctcttgttgcaaggcggtcagatgtccaaactctattttggatgatgagccaagcatggaatttgcattttcccggcgcccagactttccaaatcagggagtttagatttgagtttggcgcccctaagcactgcgcatgataggccgaggaggctgtgtagtgcccattagctgtgaatttccaggcaatctggtttggctcttcactgtttagatgcacattccgaaccgtttcccacaggcagaccagttgctcgacaaggctgattgtgataggcgtggccgcatcgaaggtcagatcattcacccaggcgtcaccctcttttccttggcgcagggactttcctctatttttggagatagcatagacaagtggcatgaggtcttttggtctttgcccatcaatccatgcggcgtcccagaagcgtgccgtattcccatctccgacggctacctttgtcgcggcggcgaaaaggtccttgtttaaaccgtcacaaggcgtctccagtcccgcccacggcttggtaggatccttccattcatgccaaagccaccgcaatctcaaggccctagtgaacttgtccagatttaggactcccaagcccccctggctggtcggcaaacacgtctttgtccaattgactttacattttcccccggtgatatcactcgtgcctgcccagaggaatcgtcgtcgctgcttgtccagttgctccaaagactcctttgtcaccttcaaggcagtcaggaggtaaattggctgcgctgagagcacagatttgacgagcgtggtcctcccggcagcttccatgttcttacccctccagcttgcaaccctccctgatatcttgtcgaagactggttgtaaatctgttttccgcatccttcccagaactagggggaggcccaagtattttaggggaaaatttgccctcattgctgggatgccctggaggacctcagtcaggtctatgttgtcacatctgatggccgctacttgtgatttttggaggttggtgacaagtccagtggctgtgccgaaacgatgtaggatgtccgcgaaagccgtgacatcgcctcgggtgggattaatgaagatgacagcatcatccgcgtacatcgagatccgcagtcgagtcgttcttccccgaagttttgagattacgcctagctctgttgccttggagagaatacgctgtagagggtctatcgccaagatgaagagaagcggcgagagggggtccccttgccggagtcctcttccatgcttgattcgttgccccggcgagccattgaggaggacttgggaggtggaagtggatagcagagcccctagccaatccacccaccttgtcgggaagcccctttgctgcagcaaggccaggaggtagtcccaacgcaccgagtcgaaagccttcgttatgtcgagcttgaaaagcaactttgcccgtctcaggcggtgataacttctggccatgttccacacaaaaaggaagttgtcatggatacttctcccttttatgaaagcactttggttgaccgagatcaaggcatgcatgtggggcctgagacgcaatgcaagcaactttgagaagatcttggcaatgctatggatcaggctaattggcctgtagtctgaaacactctcggccccatccttttttgggattaggacaatgttcgctgagttgattaggttgaggtgcgcacacctaagattgaagatggagttgaacactagtagaatgtcctccttgatgatttcccaacaagctttaaagaaagccccagtgaagccatctggtcctggtgctttatcggctggcatttccttaattgctctatgcacttcctcctcggagaacggtttccccagagtggctagatcgaccggcatgatgtccagtgcttcccaattcagttcatttggcctcggccccgaccggcccatgaagctcgcaaaatggtcatggattgttgattccttttccccatgcgttaccgcccagccattatcctttcgcagtctctggatagtgttttttcttttacgcacattgatcttgaggtggaagaatttcgtgttcgcatcgccttcccggatgtgggttaccctggaggcctgttttttccttgctcgttcgatggaagcgagtccgaggatttttcgcttgagggcggctctcagccacatttcctgaggtgatagatctctgtgctcttgagcaacatcgagcctttggatgacgtcgagcgccatgtggaactgcagcttggcctccgtgcagatgccttttgcccaatctctaagaccgaccgcagtgcgctggagcttttggttgagccggtgcataggctcggtgtgcgacgatgactggctctagagagccttgactttgtccttgaaccccggtatccttgtccagaaattttcaaacttgaatctcctcggactgcgtgggcaatgcgggttggagaggaccagcgggcaatggtcagaaggtccagtaggtaaggcatgaaggacatggtgggggaaagcaaggtcccattcctcattgcaaaagcatcgatcaagtttgacgagggtggcccttcgacgctcgttgctctaggtaaacttcctattctgcaggggaatctcatggagctcacatctgtcaatgactgatcggaaacgtctcatgcgtgctaggttgatattgctattatttttgtcttgtgctcggtagatcatgttgaagtctccaaggattagccacccttccccggagctgggccttagtcttctgatatgccggaggaaagcgtccttgagatggtgcctagtgggcccgtagacggcagtgagtaggaacgtggttcctgtgactatgggcgtcacttgtgcggagactgagaagcggccgattcgaacctcttggacatccaaaactccactgttccaaaggaggaggattcctcctctcgtgcctcttgccggtttaaaagcgaatttatcgagcttgtagcctcctaggaaacgagcgagtccgtcgtctatgttctggagctttgtctcttggaagcaggctaaggtgcactttgtgtccagcataagctcgtggaccgtgttgcagcgcgcaggtgaatttaatcctcgtacattccaagaaatgacatctagactttgtgccatttatcaacaaaagttctctgggggcatgtacctgccttcattcgatttggtagtgaaggtgccggcacaaaatggtttggtggcccaaggtgaaacggcggcccaacaaatgggcggctctgcccagcttggctagacagcccgataagggatggcggcccaacaaaagggggacgacggcttgggaagcgacggcctttgggcagcccaacgcgcagctgtgcgcgcttagcgtggcccaggattggatgcgtgtgcgcgctgacgcgtgggcccgtgtgcgtgagagctgttggcgctcggccactgacgcgtgggctagggaggctgacagctgctgtcatgggggctctgacgctgacgtgtgggccggggcgcgttccgcgaccccaaggggaggccgagccgttcccgggcgcctgtaaggtgttcggccacggtccacgacgcggcttggtggacgagtctgtccggaacggcgacgagggtggcggcgacgagggtggtggcgaccatgcatagcagaggcaaacacagcaatccacgcagtgaagagagggaataccaggttcttgccgacatcggctacaaaagcacaagtagtctttcaacgttgttgggcaggctgcacgcaggccgccggcgatccaactggaggaggctgctcgcaggccgccggcactccattcacaaagcgaagaacaacgatacatggagcagagatgactcccgagacaaatttcgcagtagcgaagacgcattaggcagcgacgctctgctctgcttcatcggccgcgtcggcgatcccttcgccattgttgcgttactgggcagaaaaggttgtggagagtacttgtcgtcgtccccaggtgtcataggctcatggctcgtaaagacgatatatgcgtgtcgtcgcgtggactccgggtcggggagagcgcgcgggggcgggccaggtttcccaaaccgtcaggaccgggtttaccgtaccccgacggtaggtaaccgtgaaaagccgtgcaaattttatcaaaaatttaatttttttaaatttatttaaatttaaagatgttaccatagtatttatattaccgtgcccccacgataagcccgtaaccgcggtaaccgcacggttactggcggtaaagtaaactctggggcgggagccgccaccaccaccgcccccaaattcaccccccaatggtggctcgcgttgctccgatctgcttgccaccataccatggtcggcctgcggcgatggcttagctctgccttctcggacggggttaagcgccacagctctgcgtccatctccatggcggcgaagtggtggaaacgctgcaccctgaacagaagttaagaggatccacttcctaggagagatgagtctggtacagtttacagttgtattgctgataggataggttttcttaactttgtgcagtagcatttggaagaagagctgccagctttgctagcttaaggttcatcgccggctcgccgcaccatgtaaggcagcgtgtgtggtgtgcgaatcgtgaaaaccaaacaaatcgatcagccgcactagcactagaacatctgcaccgcttgctgcagacgagtacatctagctaagatcaaacatgctacagtcaatgtgagtctagctttgaccaagagggcatctctcattcagtagaccgccaaatacaatgccaaccattatcacgacattcagagctcaaattggccgccaccgtgaatgaaacaaatacaattaatattgaacattatgtgtgtttacatgtatatatatgtatacatctgtatttgcacttacaaattaacgatagtattttgatacaacagggttagacttagaatggacgacgaacaaataataattaattgacatacattctccagttatacaccagttaataacagagacacgaagacagttaattaatgttaaccttctcttcatgcactagctaggctcgcgctactgaggttatagcagattatataacagtagtgtcattaattgacagtcatggaaaagaccttttagtgatcgcactcagctggagtgctgatggccaacgcggaggttagaaacgtccatttcccactcaaaaacatgctggaaatgcccttccctttggagagcggaagccacaatttgttgctcccttcacgaccccatcccggcttcatcacttctttcgccttcttcttgaccagctcttgctcagtagggcagccattgatttgcttcggtgctaaaaggagtgacacaatctgcagcagctcattcactgtggtttctttgctgcccaacctttggtatgaatgtgatggcctcatcatcaagaacttgtcccttatgagtgccttgaacttgctaaaaatggaaaccctaccactaactttggtcgtaacggggaaatggaacttctcggtcgccttactgacggcggttgctgccgggttcgagtggaagctgaccttcttcgatggctcaatgcggtggaagaatgtcttcgccgcagcgacccttgaaacgaatagcctgtggttgacgtcaaccttctcgtacagatcgaaagatgcattagggttgacgtcgtcgaaaccagcagcaaagtcgtcaggttgagattgcgagaagatcggggcagtgtcgatgccgcctacgtcagtgggatcggtcatgcgatgaccggcttctcctgcaatctagctctgagttagtgcatgcaagaactgtatctgtatacagtctgtatcgaatatggaatactgctaattacttctgtggagcccatgtaaaacagccaaaattaaatattacatacctgaattatctgcagtgacttttatagggtactgcgcgatgatgtcttctgttggattgctttcatctccttctacaacaatctgcttgagacaaatgaagcatgaaagtaatcagtctcatgagatgtagtatatatataatgatgggaatatacttgtataggtatgatgcaaacaattacctccccaaggtcattgttcaccaacttgactcctctaaggttctccacccgcttcttctcgtccttgaacacctccatgtcagcgatctcgacctgtagccttgcggattcgtggtggttagaagtgccaacgccgcccatctcaactagagaggacagttcattgacgtagctagcactgcttgtgctagctcctaaccacatttcagggtagctactggtggagccattaattagctcctgagaggcagtcgcaactgacaggaattcttggagaatgtcaacttcgttggggttactgcgaagtatgccaatcttcgtgtcaaggctgacgtcctgtgggaaatcctccacctccaagggaggcaaggtgagcctgtgctgcagcctcgcacattccagtgcaacatccacctgcatatgaatatcattgcaccggtaagaactcattgcctgaatatacatgtcatctgtaccagtaagtaaccttcatttttgactatatatgtatatgtaccttggatggaaggcatgagaagttggcagaaactgggttcgtcaagaatggattggtggcgttgaaggcatcttcactcagaaactgcatccatttgccatcctcgtgaggtgcactcatctgcattccaaacccaccgtgcatggagtccattggcgtctctgttgggaaagagaagctgctgctctcaaagtcatcacctcttccatcacacgacacgtccaacgttggggagcgatcgatactgctcgtcatccattgaggttgctcgacatggtggtgcaccacaccataatgctctatgatctttggcccgggcgctgtcttcttgaacacccggcataaagcatatgcatcctacatatagacacacaaatgcaaagaggttgcatatcagaggccgcgtccatgtcaagcagctagtaacatattttactctaggtttataatttcagaaaagaagggctaaatataacatatatggtttatccatatattatggttgtagatttaaaaatgcaacaagattaatagtaacacacctgtaagccagtgtcagtctcgcattccctctcatcgaggcggtactcgtgcatgacccaatcggtgcgagaaccatgtggagctcgaccacggtagtacacaagagtcttcttcataccaactgcacgcctctgtgagttcacttttcgatctttcccagttgccttccagtatccggcttttgttgcacggttcgtccttgatccatttgggtacttgcggtctctagggctgaagaagtaccattcgagatctttactcggaagaaaggatttttctgaatattgaacgatcagttagggggtgtcatacaaacaaaaagtcatacataatcatgcatgcagcataaacattgaagtacttgtctactatcatgattggatctaatgacagagttaagatatggctatttaacatgatagcccaccatagctgaaagaaaattagaccaaggtcactttatatctcttggaggctgtgcggacttttgttcatcttcttgacctatatgttcatcacaagttcctttcttagtttcttgctttattttgtcaccccaagaaaaaaggctcatctttattttctctttttattcgatatttttacagcactcgcttcgtagaatgttgaatgctacatggtgtttttgtagtaaactgtcaagcttgaaagcaaacagcaagtggataaagagagaatatatcttttcctcaaatctctctgtgattgtgacatggtccaaaatatataaactttaactttgatgttactgatataaaggatttattttccatttcaagtatctcagtgcatggacgtatataatgtcacctttacacttggcagaaatttgacgtttctttttgaaggtaaatttcttttgacaaaaggatcaagatctatcaatatccctcctttcggtgtgcataagatgtttgaaagtaaagcaaatttcacagtatgattaatcttgttttcacacaaagctatgacagtgaaacatcgcttttgacaatgcttgattttttatatataaagagaaaaaaaatcaaatatgctttgatataactagcaattcaaatgtaccaaaatttacgaattaatcatggaaaccttttcttttgtgacataaatgacataaaagctacttatgtgaaataaaagaaaaactaaaacaacagatagagctacacatttatagccaggattaattagtgattattattacatacatttcaactacaaatagctagatgaagtgctcatcaagaagggaacatgtggttattctttcctcaagtagtgtaggcactggtgtttcttgggagggcataatagtataagaattgaataagattgcttagtgtctacataacacggcatccaataaacatactggacctatatatgtgctttccttggagaacaataaaggtgcatgcttgcctatagttaattgttaacctgaattttaacatgcatataaacttaaaacttgtccttatagcatttatacaaaagtctcatacaaattatatatcatgaaactgctattcctacccttaaaacaaaaagaaagaaactgttactcctatatagcaagagaatgatatataagaacgccaattggtgatagctgcatgggcctagggttggattgaaatatatatatcctagcatgggctacagcattctaacttctaccaccaacaagcaacataaaaactaggaatagatatctttagaacaagcaaactaagaacataccaggcagatcccaaggctcacacttgtaaagatcaacctctggaatgatttcgagttctatctgtcttccgttgatcttccgcttaaggtagtagatgattagttcttcatcggtggggtggaacctgaaacctggaggcaaactcacgggcgccatatgcttcctctagccttcctctcaaaactccaacagcaagagatgcttagagctaggcaggcagctggcaagccggctatccaaagctaaaatgtggacagccaccgaacttgtttgaatagctatatgaatgaattataatcagctacaatgtacaaaaacctgcaacatacaataacacatagatgagttaacaagaatgtcatgcaagtaagacaaaatgaagaggatcgaggaggaagagaggagaccttgatgctattggctaatggcacatgagagaggaagaacaagagagggagggaaaggggctgcgggagggagtgtgctttatagcaagttttccgagagtattttatgtatatgtttggattcttgccaactttctcaagaagctactactcctccatgtacagctctctcgctctctatgtctctctctctcaccttgggtgcttttgctttctgttgtcttgtgtcagttagctttagcggtgaatagagaaatatcccaatcttctctccttgtctttggctgccaataaagtgaggccctgtagctccagagatggagagatgccattggttgctttgtggggccaccatggctgtgcctagtcagctctcgttggaaagagtgaggggcccaaggttggtactcgattcgcgcgcttttttgcccctggcagcctcccccccttccctttgacggtttacgtcacgttcacacacgcgcccccatgtagattttgccgggggccctgcctcgatgcgtgtgccctgcatgattagcagctaatccatgtactatagtactaatactttgtcaaggagctgattaactgtctctcaactgagaagcacaatgctgagctcaagtttacctgtacattcttccgttctgggtgtttaagagtggatgccatgctcggtaaccgatgtgatggatgcagcctgctggccgacagtaagctactaagctggtcacctgtggagatactatcaagagaaaagttagtgttgaatatattttgattgatttctgtatattgtgcaaacttcaggttagtactctgaacgaatgtgcatgcatgcatgcatgcatgcatgcatgcagtggaagtcaagatataattggtgaatgctcataaaactacttcaaggagctggcttacgatttaaaatagtacataaacaacatatattatgaaaaatgcaacagccataacactagaatgcaatagccatgaccctaaaaaaatgcaacagccatgagatcaaggaatcaaatgacacttgcattgttcagttttcacagtttggcaagcatccatccaaggtgacaaatttggcaagcccatttgccagaaacaaaggaccctaataagagcaggtacaatagcgggctataaaccagctataaacatattttaaagagataaaggaagagagggaagagcagcgggctacagatctgtagccagctgcagcacggactccaagacgtaacgagtgtatgacaggtgagaccgggtattaatagtatagtaagcaattattgtatgaattggctattacattggctctagatgatttggagctagtacttggctatactattaaacttgctctaaagattgtgctcacaactgtccacactgaaaggattgaaaaaggcttctgttggatctagtgagcaaccagaaatccaaggtgaaaataggacccactaataccaaaatgatttcgttcacatttgacccacagttatctcattttactatggttttcagtaaatataatatatccacaaaccaccgtccttttactgaagtcagcaagagcctgctaaaagagccattttatcctacaaacatgggcatatcagaataaaagagatcactgattaggatgcgtttgaactatggttagggacaacacaattggttggtccatgatcgaattatactctccaattcattctagctaggtatgcaatgaaccaatgatggtgacgatctctcagcagctatcaaaaagaaaaggtggttatccaacaaatgtactgtgatagccaggctttcgacacgttcctctgctaagcctacatggcaagtgcaagagctgggtcccgggcgcttttgaggccctccaacttgcggctgctgatgcatagcttgtgggccacttttcctttttatcaatccatccgccccagctttaggttcctttccccttttcgagtttatgcttctccccaccacacatagcgagtatctccaaaaccatcccatcggaagctattctacgtatctagctccctcctgcctcaagcgtatcatgtacaagtacattagtaaatacgaataatggcacaactttaactgagtctatgatttgtggcaacgatatgatacgaaaaaggaacaaggtgtccaatgtaatgtaacatgaatggtaaaacaagtcggtcgatccgacagcttagagtgaccaggaaggacacacatgacgcaatctatttaaaatataaaagtgcagtgatttagtatttacttaatattatgaaatggtgaagtacgatcaaccagcttgattagtaaaggaggcacaaatctccacaacttcacatggcttttaaggaataagagcagataaagggagaatttagcccacctggacccagcaaatcagctaatgtatcttaacaatgatgacagattgccagagacaaattacgttctgatcaaactaatgattaggggcttaaggtctttactagagcctgttctatgatagctacatctaaactgtttgcctttgtatgataacacacaacctatctttatttttgtcttattcttaaacaccaagcctacaattggatgacatatagtcttaaacatcgtaatgtaatttgaggaataagcgtaactggctatagaacttcaactttcgatatatttcccctgaggactacacaattcagttcaccgttcagatagctagcttgccagcagtaccagttttgatgaaaaataactgacccgcaatagattaactgtgccaaagaataattcttagaacattgaagggggtgttgggatcagaccttgagtgcccacattgtcatccacggatagatcagtggcctctgccagaggcaagcaaagtacttcaacctggatacggaaatagttagaattaagatatgctgagatatattccattcaaaagcatttcacaaaagttatttaatcacaaaggttgcagagctgaatgcagtgtcggttctgattataggtgaagaggaatcaaaagaaaagaaaacagaacagtgtagccgaaaggataggccacccttagcctcccaacttttgaaagcccaaaaagtaagcccttgttcaagtatagtaccttccacaagaatcttcttgtacccagacaaggaaagaaatctgaatacctgaagaaatattatgatgataatataaccagggcagaaaactttatctgtttccattgtagacagttcctgctgttcaatccataagacataaagttcgtatttctcctgtagcagtccaaaactccaaattcagttcccaccagtgtcattttctcgactgatgattaaaatccataagacgataagtaccctgtaaagtaaagtagtttagacaactcgcaaagaatttgcttatgtcatgtccagtcactacgtgaggctttcacatggtttattatctctgatttgctggccatagtgagtgcaagaatcagtaatagcacttttatagcagcactaacagtaggaaccaacactcagaagtcagaaggtgtggctcacttactacactaaatctaataagccaagtttgaggactcactctgacagcattgctcagaggtaatctgaattaagaactcatgttctgatttaaccttgctgctgcctgctggaccattatcttcctggcagcccatccactctgtaccataatttattgtatcttccttaatagatgacaaaaaaaagatcaaattctgatattctaaattcagaattggaccattatcttggctctatatcattgcagctaggagcctagaacactagctcgatccgatgtatgtcaaggaaaatcttacatagcattggagagccaaaagacacagcataaattgtcattaacttcaatcagtttccagttcagactactgcagttctgcttgccagcttcatatctggtggtagaaactgcaaaagtaagagaagacaggaaatttaccatttacagcattgtacagtatactttgaagctaagttatgcaaacatcataacaaatacatatacagggagggaataaacttggtcggttggtccgttctcattgtatgtcttgtttagcacaattaaacagaataacttggaacacagagatgcaggtttttggagcttgcagcaggtaaacgcaagcacaaaaatggaggaaaacatgtcaaaatgcaatcttcaacaggaaaaaagcaattatagaactgaggtcgctatcgaaccaaaagttagaataattgtctttgttcattggatactgcaggcttctaagctataataaaggaacctgcacatgtttagcatgcttccttttctcttgacaatttgagaaagcaagatatcttgtgagcttctgaaatttgaatatgatacagttcaaggtgaaacgaacaatgtgctaccagagcactctgtctattagttttatcattgtgaaacctcttgaaaaaagcatcatgataagttgataaccggcatcatcatagtatatatatagctaaaatgaaaagggggaaaattggtagtggtgaaaaggaaccgtcattttcagttctgaggcaaagaaataaacccaccttgttaaataggatagagcattaaaacaagaagaatggactcatattgcggttaaggaaataaaccaataaatcaaatatcaaagtaaatgacatgttaaattaagttcctaaatagagtgaacagttcaaaaagtttacactgatagtctgttacatttctaatttcagaattttcttgtgtttaataactgtcagaaactcagaattcattaattttttttaaaaaaaaaactacaatccactgaattgaattttaaacaatacttatgttcaagtactagaatttagaatttctgtatgagaagccatcagcagggctttcacatgtgttttggccatgatttcgtgatcctagaagcacaaattgaacttaatcaacaaacacattgattttagatgtactcagaagattctactaaaaccttatataagaagatatacagccccaagcgattactataaacaactcctacttgcatgcttattatggtaatgttcaatctctgctattatccaaacacataagttaagagggcttatatttgcccacattacccttagcacttccggttttctttccagactaacataagaaaaaaagttcaacttaacacaagaacgatgaaacaattgtggtaggctggcagcctgcagctaagtctgcaatataactccgcaagtccgtaactaccctgtgaacaagcagatttcttcaaaatgcatgcaacttacgttataaacccaggttttctgaatattatatttacgctttcaaacataaagagtgacttcgcctcaagttatatgtagagttataaagtttaaaaggctagattatgaaccagtccacaatgttcttttgtttttccatataccagtcatgttctcggttaaaattatatgtgatgtgtaatgatgtttatatcctacattatggatacttcatagctttctcatgactgctaacatacattcaaactataatagattaaacaactgatattttcctatcatacccttgcatggcaatacaagtctccccctttaagatccagttgtgcaagtacaagtttatgcatcaaaataacaattaaacatttaaactgtctaaaatgatcatagttagcttatgtacacacattttttctctctctcaaagataagtcactttcatggaaatttccatagccaggagaatttatcttatgcaaggaccacccacaactcttagcgcactgattggtacttctttattatgttgatacattacagtgaggcctgacgctgactaaacactacacgaaaaactgtggctatacagacatggaactaaattgtaattgataacaatggcagctctcgttcatgtatatgaggtgcacagcaattttcaactggcttcaaccatgcagtgagataacagtacacatctaaaacaagttatatgccatcaaagtaagcagatgcaccagaaaaacttggtccccatatttgattggcatatgttagctcgcacaaaccaattgtacaaactggaaattatcatggatttagcagaaggaaaaattggaaagcggacgtgttcaaaaactgtcacagcagccaccactcaccagtcatgccgacccaccaaccagtggaaagctgtgagatattctgcaaaagatagaagtgcgcggtatgttatcagtgcgccttccttctgtttgtgataccttacaagtataatgtatcacatattcgcattacatacttcatgctgaatcagacatccagatatggataaatttggttcaggacagttatcaaaatggtgatatgtggcaaagcacagctgtgagcaagagttaaataaggttaccttttttagttaaccttctaaatagacaagtacaactacaaatccttaatattatagacatggcttgaaatccacattcttcgtaaagacaatgcaaatggtccctaaattttgcagctaaagattgaataggtcacttacaacaagttacagttaatttgaatcgacatcaagcatcagtgcaacacacacttaattcagagaacgtctctgcataaccaaatcaaaaaggcaatgggcagttgttttcttgaaatactatccgacatcccattttctcatttcgcccatatgcaacaatgtcggagatgctaaagtgccacaacctcatgccaaataacccatacagtacttcatatttcagagctaatttcgtgcccaactgagaatcaaatacctgcaagctgcattgacagccccaaattaaagaaagaaagaggtgatgggtgtagcagcatacctgttccagtacgcaaccgtcattgttgttcgatcggcggcacaatatgcctcctgcaccccacctccggtaacagcgagagcattcggattggggccgcgaggcatgaggggagttcactcgctgaggagaccagcgcggctggcccgagatgagactcggaagccaaagcgaccgatctactatcctcctgggagtggcaatggaggccggagaggagtggggatgcaaaggggagggagacgagcggccacgctgagccagcccgaacacagtcgcgccggcatacgaggaggcgaagagaaatccggcgccacccacaatcgcccggcggcgcgagagcgccgagcagcaggaggccacgtgcccttgcagcgagggttccgtttcgcggcgtcaaggcgcagtctctgcctgtgcggcgggtcccttggagatgggcaaacgaggggagagaatgggggtggaacaccggagcggcggcggcgcagccggcggtggtcgccggtgggggtgatcgctgcctctgtcgccgccgcgacggggaggtggcaaaattcggcaacgaggctgtgggcttggactcccagttgggctttcggcccagataccaacgagtcccgaagagcccaatttggatttttcccacccacccgttgaactttttttggaggaaaaccgccagttcgaatctcgaattttgaaagccaatagaccactcagctgatacatcgttcaaattacgagcattcacatggagcgcgaaattgcgcagtttgcaacgaaattttcaagatagccgcctctcaaattcaaaaatggatcagcgcatacaacatttcaaagcgaccaatggatcattttttggaagacagcaagtcggatgtactaatcaagagagaaaatgattcatttaatccaaccatccattcactttgcacaagcagaaacaacgaagtagtacaatttccgcaacgaaaccctaagcaacgctaacggcatcagatctggatcgagcacagggggccgggaactcagccgccgaagccgtagagggtgcggccctggcgcttgagcgcgtagacgacgtccatggcggtgacggtcttgcggcgggcgtgctccgtgtaggtgacggcgtcgcggatgacgttctcgaggaagatcttgagcacgccgcgggtctcctcgtagatcagcccggagatgcgcttcacgccgcccctcctcgccagccgccggatcgccggcttggtgatgccctggatgttgtcgcgcagcaccttcctgtgccgcttcgcgccgcccttgccaagacccttgcctcccttgccgcggcccgacatggctgacgatgcgtaagagctcgaggtggaagacgaagacgatctggaggatttggggattttgcttgtgagatgcggaggagatgggcggggtatttatagcggtgggaggaggcgtttgggcgcggaggtgaaaatggagcgatccgtgggaggtgggggtttcgcgcgatggatcggaaatggacgggtatgattgggtacggcttgggaggacggatcggtgacgtggcggggaggaggggttcgatccgtgtggttcgtaaatggagagaagtgattggttagacgtgagaaggccggatagatgacgtggcgtcatcggatttgtgaagaccgggctcaaaacttgggctggaattcgtgatttctcctttggacttgggcttttagctgtgggcttgcatctactcttgctttggttgggtacttgttctactctttgtaaatacttgtgcaccttttcacttcttttctatcagtatatgaggcaaatttcttgccttcatttcaaaaaaaaaaaaactacacttgatcacagattcacacttctagttagtgatggaaaacgaaaactgtgtcaaaaaactgtgaaatgtttgttatgaccatccatggattgccatctgaagatatggtcagtagatgattcaagcatttgccaaaacgcataacatattttgaagagaactatccaaagttctctacttctcatgtacacataagagacaacagctatgtacacagacagcaaattggtatatcaaagagtgcatagtctagtgatgtattctacacctctcagagaaagtacgaaattgtactcatattcagctttgtattgcaaacaagtacctagtctatcaaagtatttgcatatacagataccagatattacccatcttcagtacatagaagaactactgaaactgatgatacagtccaagtaagaactgggaatgctatacccacaagaaaaataaaacgagaatactactgaagttaatctcaataggtaatttggtatgagtgtttggcttctcaagtacttgcatactcaagtacttactccactcatcttcagttgtccagcggatacatgatgtgcctatcaaagaatttgcatatagaagtaccagattctatctaacttctgaaggttttggctgtgtacatccgaaatagatgtagaggccatgttctttccattatctaaaaaaaaatatcttctgtagcttttggcacgatccaaaagaacaatacgggtgtgtttgtttgctcgtatccatctagcctggctcatctctcccatcctggcttagtttgatctggttgaggggatacatatgtagctgtttggttgttatagattggaggtatggatacctcctttctttgagggtaagattaccgtctataactaatggatgaaattttctatcatctcaaagctgatcgttttacagtatatgatatcgatttttaacaaatgcgaaatatgcataggattgtattagtcagtgtatcactgtatataaaatcaagtcattggatttcttacactgacgaataaaatagtatatgaaccacatcgggtgctacagtattgcatcaactttgttatgttcaattaattcatccaagtggtgagaaaaaacagcaaataaataaaaggaaaaagaaggcaggtgactgtggcctcgtcgccgagacagccaactacgccgcggtggcagggcgtagatccggcaatagcgggatcctgacgattttcgccgccatcagtacgtccggatccggcaaccagaagcctgaggccaccagatcgagctcctgggctctggatctgacggaagaagggagaggaagagggcccgatgcagcagctatagacgaaggcggtggcgatggtggcggtgacagcggcgactaggaggaagatccgggcgtcagcagtgacaaccctctctcgtcgtcacatctggattcggatgaagaagagcaagtggcatctttggtaggagccggattcgacttcgacggcttcaagcggggctggatttggcggcggcggcggcttcgaggggaggggctctagcggttctggttgaggaagcttcgatggctttgtcgaatatggcacgatgatggagatgacggcgacggtgcggcgatggagacgggaggcaccgagcgacaaatgagatgggaaggtgagcagaagctggaacccctctcgcctcctgcacctgcgcgtccccgagcttgcacccacgcgtcccccgcctgcacgcgctcagcccggatgaggagcgaagctcagatcgaccgtttctctcggacctggctcggaagcccgatttgcacgcgtggagccaggctcgggtggccgtgcaggcaaccaaacaccaaaggcctgcacccgtggatgcgagccaggtgcgatgcagagaaccaaacacaccctaagtcaatccagtggtatgaatgtctggctttgcctggcgatggtgattttcatatcaccatttgttcctgatcatgtctgccctcttctctataacagccaggtgactgatttacggcaagacctcttgacatctacatcacagaacatctcagggagaggacatcaagacaagattcattgtgctgattctgcatgtacagtgagcttctgaaaaatcaacttcaattcagcatccagatcgcccttgccaatcttgtgcaaatctttgataactctagtgtaagcagaatggtcaggcaagagtgcctccttgtgaattatttttcgagcagaaatttcgcctgtgaatgtgatttcctaccacattacacttcaacacagattcactattctaatcagtgatggaaaaggaaaacagtgtcacacaaatgttcacctgtccttaaccatctacaggctgaatgtaatggcagtatggaacacaagtaattttcctatcaaagaatttgcatattcaagtacttgttccactcatcttcatttgtactgcaatcctgtagataagtaatgtccctatcaaagaatttgcacatagaagtaccaaattctgtctaccttcagtaggaaaaaactaccgaaactggagttaaaatccaaggaagcaatgtggcaatccagtggtacgattgtttggctttgcctagtgactgtctttttttttctgcaggaaatcacatggtcctctctctacatgacaacagcttgcaccatttgtgcatgattcatgtctgctctcctctttatcagccaggtgactctgatttacatcaagtccttctgacatccacatcatagagagaggacagaaatgacgcaagacaagactcatcacttgctccaagactacttgaaatttcatcccgctgattctgcatgtacactgagcttctgcaaaatcaagttcaattcagcagccagatctcccttgccaatcttgtgcaaatctttgatcactctaatgtaagcagaatggtcaggcaagagtgcctccttctccatcaattcatacagaattcttcctgcatcaacgatcatccctgccttacacagtagcttggctagcaggctgtagttcctgttcactgagcgcctgtccctggtgctcatagcactgacatatctgcaagcatcatctattcttccagcgtataagtaccccttgatgaaggctgtgtgaatcgtaatcctcggtgtcaatttctccaagaacatctgatcaagaatccgcatggctgaatccatcctccccgctttgcacgcatggtatgctagaatctcgtaggtcagcgagttcgggatgtcgttgtgttcagacctctccatggcctcaacaagctcacaagcttctgcaaccctgccgttcttcagcaggcacccgaggaggtagttccaggagttagaattcgggccgaagcccgacctcctcatttcgtcgaacacctcgcgggcgccatggaagtccccagttttgcacttcacggcgatgagggcgttgtagtaacgtgcccccctcgccgtctcctggatcacagacatcgccgcgtcgaactcaccgatcgaagctagcgccttgacgagcgagaacacgccggacgcacggcaagggcccccgacttcatccagcgtcgctagaatcgctatcgccgtatccctggcgctgccctgggacgtgttcaagaaggcgaacgcccgttcggtcaggggaacccgccgcgtagacatgctctccatggcgcgggacatggcccgatagtccgcgaggctgccggcattctcgacgagcaggttgtgggcgtgggcgctcggggagaagcccctgcggagcgcgagccagtcgaagaagcgggccgcggggaggccgcggtcggtgagcgcgcggagggtggccgacacgatggggtgggagagggcggggtcgaggcggtcaaggtcggcctcgaggctcctgccgccggccgcgacgaggcgaacgatcgcatctgagaccgcggcggcggcgggggcggcggcggaggcaacgctgctggtgcggggattggcgggtttggaggagaaggttgcgcggggagaggcgaggcggaggcggaggaagacggcggcggcgcggtggagcggcgggaggcggaacatagagaaggagagtggagagtggacacgaacgcagctctaccgccgcgcacgagaaatagcgaaggtcacgcgcatgagctgagccctctcgcatgtcagtgtcacaaaggtgtgtactccctccgttaaaaaaaaactaaaattcaatttgacacattttacttactactatatgattatagggtcaaaacctcgccttagttacgtgattaaattttttttgcaaggtatgatcaaattgtggtaaattttgctacaggacattgttattctatggttttagtcgtaggacactgcccaaactcacttttagagaaaaacacggtaattagatattttccgtagtttggcacactatgcttatataacagccatgcgaaaatagcttcgctaggaatttgggaatttcgcttcgcccgtagagtagtaagaacaggaaacagtcgcaaggtcaacgttttacatgcaatccgaaaaaaagaacattttggagccataggtaatttgaacttcgaaaaaatcattctctaagttaataaaatggttgttcattctacgtatcaaaatattaacgatcaaaagaaatacatcaacaaaatctaataggataatataatcagttgtattagcaaacatgaaaagctaactccacaactaaagctacaaaacaacagtagcaatcacaattagaagcactaagatcaatacaacaatgtggccaacaggatacatccacgactccccgtccatgaaatatatacatcctactgctaagagagaacaacagtgattgtaaagctccacgatctgaatggagatgcttagatggatgggagcagctacagtcatactcccgcatttggattgttgccagcaagaatgagagagatctccaaacctctgctgaaagcctggttaaatagaagtcgggtctggaaggtggatatgaaaggaaaccaggaaaagatggctatcgggacaaaaatgatcattcctgtgccagcatcgtacaggcgagctagagagcgcactgttttccatagacctagtttcttcacaataggtttccacgccacagcgatctgtattatatataaaaaaaagcatgggcacgaatattaatgatagaaaacaaatacaaaaaggaacatgaagtactactccatcccaaaaagaatccaaccggattgggtttttttttgggacggagggggtaggtgttaggtgcttcaaacaaagaaaatagtacaaaatttaaacttaaaataccacttgtataaagagaagtaaaaaggacaattggcattgggtaaataactactccctccggttaacagtatagaaaaatataggaagctcgactttatttttactgtcttcgaggcgagtttataaaatctaaaatatgagattatgcgtagtttccaagacaaatctatactaccaattttatgttttcaaaccaagcacttcacgatttattgatactcaaagcttccaaagtttatctggaaaacatcaaacgctagggatttgaccagagaaagcagctttaatagtgcaaggagtaaggccaaaagaaatttgggaggttgagtacttctgtgaaatactttaggagaatagtgaacttcatgaaacatattatctgctacgcaggaacaattttcaaaactgagttcacttttgcaccatcctgtctcagatggacattgatgtttctatagaaactcaccgaaagaactccccagccagttggcacaaatgctaagatggcagcaaacacatctttgacactaaggcttgtaaacacaactgccacaaccaagcccgccaaaaccatcagtagcgcaatgcttttgataagtcggaggaacaactggaaatgcaccatcgccttgggattcaaaccgaatacctgcagattaatacaataaagaaaacaagttaatatccagatatgtgatattactcagatacctcatacagtaataaggaattcacataccagtaagaggacaaaaaggccaccaagcacagcccatgatatccaatatatctacaaatcaaattaaatgttccattatattgtctccattaactagaccaataagtgaagatcaaaatatataatcaaatagtatgttaccaaatttctgattacaaaaatatatcagttctttgtgttcaatatcagagtattaatagcacattcaaataaaaaaaatactttcagaaagtaaaaaaaaaaaaactgaaacatatttggtcaacgaatttcatgccaacaagcaaatcaaatggatgctgaaaacataccaatagtgctttacttgattcgcttgcatccatatggtaaacaactccatactggaagatgaaaaatcttaaactcagtacagtttccagtatcctcccaccaacattgtgaatatgtgcctgaaaaagaaatgttctgatattaactatcattcaatgacttcaagcttggtaaaagcatccattttggagctcatcattactttcgtcaattcagtcatatgctaagagtagaaatagaagccaatataagtgccagtaactgcagaagaggaatcaacgaaaagaataacaaaagtggcctcaagaccttacaacaaatgtgacagtagattctcatgatactgtcaagctgcaataagattactccctccgtccacgaatataagcatttctaagctgtttagtagatattaaggttgaggagaaaagactttggtggccctccttaaatgagggatggatggagatgggaggatggttgggggtaagatgggaataaatttgagtgagaggtgatttatgtgacaagtagcactctggaatgcttacatttgtggacatatgaactagtgaaaagaactagtttttccattgtatggaacaaaatattagacacaattaaaaatgctaatcatatacaggcaaaattcagttaccagttcttcatcccaccaggcttcccaactttcttctcccttaaccccaataccacctcggtaaaacagccaattcgtccagtctctgaaatcctcaacgaccctgagagaggtattttaatcctgataattcgaatttcaaatataattacgcagagtaacacatgcatagaatgcttagcagcttacttctgccattcaaatccagatggattgaatatgtatggagcaaaaagccaagaaactgccataaaccagctacttatggaaagcaaaatgtagccaactgctccaccattgttaaaaccatacgctaaaaagatcactaacaaaagagcaacctccaacctgtgaaaaacaaaagcaatcatcacagactgtagttgcacacaattttgagagcaaaatcaggtgataacaaaccctttcacaaaatggctcctggaataaagacggtagttttcagcaaatttgatatgtcgtaccacaaaacccctaccggttgctctatactggtaatccagaagaaacacatcagatcaatacagagtaaaaatcagaagtagataagcatcacttaaaaacaaaggaccctacctttgcaccaccatgtagtattgtgcggccaaaatagtgggtccttgtacccagggagaaagtaaaaaatacagagcaaagttggaactgcatcgtgatgaagctgacaaaagcctgtgtcacacattcaaatgtaaaaatgcatttctccaggcaaaatatattagacaataaaaaacaacataggcaaataaagctaacaaatgcagaaaaatctatacgagattagaaaggtaagctccactcaacaacaaccaactttattacaacagccaataggtgaagactctttatgttgcagtgaagcacattgaattcaaaaacacaagattgaataaatgaagactttgttgataccagaagaaaaatgacttgagttatatcaaatactgtgttgcattaagaagatgttgaaaacatttcttaggaaaataattccatggaagataattgaccatgagtgctcagatggaacagcttaggttatttgttggcaagataaaaggaataccgtcaagacaccaaattccaggatgaaacccagaatcataggaatagcagtaaatacaccaatctggaaaagaaactgtgtgttcagagctgcattcaaggctgtgttctgcaatatatccaccctattctgaattgattctccaactccagacaaagcctacgaaacaaatatagaaggaatatgtcaactagtacaatataatatcctggtcagatatggcagaaaaaaaatgtcacaaactgaacccaagaaactggaacgtaaggtaacgaaagtgcaaaatcgtgaaagggtagaacataaaaggaacacactgagtgaacatttataacaggattttctagaaggtactagcaagaaagttaacgtgcgttataacatctattagctttacaggtgcaaaagtagaatatagaaggcacacagcatgcaagcgttgcaccacccaataaaacagtgcttatgcctccagcacattttacttaaaaaatatattgtcttgcgtggttaggaatgtttccaacttaatatacaaaagataaaataaagaacatagcagacatagaacaatgcaagcaagatgcgttaattaccaaaaaaaaatcttaataacaaacttcatacaattgacagcatagagcaatctgagtgaagtcattacaaaaggtggacaataagcaagtaaagtgacatgttattatagagagatgttaatatcaaagaaagtagaactgattttctgccttaccagataggttttcccatagagaaatatgtacacggtccaaacagttagctgcaaaagagcaaacaacttaagatcagaatttattttagaataatagaatcatgattgcagattcagggggatagcacctacaacaagatcaatatgtagcatcaataatctatttttgtacaaatttaattttatgcatgtacttaataatataataaaaatggtaccgttcaaaatcctatgcatatattaattgttttaggtcaagctgctgtattgtgggcaatctgaagtcaaggaataatgcatgttttaattcatatgttctaaatcacccaattgagctgattagattcatatgtttttagatttcctcctggtcaatactgaagatgtcgcaagaaagggcagaaaagctacgttggggcatcatgctactaatcaaggtagcagatgaggtctaattatcaagatttggatggagaccaggggctagatggctggaatgatggatggagcccgaaggcagagaggtaaaaattagaaattactgaaagatgctgctgtttgtctgcctgggaagtagttgctgggcttattgttcctttggttgtctagttgaatttcaaatcttttttagctgggttggccgaagaacaggccaacctaatagattaagattgtgggagaaaatttaaagaggacaaacagtaagctgtcgagagagaaattacaaggcagtgcccaggtcagcaccagcacccccacagcctcaagcagcaagattagtcattttctaaagtgaaaagacctgcttctctccagactaaaatatcatctgcgatctcagccacaggttgattcgctgttttgtacttcaggttgaagatatgtgcatttctttctttccaaattaaccaatagatcatcaggcacaaggtatcgaaggccttgagatatttagttgcccaggataatcatgtgatcaaccaccagtcccccagaattacttctggtttgctttcagatcgtcccaggttgtgtttgtagcaactttattgagttttcttagtcttgttggcatcaatagttgtgacagggatcggatggcatcacaattgtgacaagctgctggcattttggttttgtttttcctcttgagctgtaacctgatggccgttaccagttctactgaaatggagatcagacctctctatttcaaaagaaaaaaaaaagagaatctactgacttcaattttgcattatactccattttttatatgatgtttagcatcattgaactaatcaacaccattacgccatataaaaaatggaggtagccaaacttttaaaagttcaactaaagacattctaaagtgacatctattcgtgaatgagggaataacaagcaaggaaaatctaattaccatggtgcagaagtagaacccaatagttgtcacatagaaggacaacatcctgaaaaagtcaaaaagctgtccaagtctgtatatatcccggctgagcacttgctcaccatttcctccagcaacttttccttcgaacagtgcaatctgattaagaccaacgtctcttccctttccaacctacagaattatgtttggaacatcaatataatgctcgcaagacagcaagagtgttggcaacagttatataatgctagagtagatggtgcagcgaacaagtttgtttcacattggtagcaggagagcctgtgaaacaatatcagcatagaactcctggtgtacatacagaatagaaggttgcaggtaataaaacattttgaaccaggtgaacaaggcttttcccaccaattctctccctaatcaccagcaacaattagttcgggaaaaaaatcaccacgaacaataattagtatttgtggtaacgccacgaacaattttggatagcaaatcaacagtgcgatgttggaatcgccaacaaatcaagggcaaatcgatgtagtcttgagtttactgagaatattaactcccaaatgtaagaaaccccagaatttgtccaattacagagaactctggcattgtgaattttcctcagatactgatagcgatagctagctgtcaccaaatggaagataatacttcttcacattactggatgacctcagatcaagagttttaactatctcattttacatgaacatcaatgatgtatgacatacttcttccaaaggtaaatgagtcaattcacttttgctattaaatcaatcctctgttatgttacttttaaataccaaaacatcctccccccccccaaaaaaaaaaaaaaagtaaacagattatgagaccaattgacaaataggcgataacaaatggaatttcctttttaagatttttctggcctaccattcagagattaaggtattcttgactgataagctagatgttagcgcagaaaattcaaaacacgaatgaagaaaattcagacctgaatatattcatgatgagttatgttccctaagcgcagagttgagttgaaccctggagttcatagatgcatcagtaaaaagatacaataccatgaatgtaactaaattacagctaactgttgtggtctgcaatttgtaaatggtaggcagaaacaggaagattattgagcatatatggacaaagtgatatggttataaccaaacaaaaatatgcattgacagaacctgagagagagaccccctacaactaaaacaatataagaatatgcacagcattaacaacacagagaactacaggtaaaaatatgatagtttacaatgcgcaagcagcttatactcattttttagtctctaggttaccaaatagcctcatttacagaaacacacgctgagcattagaataatactacatcgaattcactagcgagaagagaggtataaagtcatttttgccctactaactagcacacaggctgtccacacagcaaatgccaatttcacagaatgtaatgggctattattaataatgcaacctgaaatagactaaacatgcaacaaccagaattgagaaaaagacagaataataaggccactagccctacctgcataaatatcctcactgatattgatgacacgggaggccttacttattccacccctcgttatatgaaaaattctatcaaaaacatctggatggccataatgcattcttactctgcaaaagaattccaaatgttgacagtatgtaacttgaaatgactcatgaaatagaaaatatatattatgtaaaagcacttacttcagtggattggccagaacacgctgtcccaatgtgacaaaactagtttcctgattggacataaacgaggccagcgaagaaacactacaaaagagagattgtaagtttgaactgagatgactactgaagtaaagccacaacaaaacgactgaacaaaaatctagtgaaacaacaccttcccgtgaacacgtgttctctaacaccaagaattgaaggcttgtgcttgccatgattctgatagaattcctcaagcaggtttctcattttgagtgcctcctcaaaatagttatccttcaataggacaaccaaaagaaaaactcaaaactgatggaacaaagaagtcaggagctatttcagaaacaaaaatggtatcttggcaatagtaagaagaggtgcggtataggagctatttcaataacattttttcccataactatagcctttttagaaataaaaaaaatatgcgcataataaaaacttcaaaaaatgtgaaaaacattgtattgatatatattgagtcaccttagatctgtaccattcaataaaagaggctaaacatatagtaagggattacaaagaaatgagctgagcaagtgcttttatttaaatattggggaaaaccaaggaaggtccatcaaataaatataatatacataatatttgctcctatatgtataaggaccaaacttcgtacgagagctcgtcaataatcaaaatataaagacaacagcatacctgattcatatcaatggtttgcactgcatttccacgggtgaatattatggcatgattttggttttctggcttcccctcacccagcttaaaattgccaggcaatttaatggaataaatttcctgcagccaagttatttggtgcatagaagaattaatacgttactcaaataaccaaacatgatataaactactttagctgatgatatttacttaacaagggaaagaatggtatactactataggagagcataaataaacaattttatggatatcaagtgtcaagttggatacaatgaaaacagtatgaaaaacaatgcacagaaggcattaaaactaacttaagcagcagaatacattgttagcagtaagagtgtacaaaggcaaaataacgtctgaaacctaataaaacaattaatagtgttaatggagaaggttctttcaatagataagataagggtaaacaacaattaggcggagaaaacaaacttaaaattaatttatactgaccttgtcctttccatgaatgtcagctttaacaagctttgagtaatactcggtgctaggctttccattcttaacgctctcaacaatatcaacgtaagcaactctgagtgcttcatttctgagaaagataataataaaacaaatcttatacgcactgtagtactatgaaacacgcacaaaataaaaggagagcaaagagctccccagattctacaaagtggaggaaagtttcatttagcatgaaagcaagtaaagagtgcaaatatgtctaacatataaagtgaagagtacctttgcattagtagagctatgtctgcagcttctggtttcctctctgccttctgtaccccatatatttggcaagtaaccacatatgtaaatttcaaatcagcctgagcacgtgcctcaggagacagctcaaaatgtatatcagccagaccaagaccagttgtagcaactgcagattcaatatctagcaaaggaaaacaacacagcaggttatttattacttcataaacaacattaatgtttcttacagggcagtagtagaaataccttcagattgcaacttctccaaataactttgcagcataagggctttcctatagtacatcatcccacgaactgcaggattaacatagttcaaaaacagtgacattttgaagaacttgtagaaccaaaaggttttctttcatcagataaaagaacagtaaatgaatgtatcttcaaatcaccacaattaatatttttaaaaagtatataatggacacaattttcacggtttaacaagtgtgaacctttggggtggcaaatcatcaaaaaatcatgctagtaagaaataaataccatggaaacgaaacactagcaaaatagtatatggcatgaccatataggtttcgaaagataacaaaccagttcgtgctaaggtctgtccacggtaagaagcccacagacgtagttccatcatgtcattagggctactaaaaagttcggagtcagttgtgttttcatccctgttaatgcgagcaaggaagttcttccattcatctgtttacataagccaacttcattagactgtgcaaccataataaggaagaggtaattacattgcattgcatccttcaagcacaaatcacagatagcagcaggcacttgcactaacttttaggcattggcagtagatgccacaatttttccttctagagcaaactgtaggaaagccatcttacaagagaaatccaaacaatgctttcaatagtaacagtggagggagagtgaacaaacctggataaatcttctgtagataaaatagtgtacttataccatcttcatttctcttctggagttcatctttactataaagaacagtctcggagtagtatggagtaaatacgctgcaaaacgaagtggtgcatatcataggcacagaaaacaggagcaactgaaccaagaaaaatagacacacaaaaaggaatgctcggcaaataatagaaattttaacatcaagattcacgagatttagtcatctcaacatggctttgaacaaaaaaataatttgtatatagaataatatcaggaattcatatctatatggcgttccttcctaaatttcatcagcaaaaaattttagcagagttgcacgatgagcccccatatcgccataccggcacaccgtgccactaccacatgcatcatcatgccctacctccaaaaacatcgcttatgaccttaggcaccctatagtgtgccataccacccacctctttgaccacaactacccttcaaagtcatactcagtctcagaatatgttggtggacgctaaaatcgcatacgcaccaacgttgccacaggatgagacaaaaaggcgccaagggcatcaagttggtaaggtgggcaaggtcagactaggcgtcaaggcaacgaaggttgcccatgatggccagcagactcaagaatgcaaggtctgaagcgacttgtggtcaactttgaacacattactaaccaggtttatcattattctttgattccagcaattaaacacatgagtgagtactagtctaagaaaaagaaaataaattaaggggaggctggttataggctgtttctacagactatcggcacatttctgtaggatgagacactgaacagaagcaactctgaactgatagaacaagcagaaaactgtagagaagtctcacctgaaagaaagcatttctgaaacaggtcttgcaacaggcatttgcatgaacagagagtttgtaaagaactccaatctccgtctagcttccaggtttttaggaacatttgcagctgactccttgatggtcagaagagagtacaatcgtttgatcaagtccttctaaattccatgaaaccaacacagattaaattaatggttataaagattcacaagcagataatgtaagaacattaaaatttaacaagaaaaaccagtgttaagacaaaataccaatccagagtcagttggccacttgagattattgaagagacggccttcagctcttgcttgcttaatctgttcccattcatcaatattgccactagaattcataaacaaaagaattaggaatgaaatattataaacagaacacagctttgaaatattataaacagaacattagaacaggataaattgtaaaaaaaaacagacctcatatcaacagacagcacttcatgatgaacaacttcatatagatcttgaatagcattaattgcccctttcctcagatcagcagactcggtttctttctaaaaagcagcatcttaacattaacaaatactagaggagcctggataaaattttcaagcctaaaaaggcataaaacagaaaataacttttacaaacttctaaaatatttaagattcatatcatcccctacagtacttccaaaaagactgggtcccctgagctttaaaccaggtatctaaccttcacaattctagaagtcagtatcaatatattataacctttaaggctcaatttcatagtggtttaaccatctggaaatagatttgtgcgtatgtggatattaccataagtcctgatgattcattaaaatgtacaaagaaaaatcgtcaatgatggagggaacttcagagatgcaatgcaagagatgtggtttggttgctttacatgagatcgtgagttggtgtgcgatggtgtttgtttggatcatcaggaatgtaggaaacactagttaacgtaagaagatatctatttagtattaaataattaataaaatttaatacccttgttttccaacttaatataaaataataacccttactgtgcactaagcatgtcatatattgtcttaacctggcatctcactgtactggccccagaaaaaggaaatttatctgtgatttttctgggctaggccatgtgggaaactattcaccatgtggatccccaaaccaggcaatcaaacccacaggggtatatcccgtaggtattcaatcacgcatgcccttagtaactataacaaacttttttataaatatgtatctctgaagtacaggactttggtccagcccagccgcagacaaaaataattcaaggttcagaacaaaaaaggcatgctagtgttgataactcatgtctatacgatgaaccacaaaaaaacttcaaggttattagagttccagcagacaacaaataaacaacataaatatatcatatttcacactggaaggctggcaaacagtataaaaatggcagatggaagcctcaagttttttaacattatactcactccagcctccatttttcttctatgttttagaatctttacagtcaacctttttatatttcaaccttgctaggtcatacaagaactttattacgatttgtagctatagggggggtagtaattaccaaaattcctgctacagcaactaacttggcaatgacattgggcaatctgctgaaatgaagatcactctgaatgttcctcttggaaatgctttctcggataccaacataaatcctctccaccctaaaaaaaataaaatcatcaccaacacatccctcccacggataaaaaaacatctgttgaactagatgaaaagaagtaaggaacaggatgaacataaataaaatcccttaccagagacgtccttctttatctagtatagatgtcagaatataataaatgctgtgatagcactctacaacagcatattgcatgtattcatcctttgatatccttagccatagttcctcttgtgagtctttacaatcaattgcaatatctttggctaagaaaacctgcaatgaaaatggaagtggtcgccaaagtgacaaaacgaacataagatgcggaaatcatcaaatcatgcagggagagctttttaaaagctaaaataagttttgacttttgaccttgctagcaagcaaaaagagaggccactgcacaattggaagagatccattattcttaggcatcaagagtaaatccagttcactgtaaggatgaaagatcagaaaaaactcatatctaattaagacgtttgaaagaacagtaacatagtattccaagaaactttacttacgtgttattaatataatcctcttccctcatattcctcacaatttcgttccaaaagggagcaaatttagatgcatcaaacttgtttaattctggatgctgttaaattgtgaataccagtgtcaacttattggaagtaaagataaagaactggaagaaagcatgctatatctataatttatgaacaacaaaagatctctctagcttgtctaaactctaaacacgcatagcagtcaagatgaaaacactcaggaacagctcaactgatctgagctcaaatcaatacaaagatatttcattcaacaaatcatggctacatagcacatgcatacaagcaggacaaccgaaaacaaaatatttataaaaaaaaactgtatcagataacctgcaaatactaaaatgctaaaaaaatgccattaagggaggatgtgacttaaggcaaaagcagcagatgactggtaatcgagggggttaggacgagagtaatcatgaaacaacattcagaggaaaaagacagttatgtggaaatacacaacattcaggaatgcctatctacttaagtgaatcttttaatggaaatacacaaatggaaccacaatgccatacttcttattacctagtataaaattagcggagtagtactctagttctgttttttaaaataaaaaactaggggggaaatactccacaaatgtagaaattcaagcaaaatggaacaattactttaaccgcatatccgtttacaaatactaggagctataagaaaattgggcatgctcatcacgaaagtgctttcatcatagaaatccctccgaattcgtttttcgaactttcttatattgtcggatggcagttagccaaagctggtttgaaagtacaagttttttactaaaggacaatatcatataaataaagcaacttaagagcgttattgaaagataacaaataatgtcccacagctccaccaacagaaaagatagaataagtaaacaagcaaaatacaggtaacaagataatagtacctgactcgatgatagcagctgcttcctgtataacagattagaaccactttagtgtataccactcaagtataaatcaaaaacaataaaaacatcaaagaccttttcggtacagcaacatggagtttatccatgaatgcttcagggaacttctcaaagaatctgtgaactgcttcaacagacctaatctgaaaatggcatacaaccaccagataagaaaaattgacaaaaaaaaaaaaagcaaaataacaatcgaagtactagctatacacagatgaagagccaaggaaaatggtctagaaaaaaacatgcattttacataaatgggcttaacaaaattggtacaattactttcatatgtgcatgttaatagtacaaaattattttcaagtgcctttccacaaataatgcattttcataggtagaaacatcctgaacatttcaatatgctggagaatttgggatttggtaaacaagcaaagatttcctcgcataaacaataacaattttacacacaagagagaatcacattgcaatagctcaaaagttaaaagtcaagaagctaaacctctcccaggcgatcgcgtgcaccaaggagaaacccacatatagcagacatcacggtgtaaaatacatggatatccaaaaggtaaatctgcataaatgaaatttctctttagagatgcatttttcctatgttcactgcaaattcagcagcttcctgtagcacaaataagcgtaagaaatacgagtaagtgtgggataagcaaagcggatgaaatgttaaacaactagaatgtgaacttgcccagtttgattttttacttctgattgtgttgaatagtgtatcggcaagttgtttcctatttatttgttagctacattagatttaactaagtataagtatctctctcatgttggatgttaaagaacaaaacttataaatatatttgccatcctttcaggttcagcacactggagttatgcgctgctttggcatgttgtcatttactccctctgtttcatatttgcacgacgttttgacttttttctagacaaacttctttagtgttgaccaagtttatagaaaaatctagcaatatctacaacatcatattagtttcattaaacgtaacattagatatattttgataatatgttcgttttgtgttagaaatgtttttatatttttctacaaacttagtcaaacttaaaaaaaatgactaggaaaaaagtcaaagcgacttataatatgaaatggagggagtagatattattactgctccagaattagattatttactcaatgcaaggacatgatgaccctgaactcactacagttgagagagaacaagataaggggatgggacatagtataaatgtataggacaaagttaggagcaaaaaaggttacttactgataccactggagcccataaagaaagaatagttagagcattatggttatctgtaagcattaagaaaagtttcaaatattagtacattaaagtgcatcattacacatgaaggaacctatggaaacaaggtagacaactagaagtagatttcatgctttgcccacaaacatctaggacagttgcaacttaaaagaacatactaagaaaattatttaaaacatgaatattagaaagagataagactcaaacaactattttcagctacacaagaatatggaatatttaggtatcaagttgtatgaggatgtgatattcttactcttcgaaacaaagtcatgccaagcatactctaagcgtttgaaattgattatttccattgttggtttaacaagaggttcgatctgcataagaaacactattttgaaatgcaagttgatctggaaaaaacagaggggaactagataaactaaaactttcctggagaaaataagtgaatgaaaattttgcgccaagaattgcaagccagaaagcaacatatctgcatggtaaataaagttagcactagtctgaattcaactttggaagaaaaaaatcacaacactgtgattcaaagtcccaaaggattacttgatgtagtcagaaggtctttcatgcatgcctctcccaacataattgttctccttcaatataaaccaaatgtcagaaaatattagcaaaagatattggattacaatgacttaacaaaagacagcttttagttagtcaaaatgcagcagcaagcaagacctgatgcatccactttccaaggcgtacaacagaccagcggtagcaataatcggtcaaaccgtggcagcaaggaacactcataagcaggccgataattattttggcgcccacgtatgcaccaattacaaagacatatatcttgaatgtagccgaatttgtcccatcttgaaatgctttgctgagaaacaatcaagcaaccaaaaattccaaattagtggtatacacataaaggagttaggtatcatcccctggaatttggtgcgccagcccctgaattctgaaatcaatgttggggacgtctagcaattcactagggcaaagaccccatgtattctttttcatagttgaacaaaaaaaaaagcttttcggaaatttttttggcaattatccctctggtctcagatatgaaaagaaaacatacatatataggtaacaaataaccaatgaagccgcggtgaaccaacagaatcgccaaagaactcgggtaattgcagatctacgagatgttgaataggcgccatacatcatcagaatgtccaatatgccttccacagaaaaaaaaaagggaaaaagaaacaagaaaaattagtcacttagaagagaaattgtgcagatgatcataatacagtaactaaataagaagttctgtgactgactctcaataaatttcatgatgacataggttggacccaggctgaggagtgtcaatactgtttttttgtcaaatttacgatccttaaaagcaatgatcattaatccctgaatgaacacaaaaacacttagtttaacattgagcaactaatcatccaaggaaatatcataccaaataagaataataaaaggttcaactctccttaaaaacatcagctttaagctaccatttgcagcatcttttcactataaaagttgtacatgaacgaaacaccagatggttgttgattaacatggtggttagtctcagtaaaatatatgccatgtaaaatgtgacatacaaaaaacattaagcacttgttcggacaaaagttaagattctgtcacatgtctccagaaaaactgaacacacgggaaggcaggtccccccttattatttcccattccaaaataaatagacaaaagacaaccctttattttgcatctagcacctcagttgctcaagaaaatgaaaacaactttcaggcacacggttaaatgtgagtatgtgatgccaaatgtcaagcaagatagtgagaccagttgtgaacaaaaatttatacctgaaacatcataactaaaaaaatccaaaggcgatgaaagctatggtaaagatgaagaaaagttctgtgctccacaaaagatgtctttccataatgatgattcctacccaccaagccctgcaaaagaaccatctgtttggtaaggggggaaagggttgtcttcaccacctcatcccacaaaagcacatgtagaaaaatgaaaattgggccatcccactaaaatcttgaatggatggatgatctaatctctcaatccaaatagcctatatatgcaagataattttaggtggttctgtagaacttccatggacaaaactacagtgcaatatccatgatactcatgttgtgtaattaatgcttcatatgtaattgagatcatcaacctagtaatttttttggggtcacttttctgcacctagtaagactttccccagtataccatattctcaataggtagtgcactcggttcctcaacacgaataaccctgtgttccaagtaactacgtgatgtttaagatgtgcacaacaaaaataacaaaaaaaaaagatatcctgagatgtccaagtattagcttggtagttccgccaaaatacaaacaattaagtatatgatcagcagaaagaaaccttctctttcctactaggtttagagaaaaatggattgctgatcttccatggccaaccaagctgaaaacacttcggagacctgaaaaggacagtgtggatctttatggaaaaaaatgaaaataacaacaaattaatggaactcaatagctcaattgatctaccaaccagaagaactcattgaaatcatcatagtttctccacgcagaatgtggcgctcgcccattgtcattgttggctgcttcctgtagagtacccagcattcaaaccactcaatagaagtacaaccaaatgtagcaagctaaagtagctccaagcagataccccacttacagctgcgatgatttcatacataggagaaatgacttggtcaagaaatgatacgccaccatttgaaatgcagctttcagcaggctctgcagtctgtctccgtataatctcctccagttctcttgctagctgtaagaaatataggagcatgaatttcaacaataaaagttatattccctccatccaaaaatatagtaacttctagcattcaaattttgttccgaaatatagcaacttctccgcctactgatggataagtctttggtccttggtcctgatttcttctttttgcttttgggtagtttcaccttttcaggacagcatctactcctttagcatattttcagttgctaggacagctgcggttagtaggacagcagcaattagcatctcctttatgcctcctttatgctttattcagtttggatgccctctaggacagcatcccattcaaatttcgaatttttagactaggagggtgcagcaataggcttgcagccagctatggttatatatatgtatccaacctccctcgggaaggtatggctttgtgttttgtgaatgaagaaaaccagaaaattgccccatctcgagtgccatccccttctcaatgagagtaaccattgaagttctaacacctacattctcttctcaactaatcacaaccttcccccatttaatttctccacctacttccttttctcatccaatcacaatcttaccctatttaattccacctacttctttaatgcctgtgtccaagcccttttttttttatattttcagaggtagtatttgatatcttatacaaattaagttagtcaaaggtgattagttattcaatatcaattggatatgtcacactaacaaccattccctacatcacaaatatttgtcattttggacatctgaatggcctcataagtattattttgaacagtatttctattgttatacgctataaaaacatattgaaattatattgtctctaaacagacaaatctacacatgactttcatattccaattcaaaatatttaaaggaaactgatagtcaatctttgaaaagtttggccagaagtgtttcgagtatcggtgactacagagagagaagaattgaagaccatcagaatgaacagaattttgcagatttctttacttagaagaagacatgatcactttagaaactgaaaatgaagaatatgctaatgattaggggaaaacaattcaaattccaagcatagacaacagtgcgctaatttggcaacaaagtagtagatcagggagggaagaaccaaagaagaatatttttgtatgttaaactggcataggcatgttcgtagaaaaacaggcgcagatcgacctaaagcttctttgggtgcaatactacacgattgtaaacatttgcaataatcaattaagcatgcacaaaaaatagtacagagcagaatcttctgcaaacttacatgatgaaatatatagcataaaccttctggaagaaatcgtacgttagcagcctctccccaaataaggtagtataagcacacatatagcaacttcttttctttcgtcaatgactcggtgctaagagaaaatcaggtaaatctcttggtgataaataagatatagacaggaataagaaattaaatatgttgatcaacatgacaaatcatacttgttccagacagggggaagcggcaaataattacaccatttgatgtagttatcaagggacttggagaaaacaacatgcacagctccctcgtcgattttctgccaacaaataacaacaatgctaacgaactaaggatgaaaatattaacaacataaagcaacatgcaattgagtactctttgcaccaggcctggtattaaacggtgcaatatttcagtggtattaaaaagtacccagaacttttgccagtaaatatctagaatagggatcactctatgccatggaaccaattctacccccaaaaaaaatattgtacgacataaaaaattagggtgcaaagtatgcataccggttcattccctggtagtttccccagtcgggactgttcatttgccaacaggtgaacaacatgctcccgttgattagtcacattgtctttctgcaaccaattgtgacatttcagttccatgaaggcaacaagattctgaaatactgcagcatgtatcaagaatgacccaggaagttgtaactgcagatccacactaaaaggttgtctcccatgacgcatttccttcttaaatattttcagaataacacaggctgacatctattgtctttttcccctcattttcaaccgtctgtaatattaatcataatttttaactagatgctgtttacatccatggatctttattacttcttagcatttctgaccatatagaacgctctacattatgttttctttttatatcaaaattaaatgcttgctggaatgtattgtccaagtcagagaacaaaataaaagaaaaatatcaagatcaaggaaattacggcaaatgttctttctttttccttttcccctcatcttcaacagtctaataaaatcttggtcataatcttgaactaaatgtgagtttacatccatggatgtttattagctcttagcatttctgaccatatagaatggcatgctcagaaaccacattctacaacagtctggtttattgaaacttacattatgttttctatcacattataatattggttgacagaatgtaatatccaagatcagggagcaaaataaagaagaaactacaggtaggaaattagttgaaatgtacagtttcaactatctcaaatgtatatgctgcacatttctacataaatttcatggttactgttgtaacataaaacaacagatgggtacatgtatccttggacttaggggaaagaacagagccaagtcatgtggaaagtgagagagtgtcccattctagggttcgaccatcctatattcatagagaggttggcataaggggaaatcccccttctgccccttgactacacagcccaagcaaggataatttcgtatatcgtacgaaatacagggcatgctccatcggtatatcctccaagtatactctttggacatttcccattgggtttctagcctactcccaacactctaggtctaggggataggggtacctatgctccaacagttagtcagagcatccaaatataaaactactacctccatttcaggttataagactttctagcattgcccacattcatatagatgttaatgaatctaggcacacatatatgtctagattcattaacatatatatgaatgtggacaatgctagaaagtcttataatatgaaacggaggaagtactttgcaaatggcaaaactcaattacaaaaaaagagagaacctgcacttcctcaatcatattgaacagcatatttacaattaaaacaaactgaatcatgcatgatagtaagtcagtaacagcataacatacagtagtgattactaatactaacagaaactttttcacttaagtttgtgattaaaacatatcttctgttagcagtatcatcaatggactcactaagttataagcctacaatatgattgtggttatggttgaaaccacaatccatatagtttactacagtaggtgcgtcataaaggtacagacctgaaaaccaaatacacagtgcaagagatccagcatatcggaattcctagcatcagggacagagaaggtggcagggagccttggaagttccctatggtactgcaaagctgatatagctgcccttacctgagatgaaacgacatggaagtagtacaaccacagaccacggttatatctaaaaaatggtaaatactaacgaaaaggatcgactctaaattttacctctggaaaattcacaatgtcattagtttagcacaaagcatctagaggaataatattataagccacaacatcctctgttctttctgcatctttttgcatgactcttttcatctgaatataacagaaagggatgttatttatgcacaaaaaaatatatgaaacattttattgatctcaaaatgggttaaaaaaggagcaaaacgaattcattcaacagtgctgtttgaactcactgttaactggtaacaaaacattcgagaaaaggtactactgcctgcggacctgaggttatttgcattcaacacatcatactagcaacaaaatgtcagaaagaataatattccttgccagacagaaattattactttttactgttcagagaccagaagatacaactttgaccaacaaacaacattatgtccataagggttgtgttattaaagaatgttctataaatagcatggacagtaaatatactaacgtgttgaattccgattgtcagagcaattgtcttgttaattttacttatttgcaactagaacaatactacaatagtcttctagtaaaagctactacctgcgtcccagtatataaggatttttagggttgaacacaattattaagaaagtaggtataattaatgggggaaggttgtgattagatgagaagtggaggtcggagagaaaattgaatgatggagggttgtgattggttgggaagagaatgttgcagaagttgttacattttgggacaaattctaaaggctaaaagatgttatattttgggacggaggagactatctatgatgacaaaaaatctatacatatgcgaaagtggctatagcctagcggttacagtgctcaagtagcacttctggtcctgggttcggctccccaagagagcgaatttcaggcttgaataaagaaaaaaataccatgggggcctccctcactgtttccattcaaaagaaaatctatatacacataaaagtacatcacttcactcttataattttagtgaatacattgatacactaacactttaccagtatcttactgcagaccagtagttaaaacccattccatactaaccactcaaccataataccaaaatacatggcatggagagcagacctatttttgtttcctttttttttaacataattgaaatttagtaggaaaaaaatagcatgaactatatattatcaaggtgagcaacaaaaacctcttcagatatcaacttttctgcatcctcaggtgaaatttcccttgttatttcctctataactgaccataagaccttcaaagtagcaaggactttcttgcgcttcagagttttgcgttccaacctactcaaacaatcagggtggttaaatcacatactatgggtgacatttaatgttcaacaattgtgcttgaaaaacaagcatcttgaaaaaaaattaaactaccaattcagcattttagctaagtgacagacataatttcatagagaaatacatactctccaaggttaccgctgaacacagcagattctctcaacttcatttcatcttcacacaattcatcaactttatgcttttctctgtatagcttataaaattcctgcagtttagcaacatcctgacttcgatctatagcaccaccttccctttttgctagcttttgctgaaaaattgagatagaaataatcacttttagaaaaataaaatttaaatgtcaaacccatctgcttaatttgtataattcaacaagccatggttccggagatgtgacgtgttgtaaatgaggaggactcacaaggcgatattgtatgttaaaacactagagcgctggccatatgaaataaacattgtaaatccatcacaagaacagttcaaaatgatatacttttgtagcgctggtagagcataagattgtggcggttgacaccataggtccatactatcattctacttcttaaaaaacaaagatgtgaaatcacttatttgtattgtattctctatgtatggcttttaccgacatggtttgactgtatatatgaaactcaataaggttctatcttggaggttgtgccagatgtacaaaataacatgtgattatgaaaaataataataaatcatatagaacagtatgaacataccctgataactgacattaaacctgttttgaactgcagtacacctctcccttcgctatttggatccagattttgggctagtgtgtatgcatgctcacatactgcacattgaagtataaacacaagaaattgtcaccgaactgcatttaaacttcatatgggaaagtgaattcagttgctaaaagctgactcaattcatatcgttgatatacccttcgattttgtggagcaaaagccataaaaaaattcattgccagattagtggctgaaaacaggaaaaaaccttaagcaaccaagcacagttcaccgataaaacaaccttaagctaacatcggtttttacctaaacagggataaatactaactaatctcctttgagttagtaaaagtttactattaataactgactggagaaattgccaaaagcataggcagtagtatcccagtacagagatttcagaacatagctggactaattatgggttgtttgcagcagattcagtaagttgactgattttcaatttagcttaatgaaaagaactaaagactgacaggtgatgcagattgctaattgcagaatgccggattgtaaggcactagcatacattggtcagtgtacatccaatcagagcaaatcaagtttgaaaagtcactttaaccatgtcaacgagttgattgatagcaaactcaggcgagtaggagcacgaaaccagtaaagcattagtccgactgtaacaactaaggccatgtttctttcagcttaagattattatgatctagattattgagtcagattactataagctagattgttataatctgtagtagaataagcggttagttgtttctttcctaaattattagagcatagattattgggtttgcaagtctaaagagggagcggggtggcatggtgggtaatttttcacccaataatctggaaaaagctcacctaaatgagcttatcagattataataagctggactccagattataataagctacttcaataagttgtctgtttctttcaacttgctcccaataatctggattataataatcccaagctgaaagaaacagggcctaaatacggtagatggtactaagcctgatcataacggttgacgaaatttagtagtacaaaaggctgtaacaagcaaaaaaaaaagcaaaagtactcctaatggactagcataatcaattcgtgtagccgatgctaactgcagaaaataccaggaaaaacaccactaagtgaacactactaataactgtataggtagggcaattctgagccgcggcgacccatacagctcacaagcctaacggagcgagaaatggtaacgaaacttacgaatcctggcgacggtagggtcctcatcctggatctcgtcggcggcgcgaagcacctcgtcgatgtggacgttgtttccgagagacgacggcacattcccggcgatgccggtgacgggcaccccgaaggcgcctgccaaccgctctccccgcagcgccgcccgcaccaggcgctcccagttcgccgccgccctcgccatcacgaggccctcagatctaaccacacgctcgctcgcacactcagaggccactcgtcatagcccctgctcaccaagctgcttgcgatcgacctccgcgtcgaagcggatgggagatcggagattcggagctagggttttccgctctcggcgcgcagggaagggaggtggccgtgtttcaggggctcaaacgaagaggaggaagaaagcgtggggaactggggatatgccgagactacttttttttctcctttttttttgagagtgcccttttcgcgtttggcgagaccgcgagacggtttgaaaccttttgatgcgactgcgatctggaacggggggcgtgtcagcatgtgatgccgcatcgcgcgtcgcacagggcagcccgctcccactgtcaactgtccccacacgagaatgggtctagggcgcaagagttttgcggaatttttatatggttaattaatgtaatgtaatcttcacaggttctttataaacagtatactagtagaattatcgttgattacctagacgcgtgacgattagagcagtacaataagctgacacagcaggctgcaaaaatttccacgtcatgctattcttacatggagaagagaaaaacgaaggagagagaataaagcgagcgacatatctgcagcccggcgatagcacaagttcccatgcggaaagctcgcgtgcagtcgatctcacggattaaaaacacatattgtgggcctcatcaccaccccttttgatcccatgcgccagattcatgccatggcgcggcactggtacttattttcaggcgacaacacaactacctacatagacagagttcactcttgatcatacgcaagtatgtgcatgcttaattaattcccggattatgaaactgtaattagcatagtatagccattctattgtataggttggctctattattaactgtaaaatgacatggatgtaattagagccaactactggctatactattgaccttgctcttagagcaggtacaatagcagactattagccagctataagcatattttaatgagataaaagataagagagaagagcagcgggctacagatctgtagccagctgcagcacggactccaagacacagtgtgtgtatgacatgtgggaccatatattaatagtatagtaagcaactattgtataaattagctattagattgactatagataaattggagttagtaatgggctatactattaaacttgctcttagaggtggtgtatctgtgccagtgccacctatgacgcgtgtcttgtggacttgtggtgtttccgcgactagtgtacgaaataattggcacgcaataaagacgtgaccaaagctacgcggattttgagtgcgtaaaagtcgtgtggtggatgggatcatgggaacacgagacagttcgttcgtcaaggctttcctcccggtgggctggcgaccgggaaaagctaggggaataagtctatttgtactccctcaacttttgtctttggttgaatcacgtccctcaaccgaaataccatgtataatacctccttcagctttgaaaccagggcaaatcacctcccttggtggtttagagggcgatttcatatgtcgtggcagctgacttcgatgactagctgagtcagcttgtgagtcccatctaccagcctcttcctctattctcttttccatccctcgtggcggcagcgagacaagcgccgaatgccggatggaggacgccaaagctcggggaggttgcggcggcggtgttccggctccgtccgcgtcggaacagtgatgcgcagtccactaccgcatccgcgcgctgggcgaggtaaggtggcgacactaccggtcgctgctcgtcgcggcggaggcacgccggatgagggagaaggaggcggaggcctcgaatgcggtgtgacgtggctacggacgaaggcgcttgcctaatcggtccaccgcggcggcgctccacacgcagctccagcaagtggcggtcgcggcacaagcgagaggcaaggcggtggaggacgacaacaacaacatcggcgcggcgaacaatgctgagtcagggttcatcgacccagatagagtataggaggtgaccccaccgccgtcgtcgaggctatgttggacatgttggtgtggcagtctctatcgggatgccggtttgtgcgcaggagaaggcgatgacgtgaatgaggtggcggaggagaggcgtgagaagggaggcggcggtggcagggagggagaagaagaggccacggcgatgccgaggaggcgaggatggggatgaggtggcgaggcttcttcacctctgctctctctctctctctccgctcatgccaagctcttgccgctccgctgagctcccgccgtcccgccgctcccgccgagctcccgtcgccccgccgctccactatcctgctgctcccgccgagctcctgctactccaggtcccgccgctccatcgcttctgccgccgagcttgcgcaactctctccatctcgctcgccgctagggataaagagggaggagaaaggtgactgacagatgggcccaaaatttattttattattttactcactgacatgtggttcccattcaggtttgtttttattttaataccatgtcgatgccacatgggatgaagactaagtcaacccgccacataagggccacgtaggacgaaactgccgagagagtcgatttgcaacggttttggaaattaagggatgggttataacctgttttgcggttgaggggtgcgattcaaccaggcgcaagagttgagggagacaaagtagacttattccaaatgttgaccagtcttatcgttagaccttcagataagtaggaacacatcctatgcaaagttttgggtgcacaattcatctacaccaataaaaataatcataacaaattctaagaaaaattgtagtacatatcgttatcattgtagggaaaaaattgggtaggttccatttggtgtgtggcattcggagagtttcaagatctccgatcaccaactgtaatctaattgaaacttggcggttaaaaatgaccggatgtagaacatgaagcccttacgctcttagccgtaatttttcacctccttggctgccagtgatgccgaagacatcgacggtagttggttgtggatcatcctgtaatgggcttgaaattgtccttcgagtttcttcaaacgttttcatgggatggagaaattagggttttgggaacaaaaaattcttaccgtacgagagatcatcactcatacatgggacttttggaattaatgaatgggccttagcccacttgaaaattaattctttggaaaatcacaaaagcccacctcgtaggatgacatgcatgtggagtttagtaccaccttacttattctaggataggggaacctccttaaaagggaggatgccctcctagccacttgaagcatgtgtggtggagagaagagggggaacacacgcgcgcgctcgctcacctcgcagggcaggcggcgcgcgtgcacgacgtaagcgtcgaatggtccgccaaaattggtccctcaccttgcgcagatgcagcctccttttgcagttttgttttgctgcaaattcggattcgtttttgtttttggaaacgttccgaaaaaatccggtgcgtacaaacggcgtggagtccggataagttacgcgtgacttatccggttcggttacgcgcagtggagatcgtgcgggctccctgatcaagcgacccttctctatataaaccgacccgccgtcttcacgcaacacacgcgaaatcaatctagggtttgcctcctactctgtgctgcgccatcgctcgtagattactccatcctgctcgccggcgtgcacctgcgattgggagagcaggtctccggaacctctgccttcgacgtcctgcaccgagagaaggcggcaataaggtttttgggaagcgctttgcgcgactgctccctgttcgtccgtgacggctcgtcttcctcttcgctcgcgtgctgcgtgccttcgtagacgcctgcgaaaagtttcgaccgaacagccggtctttccgccacctcggtacgtgttcaatatgttgcgcatatttgatctgttcatgttatattgtgtagtttacatgtgtagatctaataatgcgttcatgctagttttcgtctgtaatgtcatgatttatttatggaatatattaaatcattatatgcctataatctcaacagggacagtactcttatatgcgttagtgggacttggggccgggggtgtccaagaagaaagggaaaacaccttcgatcatagcgtctctctccagcacacacactctttctctctctttcacgtagacgaaggttggctactattagccagtttgtacccgctcatcttatggttgagtagcaaacgtatggtacagccattttcatggttacagactacggctcccatcggataccctattcagttaaaggaaaagtcaaattttgaattttaaacttaattttgatattaattttaatatatttttaacattattttttatcattaatttttaagttatcatgaacacttatataaaagttttacctataaaattatttttgttttctaataagccattttaacttattactagaaaatatgagcaaacaatgggactctactcgtttatgcgttggattcaaaccccacattgtgacgtataatgacatgacagtatgacacactctccttctcggacaccaattaagctgtacagacagttgaccgcttgattgtgtccaaagaataattattcagttactgtcagacaactgtttaccggtgcagtcttattggcttaacctgcacgagtgcagcaagcttagagcagtggtgttgtaatgctacagccccaagtcgtattatcgtatatacatcaaagtatcgaacaccctgaaaggatatgcacaataatctcgacgatggtcacttcagaaagaaaattacactggcccttacccaataataacccaaacaaacactcatgctccatagctaaaggactactctctccgtccaaaaaaacccaatccagattcaaatacaggattgagttatttttgagacgaagggagtacactatgtccagattcaaactcaggattgagtttttttttcaggacggagagagtaggagagttgcaaagatagtttctgcaagtcccacacccctactcaactcagtcactttgctagctagtactattgctctgtagtactccgtattgtactactgccaactgtgacgcgaaaatgtgatcagttatgagagcagtgacatcaaatgtatatttcttctgatgaatcgccataatgctggcgaaggcgactctgtctgtctgtcttctccccttgcatatcgttccgctatgcagtgggcctcttgcactataagcatcaatcgacggagctgatcatgattcatgagtagtagctgatgctggacgacaatggcgttgtttggacagatagtagcttaaagttcgtagtaggagtattaattgctttttttgtctgaatcatagcgattcattcctcaaaaaactgaaagttaacacagcttttcaggtggcgaaagcaactacagaaccgcatggataaacgcaacgctcgtcgtcagcagcatcccctttattcttcatcatgactgacacgatacaacttacaaacagtaaatcgtaatttacctctggtaccaggagaagtgctccaagctgtttttttttcccgaaaatgaactccaagttacttttagtgtaacaaccgaacatgttacctcttgaggcacggtaaatttctgtgcaattatattgcacggcttgatcgattcggggcatgcatatgaagatatgcacatccaaagcagaggcacgcatgcatagaaaaagaagtcgcaaccaaacaagcagatgcatggctagccagctgcattggcgtttggcagtgtaggcagccttccattcccgtctttgatgaccgagcaacccccgctgaattggaatggtttttcgtagacagacgttatttgtcgtatgggcgtctccatctgacggctgttccaggacaggatgggcatgcaagatcgatgctcgtgaaagcgacaagcagctctcgccgcgcaagagatgaagacgggagaaatggaaatgctggatttttttaaaatatattttgctctctttaaaaaattattttacaaatgtattcataaaaaacttattttaggaatagatatttttcttgccgccagtgatcctggcaccgagatctaacgtctgagcatcaacgatattagtgacgacactctcatccccataagccgagatacagaagggttagctcctaagaaattagcgcttaggacctatttgtaattttttttaaaaaaaagactacaatctaattttttattacaaacatgtcatcgacgttaaagttttgtaagattttttttacattttaatccttttttaaataataataataaatctttaacgtcgatccccttcacatcaacagtttggctattagggggatgactagacgagggtgtcgtcgcttagacattgaagcttgacactgagaaaaatggtccatttataacataatttttttacagtgatctatttataaactaaagctttcaaaaagtatgaaaaagtaaggccgtgtttggccctgttcactttgttgtcaaaaaaaccttaccaaattttggcatagttatcaaaattttggcaactgacaggattttttatatagttaccaaaatttagtagcaaactaaatgtagccacttttttgacaactttactaaaatttggtaaggttgaaaacggcatcaaagtgaacaggcccttagtttcccccctattcccaactttccatcacatcatatcacattaaaaactttcctacacacataaacttttaattttctttaaactttaaacttttttcagaaactaaacacaccctaaaacaaaaattctagaacggaaatgagtgatgaatggtgccctgcagctgcagaggataggagtatgggtggcctgaggtccaaatcagcagagggccgggacggacgacgtgtaaacgtccatccaggcgtccatatgattccgggcgggcaggcatgcaggccattgaatccgagtctgcgtcagcgcaatgatatctgctcctactacgcctctgcctgactgcctgcatgcgcatgtctgagttggacatgaacatgacctccatcgcatcgattgcaatcaataatcgctggccaggacgtactcgtacagtacgtgtcattggtctcctgtaccaccccaacgtagtacgccgcattcactgatccagcgcacgcacgaatgcacgatgtgatcaagatcaatcgatcgagccacagttttttttttttggcccttccccttgcgtcacccccggccgtacgcgcggccgtgcatccctgcgctgtgtttcactgtgtggcgtccatccatccaacaacgcgcggcgcgcgcggccccggcgttttgcacgcccttcgtccatccggcgctggaattttgtctggttgatcatcggtcgccttctcccccgaatgattggatttcgtatacggccggggaatcgcgacggattctggggtggggggtggtcctcgcggcggctctggcacggctcgatcggattcaagcaatgcaagctgtttggattgtgtgtatagcatcctcaatagcctggacctctctcaactctcatctgaaatgagatcgaccagttggcaccatcgagtggctactggctaggcagtttggtacgccgttctccgcgtacattttttttttggactgttccttgtacgttactactacctacgtatcttcggcacgggcaccggcccatctctgacgctgcactgcatacctcataatctcgacctgttacttgagtttgtgttgacagtttttgaccacccggattgaaatagtttaggaagtttttcagtcggataacacatgcaagctggcacagctgatatatatatatatatatatatatatatatatatatatatatatatatatatgcaatgacggcatttcttatcattaatcgatcgtgttattccaactccgctaattacaatcatcatccaaatgaatagtattaattagtttggttgattattaaacaaattagacacattattgccttattggactgaagaatttattctgctgatcactttggacccgcgagtagactgcaagtcttttgaggggactcctacgagcaagtttaatagtatagccaaatactaactctaattcatttatagtcaatctaatagttcattcatacaatagttacatactacattattaatacttggtaccacttgtcatacacacactgtatcttggagtctgtgctacagctggctacaaatttgtagcccgctgctcttctctctccttattatcttcttaaaatatgtttgctattgtacctgctctactaaactcatcatcatggtagcaatgtactgtcaattgtcctgctgcgaggttaggagaagctactactaattgtctagccctttaaaactttaggttaggcagacgtagcactcgccgggcttgcatgattaagggggtgtttggaagagaaggccaaactttagggggtgtaggaactanggactaaactttaacctctctcacaaaagtataattctctcccctaaggacttatgtttttgagagaaggg

SEQ ID NO: 8724 - DNA, 114090 bp, Oryza sativa
  unsure (1)..(114090): unsure at all n locations
aatcaatcatgtacctgcttgttgctcctgctggagttcgtgtacggctcacttagcaactgcacacatagtataagaaaaggaagatgagaggaaggataatcagcacggcttgagagctcaaaaggggtcgttttgcgaaatgattgcaacatgcatgctgatgctgtatacacgtactgtccttttctcatgttttcgtggctgttgagaggcagtacaagttgagaaacattctctactttgctcttgggtgtgactaggaagcccactgacgaaagggagcactaccgggtcaatttttcatatatggaaccagctaaacagtcactgcaaatgatccattgcatctctgaagataccacacgcgaggatttgtgtgtgtatgtacgctgctcacctgtagtacacttccgttttactactaatgtcacggtggtcacaaaaatcatgtgcttttctggaagatttatagctaggtcaaaatataggagctagtacctaacctttttaatccgtgaggtcaaggacctgctatcaggagatagggagattaaattcatcgagggccataggagccaaaacagtattagccatattttagtaaataaggcttggtgcgagtctgtttcggagctctggcctgaaaattcttgtaacttaatttgtctcagatatggtgtgtgaggaagcttctcatgagtaatatattccttatttccccgaaaaaaaaatataggagctaatacataatttgcatgtcgggatggttgcaggaacggaattttacctgtacttgttcgtgcagaaacttgatatacttgatcgtttcaaacagtaccgatgctgtatccgtctggtcatgtggtgcaatgcatagggagctgagttagattatacagaagaattgcagtttcacactatttgcagaagaaaaatcaatgtagtaattgcagacatatgtaacctacataccttcccaaacggcgaaacgatttgctgaagtgctgtgatcttctcccctagctttactttaggcactggttgctgcatttggttccaaattaaaacgatcagttcgttcaaatactgaatatatggtcggacgatttcagagataatatcaaatactccatttgtcttctatgtgttgttaccttaggaggtgatgctttggaagcctcttgcttggacttcttgacagtgctttcctgcctttcctctgacttcctcttcttacgatcagtcgccgccgctccactgccgctgctactactccttgcctgaaacgagataattaattagcacaacgccacaaacatgattcaaaatccacgcgcacatatgcagatacaaaactgcatatattcagttatttagtactacgtactacaagcaggcgttttagtactacgtataggactactttgcacttattcagttattctcactggcctatttatgttgggggtatgaaatggcacgtgaatcttaccgggacagtctcctgttcttgtcgattgctgtcagacgaattggcgcatctcatgtacggttgcaccgacgtcgactcgatggccggcgtgtagccggcgaatgacccaagatccggcaagctcctcatgccaaaaggactagcctccatttcccggccgtcctggcagcaaatcttgtcaggctgatctcctaagcctgaataatccaggctactgttgtgcacgccaacgctagcactgccggagcttatttgctgcagaaatgaggccatggggctaatcgcaagctcgtgctgctcctgctgctgatggttgcagctgccttccttcgtcagctgatgatggtggtggtggtggtgttcgccgtagcatgctggcgtgctactcatcatggtcatgtcctggacctggaggacggtgttagtgccacccaagtacagcggcgagccggcgatctcgtacttgatcggcgagacgtcggagcgagcatgatgatcgaacgaccgtgccgtcgtcgtcagggtcgtccccgcgggtgcgacattgtagtgctcggaggcggggacttcctcgaacatttccggcgtcacgttcttcgacgcgagcagatcgaggaagttctccctgtagccgccgccggtggtgctgttgcttctgaaaggaggaattcaccggcgttggaattgcgatcatttacacaaagcatgaaatatatagagctagacagagctgttaattagaggactcacagttcgccgtggctccagccgtgtccgtgggcgtgctcgccggcagccgggagacgcatgacgtcggtcgacgacgaggaggagtcggcggcgaaggccgagccggcgagcgccgtcgacccggagtaggggctccagtaactgtagggaaaagaggacgagggctgcaaggccgcgtgcgtcgacagctggtgatgatactcccacatggtggcggcggcggcggccggcgaagtggaggcgctgcacgcggtagccgagtcggcctggtggtggtcggcggcggcggcggcggtggctccctgctggggcatgaaatactggagttgcactgcgccggcgtgcagacgcatcgcatgggttcggagctgaggattggaatgtggagtggaccaaagttggtgctggggcctatttgtaggcgcttggaatattttccggtggggttatcgaggaggatatgtgcttacgtcggcgtgatgcaagcatgctgcaagacatcattgatgagtttttttttttttgcttcttttcttttcaatttataatatgcacgctatgaagcagccatagttaaaatgcgttagtgtaagcatataatttttatagctaacttgtatagggtagcgaccctgtcctttctcagaagtatacctttttttcttttttttgcaaatcttgaagcaatctggttgttggtggtggtacttctgaatttgaaagtgctacttgaagggcctttcaatcagtctacttgagaattgagatgttatgtggttcatcctgggaggttcaatttactacctatccattcgttagctagctggagtatcaatgagtaaaattcaccggcagttcttaaactaattgcattgtcatatatgtccctacacttcaaaaatacaaatcaaggtctcaaaactcgttaaaagtatgtcatctagatccaaaactcttcaggtgcttgcatggttgattgacatttcactctcttaatgacactcaaaaggtgtatgtgacagtttcacgtcagcaccatgtggacttgaaggggtatgcggagttttggacatagatgacatacttaacaagtggcccggaacttgcttgctatgcattttgaaggggccaaaatgacatagcatggtaagttttaaggaccgtcactatactttatgagtttacattcacgaacgctttacttgacaacttattggattggatttaattctatgccaggtaatggtttgaggacgacaagagagttttgggattctaaaatctatctattatattattaagacagctcgacaaggaggcaccacgtttgttgtggaggctagaaattcccacattaatcggagaaaaagagaaaaagaaaaggagagtccaaataggaatacaatctaaaaataggtgaaattcggaattaaaaataagcaatattaaaagaagtttccatatacgaacccaatatgagattaatcaaaattcgaaataaaaataaaataaaatccaaaattagaaaaggaaaggagaatccaagtaggaatacaatctaaaaatagctgaaattcgaaattaaaaataagcaatattgaaagaagtttccatataaaaacccaatacaagattaatcaaaattcgaaataaaaaaataaaatccaaaattataaaaggaaaggagagttcaagtagcaatacaatctaaaaatagctgaaattcgaaattaaaaataagcaatattgaagaagtttccatataataacccaatacgagattaatcaaaattcaaaataaaaataaaataaaatccaagattagaaaaggaaaggagagtccaagtaggaatacaatctaaaaatggctgaaattcggaattaaaaataagcaatattgaaagaagtttccatataagaacccaacacgagattaatcaaaattcgaaataaaaaaaataaaatccaaaattagaaaaggaaaggagagtccaagtagcaatacaatttaaaaatagctgaaattcgaaattaaaaataagcaatattgaagaagtttccatataagaacccaatacgagattaatcaaaattcgaaataaaaataaaataaaatataaaattagaaaaggaaaggagagttcaagtagatatacaatttaaaaataactgaaattcagaattaaaaataagcaatattgaaataagtttccatataagaacccaatacgagattaatcaaaatttgaaataaaaataaaataaaatccaaaattagaaaaggaaagaagagtccaagtaggaatacaaattaaaaatatctgaaattagaaattaaaaataaagaatattagcaaaagaaaataaaaaaagagttcaagtgggaatacaatttaaaattagctgaaattcggaattaaaattaagcaatattaaaagaaaaatccatataagaacccaatacgagattaattaaaatttcgaataaaaaataaaataatatccaaaattagaaaaattaaaagagagttcaagtatgaatacaatttttaaacaactgaaattgaaaataaaaaataaaaacattaaaagaacacaatacggtattaactaatttttttaaaaaataaattctgaaattagaaaaagaaaaataagattttaattaggaatacaatttataaataactaaaatttgtgataaaaataaagactattgaaagaaaagaccatctaaaacacatgacgagataaattaagtaacatgcctataaaggagtagagtggtggcggttgatacgacatataaaaattgttaataaaacaccaaatagaatcctaatgacgattaaaaggagggacatcaggcaggccgtgaagcaaacaagtaaggcagttgctgggacttctagaaagtaaaaaaaaaataaaccccattgataatcatattcaatttttaaaatctcaatgacaataaaaaggagaagcagcgggcggggtgtataagagtgtagctgcagagccgccgacggttgacgggacttctagaaaataaaaaaatgaattccaatgatagttatgttcgatttttagaatcacaatgacaataaagagtaggcgaacaggctgtagagggcatagtggcatcgtttgataggacttctaaaaattataaaaaataaaactacaagtccaatttttaaaggttcggaacttccaaaaattaaaaaaacccaatgataatcatgttcgattttaaaatctcaatgacaataaaaaagggaggcagcgagcgagccgtagaggagtacaatgagaaagccgctgatgatttggcaggacttctagaaagtaaaaataaacccaaacaataattatgttcgattttaaaaatctcaatgacaataaagaaaagaaacagtggacgggccgtagaggagtataatggcaacgtttgacggggcatctagaaattataaaaacgaaacccaacgtgataataaactctaaaaactataaaatccaatttttaaaggttccaagaataatgaatagaaatagtggtatatcgagcaagcaaataaagaaggagatgacataaggggtagcaactggtgtgacttttaaaaactatataattagaaatacgaggatgataaggtttggttttttaaagtctcaagacaatgagatagttatttaaaaaaatttaagtaaaatcatataaaaaatatatgattttatttgggtgctagccgcgcaattgcgcgggccgcccaactagtttagttaatgagaatctagagaggttgcatttccccacttctgcctattaattggttcatttgttcattttctgaattatgaattatgtagcttttgattcttagaatctagaatctaggtgaaaatccaaattgttcgacagagttagagattaactagagctgtcaaaagctctttcaaatagaactaatacttttggggattatgtaggtctaagagcttagctgtggctccaattggtcttgcatgtgcgacaaacccaataagatagcctagatgctgtttcaacttctagcggaaacaaatgcttactccaaaaattttcacattagcaaaaaacattgtttaatcaatgcattgttagttaaactattatttttctccttgttccgtacgctctctcgtgatacaagtggcattgcatggcatttaattggttgaattgctcatgcttgtgttggagcgcgagtgcagctagtgcttaaatagttgcccggtgatatactctctcacctccaactcactgctaaaactgatgtggcaggcttatcgctagtatactacttatactactttctccgtttcagaatgtatgcattttaaaggtagatagagatgattaaaagaaagtatatagagatgattaaaagaaggctacgattgatggagaagagaatgtaggtgaagagaatggttgtaattggttgagaggaaaggataggtcaagaaatagctttattttgaaacacgattgtgctaaaaatagctatattttgggaaggagacagtacatcacttaagataacatgatgtgcatatatatagttttacttctaaaggtaaaaattagaggcaggacaaaagcttcttaattacaaggttttatagatgcagaagaaatgggcataggttaattcagaaacttgaattgtcagtacgagacacggtgataacctgccaaccttctcactgagactgctgccacgttattcggtgatgggcgattggtccatgaaaggtgcctgtcacaactcgcacggagtaagcagcacccggcttcttgcgcatcaagagcatcactctgtcctaatagtgttctttcgtagtggtaaacactgaaaaaaaaactcacagtcacacaatagtcccaacaactcaaccgtcttcggggcataaagcaagccaaatctaggaagtaattaatcagatgtgtgcaccaaagatgtagtaccgcaaacaccggaaactcgagcatctctgtgtaccagccttgtgcttctgcaaaacccgtcgcacgctcagcagcctgcttgatatgattctggaaatgatatggacgtgctgcttagtctgctgatagtatgtcttccagatggtgaagatctgcagcatacaagtaaaagaagccactcaacttcgagacgtcatatcacgtcactttggagttctacagtggagtacattttactaacctaagctgacttttttcatcaactttactttaccatgaccatgtcaggtaacttatcattacaaaatgaagccatgggaaatcacacagctatggccgacgagggaggaatattctcagaaacagtaagaagagctactttgctccatggtcttcttccacttgagtgggtcagttgactgtgtctcagtgtcatgaatccctctgctgtttagttccctgcttactgcaccaccttgtcttgtttactctttgttctcttgctgctcggccaacaatggagcagagactgcatttgcagggccattgaacaaagagctcgccctagggttggtgagtgacggtgatggctttggtggtagtgggcttggggacaaaggcttcaagaatgcaattcattgcttcctgacgctttgcgtcacataagatgatgtgtgaatgccaggaaagtatcagcctgaaatctgaacacagattaaaatcagcggcaggtcagatgcagaaagagaagcagggaaacagcataatgtgttggctgcctttccttaattgaggataaggcatctcttcccagtgaggtactccggtaaaaatgcaaataaactgttgattaaaatactttagtatcttcattagcatgacaaatagatgtagaactatagggtaatatgctaagaaacctagggagatgaaatttccaagacaaaactgaaagggaaagctacagaatgagaccggtgactaaagcagacagttttttttttatcagggtaacaaaacgggcatcatatgtagtataacagatatctcaaatacagaaagtaacatatgagcaaatatatagcatactgatgtaactcaatatgtactctgtgattttctttccttcgcaaagcagtagtttacatgttccagcaagagaagaaagtggcacttacagctacaggagcgccccaataacagagtgatttcacactatattcaagtcagcaaattgttagcttggactgagaattactgctgtacaaaatgctgggctgctggcacagtttttttaatacataatcatggatatgagaaggttataagcactaggctagtgcaaatttaaaaaggaatacatgaaaaatagcactcatattcaaaactaagattagcaatgagcccatgatatgaataaatactcaaattagctattgacaagaactcacaatggatcacaccttggcacgtgtaaaaggggcatagtggagtataagcttaaaatgtgtcccatcacaagcagcatgcctcaaatagcctttcttcaaatcaataatatcctggggacccgcacagattatagaacaaaataaagacgagcttgaaatttaataacaggacttcagtggaaactgggattgctcataacacttgtcagcatatgatcatctggtccacactcaaatggttgagcaaatggcctccaatcagtaacactaaataaatacaaataatttatttcctgtgctttagacttgccacagcggtggttcctgctgacaattatgtgaactccacttccactatttaattctcagaaaactcatccctgatcacttgcctgatctgacccaaaaaaactggtaatcttagcagttaaattaagaggaggaggaagcgtgccctaataatactcagtaacctaattgtcatctgggatcagctgactgaaattggttgtctcatcgagctaaaggaatgttgtgaaaggaacagcaggcacttttcgtcaggttcttgtttataaggggatgactaactttggatatcatcgaacaaagaatatggtttccaatgccgccaccctgtctccattcgtgcagtacaccaagtctgcactctgggtagctaactacacaagcatggactggagaaatttcctttcgcgtgctcaaagttagcagtgtcaaatagcaattaggttgagatgtcaacccaagtgcggtggcaaagttttcaacttgagctttgacaagagacaggaagaataaccagtcgtatcctatccatgtatttacaacatgcttaagatttaagaagaccataaacaagcattgcaggggcatcacgcctacacataaagtttttcaagtggttatatataatatctaaaggaatgactacacacggaccctccacctttaggaaagggagagagacaaaacaaggataggcagcattaagcacgcgcatcacatattctaatagaagaggaaaagcacaccaggaggaggctctgtgtacggtgaacttaatgacaggcaattgaaggagtagctttgtttactccaagttgactctcagtgaaatgtgtcaaccactagaataatataagaaaagaagcttggaggcaaggacagacagctcattctccctcaatttgaaagatgtcgagcgtgaagcttccccactaacgaccttagtaggttggtggaggatgacagcgatcagtgaaaatagcattttgcaatgagaaaaatagctgacctctagagacaaccgtgtgataatactgcattcatgcatgacaaactatgagatggatgtaagcagagttttggactcttcttgagcctccaaatctcttcctgtcgtgacatgctcacaggtacaagatcactctggttaagtcaaagacgttaagcacttggaataggaagatggtcaaaagaagagtcatgtctcttgaaaggtctcacggtggatatcatgctacacacttacaccgaggtcactatacaaattggtgcaggagctagtgacttcatcaccaactgtagttagcttagagcctagaggtgaatttgactacaggacaaaatagtaattcatacattattagaaatgtcagttcataaatatgaaaagatactccggatggacatgttgagacatatacagaatacaaaataaaatatgtggatgcagatttactgagtcactaatgataactgaagatataaaatatgacagaactagaaaaggacagaggaataaaaggttacctggacacagcagtatgctgtagctcttttgtagccagctcaaatgcatcctctggagtcaagaacatctcaatgtacctaaaaatggtttcagacatatcgatattcttcttaaaagagggcaatggtggtggcagattcactgcctccacctcaccaagtatagtaacttcttatttaccatctactccatcatgttttataccaactaccccatgtacttttatgttataaaataatccctttacatatatgattatatcatatttcacctgtacaatataacatctacaggtacaaaattgtcccaaaaacctcactattaatttgttttaatccgtagcaaagcatgggtatctggctagttataaactaaagttgatgcagatagtaaaagatactatatgcagattcatttggcaaagaatatgcattaatattagaggcaatcaagaagatttacagtgtcaaaagggccctaacattgatcaaatatatagtatttgacatttaagtgcaactgcatgattagtcctccacagttgagaatctaggcttaggttacaacgttcagttggaacttggaagtgtctgatgactgatggcatacaaaacaaatactcttaatcttcataggatccaaagagcaagtcagaattccgactccatacttgttcttttttccaccggcccagcaaaggagtttttttttcaatgctttcatactgctgcattgaaaattaagagttaaatagaggacaaataaagaaaggtgcactttagtaatactctctctatttcaggttataagatgttttgactttggtcaaagtcaaattgctttaattttgactaagttcatagacaaatatagcaatatttacattaccaaattagttttattaaattaataattaaaaaaatnnnnaaaataaannnattnggggaaaaaaanannannannnnnntnnaaaaacnnggtcaaannngaagcannnngnnnnngnccanagtcnnnncatcttataacctaaaacggagggagtagtatgaatcaaaacaaaattccatggcatcacaagaaaatcactacacctgagaaaaaagaaagaaaatagcatctagttaggttacctccaaaaacctatttaaccaaacaaggagacatcaagatagtgctgagtgccatattgttgctgattcctgatatgtacacctccagagggcagtacccgtgctaagagaatacacgccccactacaaaacaaaaatgtgtatattccacattgcctatccgagggcttaacactggcttcaatcatcagctgaactatcaattcaccaccagcataacagccatcttgcatccaccacacatttcatagtcactaacactggaccaccctaacataacaccatcggtgacagcaatcacacaaaaccatccaaacagcagcatatacagtccgcaattctacaccacaaaaagaatacgaggtacctacttagcatagggcccctatgtaggaagaaaagtagtggacagggatgaatgtggcggtacgcagcctacacatcctcacaacctaatagcataatacagcataaatggcagtagctattccatacctaacggtgcaaagccatcattttggttataccatgaataatacaagctgcggagaacattgcaattttgaattaaaaatccaaactgcaatcacatcacaagtttgcttaccttctaacgattgccaaaccaatcacgcatcattatgtgctcaagtgaattgcccaaccaatcacgcatcattatgtgcccaagtgaattgctagagaagagaccaaataaagtgctgatctcgtaggccctcatctcaatccttcttccatacagatgatgtggtaatgtatttctgtactgaatcgactcattacgttccccaaactaaataaatcagctctctaaattaggataggttcagagtaaggatcaataaatcagttctctaaattaggataggttcagagtaaggatcaaatcgtctacttcctcgaaccgaaccagtaccaaacgcaccaaaaggggatgaactggatctagtcatcatcaaagctaacatcgtgggtaacatcaacccccgtttcaaacgattcgtccgactggccccgaaaccagcgacttgagaaagagcctcacctcacctcacttgccgcagccgccgcccggggtacctcgcgcggctgcgcctttgggtggcgccgcgggaggaacctggactcggtgggagccactggtcgacggccggtcggctgctcgtccggcaccgtcggcgcggcgcaactgtgctgccctcgatgcctccgggggcgtggccacggtgggttcgtcggctgacgcagcgcgggccgtggcggtggtggtggtctctcgtagcccagctttctgtaagataagtggcccggttgagcgtgcggcggtgcgggtgggtgtgcacgcgctcggaggtgtgaaaacacgcccgagtaccaagcggcagcgtctgtactacttgggcccgataatttgaaggtatttgggccgaaagactgttacggcggtaacaccaattcgatgaggaataagttcaccttactcgagttttgatcgtaatcttaaactaatataacacgtccttcaacttatataaaactaaattatcaaaatcacacgatagtattgtgtccgattttgactgatgagacaacttggtaagcagtgagacccatgtgagacctcatatgttagtggctagcgctttgttcctcctctttcttccctttctgctaatgggagttgtagagggagcaaacgggggatgttgaggatgaagacgacatggacgtgcgccgagtaggagcgcttgatatcgccaccgttgatgcaaccggctactcggggatactagagctatggcacgacccatagaagacgacctatgccacctgtcttcttcgacacgatgggaggatggagctatggagctatgccagtatgccacccatgcctcgattgttgcctctctccctatatcccgttggcctgctacctgcaggctaggaagagggagaaggggaaagaggaggaagaaagctaggaggggagaaaaggtgaaaggaggagaaagctaacatgtggggttcatacaggttccacgctgactcagccgccacatcaacaaaaatatagaactatactggctgggatcttagctagctacaccggtattataagttgaaggacatgttatatatgttattgtggtttagggatgtgattcaaactcgtcgttaacatgttatatatattattttattttgtggaaagatttacaatacatatccgaaagacgtgatcaagtcttcaaaaaaagaaagacgagatcaaagctaagggaaagaagcgtggctgaacatgaatcgatcaatcgcgtagagaaaaaaaatcactgcttcgggccagcctcatccgcgcctttattttttttttcatgaaaccacagatgcagcctctgccatcgatgtccagagccagtccacgacacaacatcgggtcccgttcgtcggcgtacggatcggtcgagttggaggtggccagcctcaacacggctgcgcagcgtgtctcgcccacggttttgtttctcgatcgacaagtcggcaagacgggaatcgtcgcatcgtggacaagattgtgaggcgcttcggtcttcctgggccatgcttcgtttgggcattgtgcggcccacggtggtgttcccgggcgcaacatgctccctccacttcttgctttccgggccacaggccacagttgttctttctcgaaagggatgtgtgttgtgatcatcattcatactaagaagatctaatcgtcagtccgttgttgtgtactggggtttatcccctaatatctgttcttgcttaataaagttggttgtgtttaaaaaaaaaggttatgaagaaaaaggtagttcgacaaagcatatgatactctttgtcgtgtcaaagagaccaagataagtacaggagtaatcgtacagctgcccaacctaatcagcaccggtgaccgagaaaagctcgttctacctctcgacagatcgccgttagctagctaccgagcatagtcgcccatcgtaagtactagtacttcccattcacgcatacataaggacattcggaatcattttctttctcttgaacttcgatcgtgcgactgttgaaacctcctttgttgcatgctagctccatctgtcacgctctggctgccgcgtaggctggtgcatacatctggaggaatctttgccctgcggtgattattagtggggtgacaaaaatgggctccgttctgatggcattggttggaaccgcccgtgacccctccagcagtccagttcatggtacgtgatctgttttataggctgcttttcctttccagagaatatcacgcgttcagcccgcttgttgcactgtaacgcggtcagtgccaccatcggagagggacatcgacatgttacctgtacggctgtgctcaatatataaacccgtgtgccgtggtatgtataaaagatctacggtaagtactggtttcatggcaattaatcgttgtttaggattttttttaccttttcgaaatgtaaataaaatagagggactggaattaggttttttttttggaagtttcgaactaaattaccacacaaaacctggaaattgggccttttgttaaatttaaacaaattctaaagctggaaagtagaatcgtcgttgatgacgtatgttctcattggtgatcgacgtaaggcaacagaaatcggtcattggtctccgtgtatggctgtatgcatatgcaagccccctgcaaaaaggcgcaaaagagtgtatagtacggtgaaggaacggcccagcgcaggcgcatgcagcacatgcatgttttccaacagcgctcgcgctggaaagtagtacgcgttcgtacagtatcctgtttgacattctagttgtcgggtggttgcttcggcctcttgctgtccctcggtccctaatccttcgcgtacgttgatccgcgatcgctcgtcgactagcggaagaacaggttttcaatcgatggagtacgcgcgcgcggtaccatctgctactgtagctagcactcgatcgatcgatcgattggcgcggcggttgctagctgcgcatatgcttagatgcaggctgccgatcgaaagcctgaaacaacgttacttgcgttgcaacttgcaaggacgtcatgcgcgtactcggttcttcaattgccgtgtactgcatcctagtgtcggccactttttagccgattttatctgcatggacggacttgaattgtgtgtttatgtgtccccgtgtttcgttgggacttaggacactaccgtgtttttttcttccttgtttgcgaagcttttggatgcagtatcaatctcttccggaacaccggcccgtgaatacgcactgagtttcggaagagagagagattaaagtgtcgcataattgggtttcagatagcagtacaagttactactgaaaagattggatttaacgtggatacctctctcggtcctccacggttgcgtgttaaatatgcacaggaacagcccctggcgtggcacgattacagcggagagattacaacaaatcttatcaagattaagagataaacacaggagactaacaaccatgatctatccctcaaagttaggaagctaatcctatcactaaccgtgactagatagaacaaatcttaacacccccacacaatcacaacacaggcaacaagttgagattgcgcctgaaagcatccatttgttgagcagtgaggactttggtgaaaccatcagcaagttgatcccttgtagagataaacctgatctctaatagcttttgtgcaactcgctctcgcacaaaatgaaagtctatctcaatatgtttggttcttgcatgaaacacacactacactggccaaggtcacctgtgacgggcccaaaccctcatctttgacggcttcgcgcatggtcagtgatcagtggtcactggtgagtccagtcacctttgacgggtggccggccgtcacaggtgacacccacctctgacgggcaagttactagaaggccgtcagaggtgttggtctccgctagccttgagcgagttaggacccgtcacaggtgactcatctctgacggccctttaaataaaggccgtcagaggttgaggtctccgtagttagaagctgtcacaggtgatctacctgtgacagccccaaaagtaaaggcccgtcacaggtaggtcacctctgacgggcctttatttgctagtccgtcacaggttatgttacctttgacggatttttgttccgacccgtcactgatgagttaattccagaaaaaaaataaatgctaaatattggctagcctcaggatttgctagccatgccctctgaaaaatagaaacatcacagatatattccagtcacagatccatcacagatacatcacccccccaatataacatcacagatccccaacaacacatatatgcagttcaaatgccaccattttgcacagcaaattcacaccccttgaaagccacaatttcggtcgttgctcatagaaccgcatatatacttaccaaatggattaaagccataatgtcatcgacctgcacaacctgtcaataaggaaaaaaaaaaggagaaaacagatgaatagtacaacataaatcgtagttgatcaaatgtgatgacaatttagtaaagtaccataaatattgcacatatgaaagtaaattacattgcactctataaaaacataattttttacatcgccagaaattataaaaacatcttttttacatcacaataaattatctagccaagttcatgagtctatttggcatgaaaacgtcctttcttgttcattatttctgcaagaataaaggcgcacaattcgcctctgatagcgggggggttgatgggtgagatcttgaagccagctctacatttctgtttaataaataagaggttaattagcacgttttgaatagcaatgtagatattgaaatgagcttattcgccattagcaacaacctcagggtcgaaatctttcacctctcttagaagtgttgacatgttgttcacacgtggaaaccacattggtctccgatctgttgtgcgcatgcaaacttggtgtcatgataaagttcattcttgccctccttgtgcctaccacccttttccacatatgggccccaagccatatttaagggcttggtgatttcactgaaatcataatctttggacttattggagttaaggtaggtaaccctactccacttaggtacaatgactaggagaatccaatgtcgcctgcgcagtggttatgtagcgttagtactaagaaccttaacttcaaaaacaatatacacgaagggtattgtcctcttactcttggttgtgtgcgcacatgatgtactccttgtcttgatgggcccataaacaccggttgacatagtcaaccacctcagtgaagctctgtcgtaaattaacctcattcaccatggatggatcaaggaacccaacctgattaccatggcgacgactctcgatccaacacaaccttaaaatatttacgtattagaactaatttaattaggagatatagtccagtcatatcacaagtatagaaggtatgcacttacaaggagtagcattttagaagaccagtgtccaacttccggatcctgaaaaggtcgaagaggtcatcaaagcctatagttatataggcaggcgacgataggaacggctggtggtcgtgatgtccaactatggatgactccctcattttccgcttggcattgcttagctccatgtattgcttatgtagctctcggcaagcaatacccatcacagctaacacattgtcctccaccaatggcatgcctagctcaaattgggctggcgccctcacgaccttccccgatttgctcaccggcatcgacgtcgcagccttgcccctttttggctccggcgccaactccccgaccttccccttgccgcgttcacgcttctggcccttgacaagtggtggggagctatcggcctttcttgtggtctttattggagccaagctttgagctatatctgccaagtccatatcagctccaccaggagaatgaggtactgacaatgccggtccacggggagcctcaattgatagcttacacttgggaggtgtaagctccgtcggtcgacttggacgaggagtcatcttcacaactatgtcttctttgggccattgtatgaacgtcttgcgcgcatcgcccaaagtcatgatttcatcatttgggggcacgggcagcggatagcctgaccaggtgtcctttactgtatcgatggacaccttggcatacccagctagcaggtctgcgccgtggaccttgtctgtaaccgagggcttgaaagccatgccctcagcgacttcaggagcgaaagttgggtggactctcgctagtaggacacactgtgctgcgccctgcataaggtgaaagtttgaatttaatattggaatgtgtaaatgtcttttattagatatggatcggataacaacaattacctcgatgtggtccactgcagctagtggtgcgatcgggagaccaggggccggcacctctgtggatgcacaactactcctatgctgtgacggactcgcgtcgtgttgtacacgaggagttggttgcacagcaggtgttgtgactcggggtatattcatgtcggcgagcaccttgttaaccctttcttccacccttgcattcatgctagcttctagttcttgaatgacctcaaccttaagttcagccttcaaacgagcgtccctctcttccttggagactttccgtttcctgtattgggagctgtactgagggagtccatgcttccagggcacatcgctaccaattccccgagttcggccaggatgttctttggttccgagcgcctttgtgaggatgtcatcttcgcgcctcttcggcgcggactcaacctcgctttgtgaagcttgttcagcaaccaagcccaactagaaaagaagatagtcgtttatacgaacttgtactttatacgaacggaaattagttaggttaagtagtgaactcaccagttcctgatagacgacggcatcacttttgttctcaaatgtgacagagccgtccgggttgaccttaccccttgcccgcgcccagttgcgagctctttgttcagggatgtctgaaaacggggcagggacattcgctgctgcagcggctgcatcttcttgggcccatattgcctccttgccgatgtaccctgcggtgcccagccgatgcgggtgctcattccgctgttgcagtacgcgatgtgcctcgctggattccctaaactcttgggtggtcttgagagagcagaattcctcccacaccgcttcggttatttgatggtattcatcgaacggcgtatgattgccgggcgggttgacatactcggtgaagagcttcgacttccaattcttccaagctttgcccatcttttggaatgccttccgcttgagcctatcctttgcttcggctggaaatgtgaaccatttctccattgccgtccaagctcgctctttctcggcttctgtgaccttcccgatatctttatagaggatcccgaagttctcacgtgccactagcccgcagcagttagaccatcttccaatgacagtcctgggcgccgtgggcctaccactagcgtcaacctctcttataacttgcactgtggtcggccatatattttgtgaccgcggatttctactagacctacttgcacttgtctcgcccgacatcgacgtatgttgttcctgcggcaattctgcagcacaaacagaaggcaatatttgctaaggggtgctagctaaaatttatgtggtcatgtggtgaaaatttatgctataaattaccatgaatttcgggttgttggaccgccgttgtcccgggatgaccttcggcaattgcctctgtggctgggtttgcttcttcctggatcctcgcaggtgttggggagggcgggtttgcgccgggcgttgacatggtttaactttcgcgaaaaagattataaatttcctaccattagactaaatagcattagatccaatgtaatacggggtatactatgaaagatatggcctcagttttgctgagaaatatgcatcaattacaatcatttgcatgaagggataaaaagaggaaatcagctactaggagaaaaaagcaacccaaagaaaatagaacaagtgtagttcatctgttcttatcaataaaatagaacaagtgtagttcatctgttcttatccataaggaaaagagcaagtgcaggaaattaaagtagtagcaacagcatggccatataatagcagcaataagagcagtagcagggccatataacagcagtaggggtatatatgccacaggggcagcaacagcagggggagattcacataaacagcaacagcagggtggaaattgacataaacagtaacagcagggtggaaattcacataaacagcaacagcagagggaaattcacatagacagcaagggtatataaatcaacaagtgtagataatctgttcttatccataaagaaaagaacaggtatagatagaatgttattaagcaattcatccttggccatttaacaagaagtacaggggcaacaacagcagtggtatataaatcatgcatatattattgtagataaaaaaatgaacaagtgcagaaaatctgttcttatgcataaaaaaagagcaagtgcacaaaatctgttcttatgcataaaaaaagaacaagtgtagaggtatataaccactgaatcaatcatgcaaatttaaaaaacagcagcagcaagggtacagaatttgcatgattgacataaaacagcagcaggaggagtatatatgccacaggggtagcaacagcaggggcaaattaactaaaacaacatgtctagatatactcctcttatcaatccagaagaaaagagcaagtgcagaaaatctgttcttatgcataaaaaaagagcaagtgcacaaaatctgttcttatgcataaaaaaagaacaagtgtagaggtatataaccactctacactggccatttaataaggaacaagtgaacaagtgtaggggcagtagcaggggtgtagataaaaaaggagacagtactactaacttcatgtaaacagcaattcatccattcaattcaagcaagtctagataataaaacagcccacaatcattgtggcagcagcagcaagggtatataaatcatgtatataaacaacaattcatacaattgacctattcatagacaaaaagggtatataaatcaacaagtttagataatctgcaaagcctccttaatcatcaaattatgacagaaaacaaaatgcatggagaattttggtgtctaggtcggttccgtccatggactacactggcctatccaccaaaattccccatgcattttgtattctgtgatggtttgataacctcggaactacattaaatctgcggccaatctatcaattcttcccttgtaactagatttcaaaccctacacctaataaaggtccttaattatcaaagacactccatgaatggttatatgtccaaatggctcttaaatccacatccaagttgcaaactagctacacattcaagttttaactaacagttgcaaccataggcagcagcatgggcaaacatagacagcaaggggcaagtgtagataataaaacagcctacaataatttatgtggcagcagcagcaggggtatataaatcatgtatataaacaacaattcaactattcatagaccacaagggtatataaatcaataagtgtagataatctgttcttatccataaagaaaagaacatccactgcagcaaaattcatgctaagatcctctattgatgctaagattcactgcaccaaaatcatgtatataaaatctagcccctacattcatccaaaacatccatagacaacaaatcacatttaattcatctatacagcagcaccaataatcgaaacaacaaatcacatttcattcatctaaacaatgcaattcatccatcggaaaaaaggaggaatgggggagggtggcggcatacttggagaagcggcgtacttggagacggcggcgcagaccgtagtcgtcctggatcctggtggcggcggcggaaaggcagtggcgaagaggtcgaggcggtcggcggtggtcggggatcccggcgtcggggaggtcagggtcggggaggtcggggaagtcgatggacggacggcggagaggacgaccggcggcgagggcggcggtggagacggcggcggagatggcggtggagaggacggcggagatggcggcagagagggcagcggagatggcggcggagagggcggaggagaggttgaggcggcgacggtggagatggcggtggagannnggacggcggcggtcntgangagagtgagtgaggaggcggcggtggagaaggaggcggcgagggcggcggagaggcggagatggcggcagagagggcggcggcgaggagggtctggatcgagagagagagaggcggtggcgaggaggtggagatggcggtggagatggatggcggcggtcgagagagtgagtgccgcggcggtggtgcaggccggcgtcgggaaggtcggcggagagggtgagcggcagagaggtcggcagtggagaggtcgaggcggtggtggggaggtcgaggcagcggtggagaggagggcgtaagggtggcggagaggtcgagagggcggcggatttggcggcggcgaggacggcggtggagaggcgaggcggcggtcgagagagtgagtgagtgagagtgggcgccggatctggatcgatctagaagatgtccaaccctaggtcaaccctagtcaaactcacctgtgacgggctccaactatgtggccgtcacaggtggcctcacctgtgacgggcgccaaccgtggagccgtcacaggtaagaccacctgtgacgggcccaacactctgggccgtcacaggtgaggtcacctgtgacggccctacagatagagcccgtcacaggtgagtttgcctagagcaattttattttattttatttcactagttcttttattttccttaacatattttcacatacactacatattttttttatacttaattattttatttcactaacagtagtaattgcacttcattattatactactttaattattttatttccaatgcttatacttgcttaattattttatttcacttctagtgggtgcttcacttaattattttatttgactatttcataagcaatatactattgatcattgcgaacatattagagtcatacagataacagacatgtagacataaactacgtacataaattacaaaaataatccttcctcatggtcgacacgtgcatattgaacttcatcttcttcctcctcctcttctagaggtatttcttgacctatgccgtggacgtgctggttgtaatcatcctcgtctgcaatattgtccaatccaacaattctccttttcccttcacgaacaacatgtagtttcttgttacacgggtcaactatgtagaacacttgaacaacttgtttggcgagaacgaacggttcatccttgtacgcgttgttagccaagttgacagtggtgaaaccttcattgtcaacttttacattgcgaagatcgacccatcgacaacgaaacaacgggactttgaacttcaagtaatctagctccaatatttgctcaactctaccatagtattgatcacgacgaccaccgtcactagtagcctcgatgcgtaacccactgttctgcactgtgcatttgctgtcttgctttaccgtgtgaaaggtgtatccatttatgtcatatccttgccaggtggtggcactccattcaggaccctgtgacaaccactgaagtgtttcactaggcaagttctgcaacctggcaattcggttcttcagccactcgttgaaagaagacatgtgcttattcctgacccaactctctgatcggcctgggttctcttgtcggataactgcaaggtgttcgtcaacgtacggcaccacctcagtcatatgctgtagtaccgtgaaatgagctttatcgtacaccttccgatccaacctaatagtctttcttccaacagtaccaacaccgtcaagcctcccttcgtgatgagatcgtggtaatccaattgaagatgtttctgacatgtagtccacacaaaattcgatggcctcttcggtggtgtaactctcgatgatactcccctcggggtgtgaacggttccgtacataacccttaaggatccccaggtacctttcgcaaggatacatctgcgtcatgaatgctggaccacagcactttgtttgcctcacaaggtgcaccggaagatgttccattatgtcaaagaaagttggaggaaagtacatctcaagatgacatagggttctcacaagttctgcctgtagttcatctagtccctcgggatcaatgatcttctggccgattgcatggaagaaggaacacaaccgctggatcgtgtgtcacaccttaggaggcaaaatattccttattgcaacgggcaacagctgtgtgataagaacgtggcaatcatgcgacttcattccaaccaacttaagatcttgcagtgaaacgagcctactgattcttgatgagtaaccagatggaacctttataccactcaaacatgttagcaaatcaatcttctcttctttcgagagagtgtagcaggctggaggaaggtaaaccctgccggattccgtggttatgggatgtagctccgaccgaacacccatatcttccagatctcgtcgggcgttgagaccatcctttgtagtacctgggttaagcagtaatcccattaaactctcgcatacattcttctcgacatgcatcaaatctatgcagtggcgaacttcaagatcctttcagtatggtagtctccagaatattgacttctttttccacatgctcctctcttttgtcttttgtttttccacatgctcctctgttttttccttcgatgtgctcttctcttttcgctttccaactttcctcttttttccaaactcgttggttattcccatcactaagttgtgcacctctgtccctgttagctctgtcgggggtccggctgtatctctgtgtccattgaaattcgttctcatattcctatacgggtgataccttgggagaaatctcctgtgacccatgtagaccgtcttgtgtgaatgcttcaaccatttgcttcttgtttcctccatacactccgaacacgcccatttccctttcacagtttggccagaaaggttgccaagggccggataatcgttgatggtacaaaacagcatcgcatggaggttgaaatactcttgtgcatatgcgtcccatgttcgtgtgccctcattccatagcctttcgaagtcatcgattatcggttcaaggaacacatcgatatcgttgccaggttgtctcggtccttgaatgagcatggcaagcataatgtactttcttttgaaacacaaccagggaggaaggttatagttaacaagcagaactggccatgtactgtgacgactgctcaaatcaccaaaaggattaatgccgtccgtacacattgcgaaacgcatgtttcttgggtcatttgagaattcctggtaaatcctatcgattgtcctccactgcactgaatctgctgggtgcctcagcatagtatcgactttccgttcttcggcatgccagcgcacaagcttagcttgttccttgttcgcaaacattctcttcatgcgctccgcaattgggagataccacaccacctttgctgggcctcccctctttgacttacttccttcaccttcactctttgctcgtttgtatcttgatcccccacaaatagggcagacatccaagtcagcgtattccttgtaatacaaaatgcagtcgttcggacatgcatgaattcttctgacctccaggcccaacggacataatacttgcttcgcttcatatgtcgtctgaggtaaattgttcccctctggcaacagatcctttaacagctcaaggagttctgtaaaactcttgtccgaccagccattactagccttaagcttcatcagttccaacacgcatgacaacttgctgtgcttcgacttgcatccatcatacaacggcatctggcaatcttccaccaacttactaaacttctcataatctctgtcgttgtcctctgcgtcttcaatgtcatgcaacattgtagatagacattgagtgtccaaatctatggtctctccacctaaaggagaaggtacgaacatgccttctcgagctgcggcggtgttctctacatcctgatccaacacttcttcagctgcgtcatcaggcgcctcttgctctccatgcttggtccagcaggtatatttcttcatgaatccattcattatcaaatgagcatgcacttcatccttgtcttcgatcatctgttcattcttacagtccctacatgggcacaacatgtgcatgctcatcctactttttctgtcattatccgcaaatgtgacaaattcagtgaccccctctctatactcggtagacgaacgatgcgcatagtacatccatctacgatccatctgaaatcaacaacatacgaagaaaaataaatgatgatcgatatgttgagaatgaatggagaataatgtgttttttaccttgaattttagcaaaaaatcgccccccttgccctcccaaccgatttgtgaacagtacaatggtcgggatggaaagcagttggcagtttgggggtatttatagacccaacacacctcaaacgggttagataaaaaaagcccgtcaaaggtattgctcatacctttgacgggcttctattcaacggcccgtcactggtatccgctcacctgtgacgggccagaaatgaaagctgtcacaggtggcggcccatcacctctgacggcttctaatgtatcggcccgtcacaggtgaggggataccagtgacgggttggaagaaaaactcgtcactggtatacctctgacgggttttcctttcggcccgtcacaggtgaggggatacctgtgacgggccacggccagatgcctcaccggtgacggcatcccgtataacccgtcaaaggtaatggtcactactgaccaattcgtttgcccgtcacaggtatcccgtcagaggtgtgaggatctggcgtagtgacaggatttgatgacaaatacttagctcccaaattatcacaccaaagacaagcagtagttgggtgactaatttttaactcatcaagcactttttgtacccacattacctttgctgtagcattagccaaagacttatactctgcttctgtactagaccgagagaccgtggcttgcttgcgtgcactccatgaaataagattctttccaagaaacacagcaaaacctcctgttgatcttctgtcatctagacatcctgcccaatctgtatcggagaaagcactgacaagcatagatgaattcttacttatcttaagaccaacatttcttgtaccatgtacataccgaagaattcttttaactgctgaccaatgagtagtagtagtaggagcatgtaaaaactgacaaaccttgttaacagagaaagaaatatctggacgagtcaaggtgagatactgtagtgctccaactacattccgataccgagtggagtccaatggccctagctgttctccactagtaatagacagcttttctaacactgataaaggagatgtgactgacttacagttggtcatccctacacgctgaagtaaattagttgcatatctttcttgtctcattgtgagaccatcatctgttctctgtacttcaatgccaagaaagtagtgcaagtctccaagatcttttaaggcaaaatctgcttcaagaccctttaataaagcatctgtagcactttgtgaagaactggcaactataatatcatccacatatactaaaacaaacatggttaaatgtcctttgttaaggaaaaagagagaagcgtcagctttagagggaataaaaccaagctactgcaatttctgactcaagcgtgaataccatgctgtcggtgacatgggaccgggggtatcttgactagaggtttggggtagctgcagtcacccacgtggcctaaccccctcgggggggtcgggcccgagggtgatgtggccgcccctccttctgtctccccgaggggtcgggccgctcccgtttcggccccgagggctggggcgccccgaccccctgtgggtttggcgccacgtgtgtgggttaggtgagcacagcggcgctcacctaaccgcgtttattgcgggttggacgagcgccccacgccgcatttaatgcagcgcagcacactcgttcggtccgtgacaggtcacagtgtgtgaccggtcacagaccggtcagatcgcgggttaggtggcaacaggcggcctttcgcacgcctcgccccgtcccgtcggaatgatgagagcctctaggcactcgtccctagccggagccggcgtgctgactcctggagttagcacgtcagtcccggctagattcataccaggcttcatcgcaaccattacaaggaagtcattttatgaagaagggctgacgtgtggcatgctaaactgacgcgtggtagacaagaatgaccggtttgtgactggtctgacgccggtcacgtcatcggcagacaaccgtggtcccatgttgcgcctgcttccggcggagtggaggtaggtatggcccatcccatcagagggtcattcggacaacagccatggcaaatctctgcccattaatgagggagtaacagggagatccccggtgtcaggcgagtgatgacgctgggcctcactcaaagacaagctgtgatttagcttccaggcgaaggcgcaagccagttttttcttttttgggaagatagggtgagtccccacccaaaagaagagtaggtagaagtggtgcatgtgggatccccttgagatataaaaggaggaccttgcccacttaagaaggggggagctggggaaagaggggggagaagacctgagctcgtagaggagagaaagaggaagagggtttctagagtttgaactctcttgctctccagctctttgtaactccttcatacacagatccaccagaacacaggagtagggtattacgcttctcagcggcccgaacctatctacatcgcccatgtcttgcgcatttgctctctcgcgaaacattccacagatcgagtgcttagaacctcacctagcgcccccggccgaaccggcaaaggggggcccgcgcggtctcccggtgaggagccccacgctccgtcacatgctctaggcacttgtttgagaccatataaagctttatcaagtttgcaaagataatgtggatgatatttatcttcatacccaggaggttgccgcatgtatacctcttcctccagaactccataaaggaatgcgttctgtacgtccagctggcgtaagctccatcctcttgtaactgcaactgacaacacaagacgaatagtggcagctttgactacaggactgaaggtgtcctcatagtcaatttcatatctctgtttaaaacctttagcaacaagacgagccttgtatctatctatagttccatcagccttctgtttaattttatagacccacttacaatctattatattcttcccttttgtaggagggactaaatgccatgttttgtttttctgcaatgctagaaattcattgtccatggctagcttccaatttttactattcaaagcatcattcaaagtatcaggttctgactcagcagtaattaaatttgcccaacgaactgtaccgtctgtgtaaaccttgggtttacgaattccctgttgtagacgagtggctggtcgttgaggctgagtcagggcagcttcgctggatgtggtagagttgttcgccgtagagttggtcgccatggacgatcttgacgacgagctgtccgagagaggctccgacgagcccccgtcgatcggaacagccaaggagtcatcgccgcgtggaggagacgccggctcgggcgcactgtcggagacacgcgacgaggaatggctggtggatggcgatcggctgagagaagagccggctgcagcgcctatatccccaggatgatgcgccgcagttgcgtcagaagtcgcagcgtcgtcaggggctgcgtgagtgttaggagccgcggagtgcccgggccgcccgccgagcagaaaaccatgggtgttttgctccaaaatttgccctgttcgcccagaaatttcagcagcagcatctgcactcgtagcaacatcaactggagactcatgagcagggttagtagaagaattaatcacatattggtcaacatgttcgtcccgagaaggattcaaaagatgttctgggaggagaagaatttcagcccggagacaatgaccagcatttggatgaaggtcagaaaatgggtagatatgttcatcaaaaaccacatcacgagaaatataaacccgaccacttaaaccctttgtgcattacactgtaaccaaggaaaacacaccgtttcaagcggaattggagtttgtgagaattgtaagggcgtaaatttggccagcacgcgcagccaaaggtgcggagggaggtgtaatcaggtttgatatgaaagagcatttctagaggtgtggagccttggagaacaggagtgggaagccgattaataaggtaagtacctgtaaggaatgcctcatcccaaaacttgagaggcatctgagcataggctagaagggatagcccaacttcaacaatatgatggtgcttacgttcggcagacccgttttgttgatgtgcatatggacatgacacacggtgagaaataccgatgcgttgaaaaaaggaattgagtttgtgatattcaccacccaatcagtttgcatagctaatatcttgcgatcaaagagtcgttctacaggattctgaaaattatggaaacattgaaacacatcggatttatgtttaaggagatatatccaagaaaatttgctgaaatcatccacaaaactcacataataattattcttcccaaccgaggttggtgcaggaccccaaacatctgaatgaataagctctaaaggagcactagaacgactcaaagacttagaataaggaagttgatgactcttccctttctgacaagcatcacaaaccgaatgcttgtttgactcactaacacaaggtaaattattatgactcaagacttgttgaacaatgactgaggacgggtggcctaggcgacaatgccactgcgaaggagaaagcttgatagctgcaaaaacttgtttatttgggaatgatttcagaggataaaggcctcgctcacatctgccttggtgaagtagtttcctcgttacctgatccttgatagaaaaataacgagggaaaagctctaagaaagcttggttatcaaatgcaaggcgatgagcagagattaaacttttgtttgcttcgggaacataaagaatattttttagtataagatcacggtgttgggtgcgaacaatagattgaccaatttgattaatcttcatacctgaaccactggcagtatgaacttgatcacctccattgtacttctcccgcaccgtcagcttgtcaagatcgctggtgatgtggtccgtcgccccggtgtcaatataccaattggtaccaacaccgtaggaggaggtagcagcagcagcactcttctcttcgccagtgaaggaagcatcaaacctcttgtagcacttgaccaccgtatggcccaatttgtcacacagctgacacttggggtgatctcctccttggttgttggtgaagccaccacggccgcggccttggccgccgcgaccacggttcagattttggccctggtttggctgaccatggccgcgacctcctccattgccgccgcgagaagcagagttggtggacgactgaatgccaccctgtcgaagttccaatcgctgctcaaaagtaacaagctgtgaaaacaactcaccgactgagattggctcagaacgttgggcgactgcagagacaaccgggtcaaaatcatcatcgagcccagccaggatgtcggagacgatgtcgtcgtcgtcgagcttctttcctgccgaggccatgtcatcagcaagaccccgcatcttggccacgtactcggcaaccttcagattgcccttcttcgtggccgtcagagccatgcgtgtgttcatcacacgcgcacgggagtgagatgcaaacatcccacttatggcatcccaaaccccaacagcagtgggaattgagaccacctggatgaggacatcacgtgagagggagagcaacaggtagctgagaacctgctgctcttgcgccacccactcggtatgcgcgggattggtgacccgcacatccttgtcgtccttcttggtgatgatggtggccggcggctcctcctttgtgccgtcgatgtatccagccatctgagctcccctgagcgcagcaagaacttgcgcctttcagagaggatagttgctgcgggagagtttctctgtgaccgcgtgcgcgagagaaggagcagcgccaccggctagcgaggatgaagacgacgctataatcacgacgtcgaggaagcaggctctgataccatgaaaagattggatttaacgtggatacctctctcggtcctccacggttgcgtgttaaatatgcacaggaacagcccctggcgtggcacgattacagcggagagattacaacaaatcttatcaagattaagagataaacacaggagactaacaaccatgatctatccctcaaagttaggaagctaatcctatcactaactgtgactagatagaacaaaccttaacaactactatacttatacgcataaatatctataggtatgaattgagtgctatctttatcttaaactagtactttatcataaaatatactccctcgttccctaaatgtttgacgtcgttgactttttaaaacatgtttgaccgttcgtcttattcaaaaactttttgtggaatgtgaaaaactatatgcatacataaaaatatatttaacaataaatcaaatgataggaaaagaattaataattacttaatttttttaataaaacgaaggtcaaacatttttttaaaaaaatcaacggcgtcaaacattttgggatgaatggagtagtaacttttaaatataaatataaatatgcccttatctagatttatagttaaaagttattatattaatttgaagataaatggagtaattattttcgcacaacgtgtacatcgcttgatctgtgttcagtgccgtcgatggccatgtgccaagtgatcgaccgcacaggggcccccaaaatcaagggccccaaaattctcatatttaaatacaagacactaatttccaatatgtttttatcctattcattttatttttttttaaaagttcccctcatcttgacgtactgatttggctagaacatatttattttctttgcattcaatagatgttcaataataattatggcaaactcaaagaaatatagtttatagcggcgccatgaacgtgcattctagatactaaacattcaatttttacgattagtaaagaaaatcgaataactacattaagaagcacttatttttcttacttaaggaggtgtaagccaccatttacgtaatattttttctgaacaatttagtatcccttttgttgatattttctaaatataaggtctcattttaagtttcacactggggcctaaaattgctaggtacggccctgtctgtgttaatgtttttgggggcatatgggaccacgtcaagagtgcccaatgtgtcgaggaaaaaaatgtccaatctacgatactactcaaaactaacacattcctcttgaaaacacacgctaaaaaagtttgagatcagcgacaaatttctacctcactaaattcatattcaagtcatacataaatgactccatataccgtaccaaaaacatcttctggaaaaaaaaatatctgcactactacataacatcataaaaggactagggctgtgtttagttcgtgtgccatttttttaaaatatacggacacacatttaaagtattaaacgtagactaataacaaaacaaattacagattccgcctgtaaactgcgagacaaatttattaagcctaattaatccgtcattagcaaatatttactgtagcaccacattgtcaaatcatggtataattaggctcaaaagattcgtctcgcgatttacatgcaatctgtgcaattggtttattttttcacatttaatgcttcatgcatgtgtccaaacatttgatgtgatcgaaaaagttgaaagtttgaagaaaaaaattgaatctaaagacgacctagcactatatataccgaaaatgttaaaactgttaaaactgacatatataaacctttttcctatctacatgggttaaaaataatatacaactagttcctttgaacaactatagatgccggttctaagaaaaaccgacaccaattttataggtgccgccttcaatatattatagatgttagttaattaaaaaaaggcattgtaagaatcgagccaaaaatgggagatatttttttagcaaagtcaacatagatcatccttatcccttcgctcgttccacccctttctctctcgcccacgccatcccttcactctcgccctgccataccctttatctctttgctctcgccctgccgctttctcctcccatcctcctcagcatgtggcagcatcccccttccccttccccaggttgttgttttctcctcaatccaaggcaatgatgggggctcgagcaaagatgacggcggcaatggtttggttggtgtgataacgactcccactccccctcgccctctttgtttctcgggcgtcgatgcatcgatggcgtcacctccaactcaggggtcgttggatgtgccccccccctccaacagcgatggtgatggcggtccgactacggcgagcagtggccctccctttgaccctgcctccctgtgagcaatgactagcaggtaggtatccctcctctccttccccatccatccctcccaaaaaaaaaatcccctcactatgtattctggatttgacagtggtggtgagcggtaatgccttggcctccaataaacagcggcggtggcggcagtggtttttgtgagaatttgttatttggtttcttcttattggatctgtgagaatttttattcagcttttgtccctgttgttcttggcctgaagcattgagtacccgaagcatcaactcgatttgagccgatgcgagcctcttttttttttattcctataaccatcaaaggtactgattcttaaacccgtacctttaattgttcacatcggtattgtctagaggatgcgggtaggaaatccggtgcttatggactgttcccaaccggtaccaataagatttttttaaagcagtgctgggaaccatattggtccaggtttgtctgcatcagttatgcatgggggcgaacaaaggcgttgatatttcgtaacatcttaacagatgactgttttcattttggcgaaaaaaatggttcgtccaacccggccgaaagcgcaaaacactatcttgatctttgacagcatattttgctgcagaaaccccagaaatcacgtacggcagcccagtgcaagagttaagatattgtcaggagactcaggatgctcagcacgaacacaggagactgccggtagtgcggccaactatatcagcgcgctgccgctgcctgtctatatcagctcatcagactccatcactccacagcaggagccagccagccaagccggggtacctggagctgcatgggcccatggcatgcatgcagctttcgcaccgagagcgcggcacagcgatatcacgagccggcccggcgcgctttccccctgtacagtacaccgaggccctgcactgcgcgcgcgcctggcctgctataccgatcgacggcccgacgggccccggcgacgccgcgccccccgctgcggcccttccctgtatgcatggcatctgcgcgcggatcgcgctatacctccatcgatcacccaaccaacccggcatgcatatggcagcgtaagcgttcgtgaaaaggcggtggcgcgcgcggtcctcgtggcacgacgcgaagacagcaagcggcgcgtgcgtacgagcgtgcgcggcgttttgtgctggcgtgaggtgtgtcggagcggtatgcatggccgggccccgatgatcgatcggtcggtcgatcgacctgcggtgcggggtgcgggagccggccgggcttgtactgtagtagcgtagtgccgtggctgtgcatgcgctgcaccgctgcagggtgagacagacagaccgggttcgatcgaggtggtcacatacatatatatgtagccagggtggccacaggctacactacgcgtgcatgtgacgggccagcatatatagcactgtgatattgcgagtatatatatgattaaaacacgtacgtctgttattgacttattgtacagtagtttttttagatacagtagtgtgcagtagctaaggtaggtactatacgtacgaatacgatgttgctcccctttaccttcggttccttggagtagtatacataggaaatgagatattttttccccaaacaaacaagaaagaagaattgaaggtcttcaagtaaagggcagataggaattgaagaaaagtctactccaaataaccaatccttggagtagtactccgtactgatgaatgaacggtaagaagtttgatcatctctgaagaaacgcaaattccaccagatgtgtgcaagctgattgcgctgactgctgaccgatggtacgcttggctgcctctgccacatccgaagtttcatcgacttctgaggttgagtgtgacttcacggtccaagatagtactccgatcgagtagattgcctatgtcacatcttatgatatcgactgctagccagtacttgttgataaacaaaatttgaacacgtctgcctttttttcccagcttccggagtttcagagaatactctcagttatccgataacacacagttgctgctacagtattgtttaccgcaagagcgctgagcgttacatgtatacactgataatactattacaaaggagtacacagtcacacgaacagaatacaaagtgtgctgttgctttacagggattgtcaaggagaccacgattgcttgtgagagttgacacgagctggacgggatctctctgagagcagagtgacattcattcgggcgtgaccacgaggagcctttcgtctggtaggcctttgcgtgcatggcttcctctccaagctctcacaggaaaaaggggacgagtactcagtgctgcaggttcttattccctcccagattcttcgtcacgtataccaatcttcagaaagaacacgtacccggggaataactctggccggcatgcgtgtagagacgagcacggcatcgtcgtcatctcactaaccgagagacagtgaggttcgcgtccatgcaaaatatacttcattcgtgtgaaaaatatagtaatctaaaatggaacacattctaggataataaagttagatatatctttgttcaagtttaccattttacattctatcttaagttcttatatattggaatagagggagtaagtatttttttaagttttaacaaaaaataaaatcaagaaaagaaattaattgttatgaatgttactatgaaaattagataaagaaaaccggttgtgatcggttaaaaataaaaaagaaattttaaaaataccatcagcaaggtagatgaagatataaattgttatatttttagtcgaacggagtactcatctttttttccttttttttaagtcgccgtctcccccgtcacctcgtgaagatagcaggcacgcttactagcacgtgggccgagcgaaatgtattggagacgtctttgttttcctagccataaactctctccatccctaaatacttgacactgttaaccttttaacacatgtttgatcgtttgtcttattcaaaaattttaagtgattattaattctttttctatcatttgattcattgttaaatatacttttatgtatatatagttttacatatttcacaaaagtttttaaataatacgaacggtcaaacatgtttataaaaatcaatggcgttaaatatttagggacggagggagtataatgcatatatatgttcgagaaaaaacatacagttccaatacgtacatatatgcctctttctcacgtgggttccggatgttcatctctctatctagccgtagttttcacccaactcttcacttgttgcttgaaacatagtcctaactaatccaatgcactcaatctggttggaaatgcttccttgaacatattgtcatttcaataattacctcgaaaatcactggataggatttctcattaaaaaaaccattttcgtacatatctcctatttatttttacatgcggtccaaaaaatttacagtgtgtgaaaatgcataggagtctccttatcaagacccgcgtgtaaaaattttgacaggacaccccaaagtgatacggctagtggacaaaaaaaaaagagtaattagctataagatactacggcaattattttattatcttcactccaaatgaagagagaaacatataaagaaatacattttagccgtcatggacgtcgtcgcctcctcctccaaattctatagggttttggagggggatcaggagagggagagtggattagttcaatcaggttacaagcaatctggccctagaggaaaaatagtctttttcacacggtttctctctccatttggaccaaaattaataaaataatgatcacaatatctcatagttgattaccatttttaggattccgatagctatgtcatgtttttggagtgtccttcagcaatgagcataaaaacaacttttctaattaattttcacaaacaatatatagttttaggaggaccgcatataaaaaggatatatttacaggagtcaccctaggagcaccacatgtataaaagcaaataatctattaaaatcgaaggagggtgggccacttctagccgcaagccccttcgcatctctctccgctcctcactctcctctcccgcaccaaactcgatctcctctcctcctaggcgccaccctcgtcatctcttcctttacacacatcccacgttgatgtcgccgcataggcttaacaaggagttcaaagccataagatctgattcaccttggcctttccactggtggcgcgcccaaatcaattttcgtagacggcggtggatcgagccatatgtgaaaatcaactatttttataggtttttaagttataggcgaaccctccaacagcatgtatatatgaaaaaaaaaatctattctagccgtatgtacaaactggttttgtagtagtgattcatgttgaaatgcttattactgagaaaagttagcacatgttgatgggtcaagcagttatatgacttaaaggatgatttcgacgcaatgcagaacacttgaagaatgggcctcggtgaagggcaagagagacaaattttttactatgctcatgcatgtacgaactagtagaacagaacagcatactcagaacatggataatctgcgcaggaaaccataattaatgccatctacagtacgcaggtgcgcgattaagttaaacgcgattgtatgtccgcatcaacgaaaacaaccgcaatgaggccaaagcagggagaatctcagcgtataggctggggccccagccccccaactcagcagatgaggcatgcagccatattcctctgcctggctctcactctcactcgatcacctcccggtaaaatccaaacggcgcggcataattctgccgcataaaaccaagcgaccaaattcccctcctctcaccgtgtcacacgggaacagaacttactactcggcctctgcagctatatagctctcgatcgattctgttctaagctctagtaatctagcctattgcatgccgttcccaaggttagcgaatgtttttagactaagccgtgatctatcatctgatagtatcaggctatcagccatgaattaatatatatatataaatactactatatggatgcatatatatgtctgatgtgacctatagctttgacgcaatttcctcacctaatgcttgtgatatctatgggttgttgtcacgacactcgttataggttagtgatatctaaaactaattttgattacgtttctggagtttactttttgtttatagttaggacatcgaagggtcctgtttaaaaaggtcctccttgacgtacggattagagtatgggtcattgtttgagtatatgcaataatacgtacacaccatttttcccggttgatatatagacgggcagcattacaatactaataatcacactgtaactgccggcctaacaacgtcattggtcgcgtgcgatttgacgcctgcttggcaaatcgatcgatcaggctagcatgccgctagctggggacatgcgtgaaaagattgtaaaatcaccaaaaccagagaaagcacgtttaattattaatgtctgatcttgattcttgtctggatcgatcttcagaaaacatatatatgtgtatatatatatacaactgtcagttagaacatatgatccgtgaatttctcacatggttggcctgttgctacctgtggtcattgaggctacatcaactacttctatttccttgtaatgaaaaaggtgaaatacgcacgtagtttagactcatccgttgcctgctgctgtttattgtagtataatcaagcgatattttgtgattatatggaagaaatatacacacattattacttaaatctcctattgaaagcgtgttcacgtgtaagtaatatttatacgcaccaagatttgaaataatcatacaatcatagtcatatgactttatcgagacgaccggtgcttccctagaatcaagagatataattcgatcccaggaactgtcactactataaaaacgattttcttatacacagagctctttagattttagatggaccgtaactggtcgtgtctgcaacaatcgtcctccattttcgggtgtggatccttaagaggaccacacgggaaaatcgattttcacaaacgggtctcttaagtggaccgcacgcaaaaatacagatttttttatcccatcccctctccctcttttccctctcgctcatttcaaatttttcacctcctctctattcctttcccttttattcactccctcctctctctctctctctctctgcctcacctctcctctcctctcatcccctccgagcgtgcggcacgtgggatgcgggaggcggctggctcggcgccgccgtggccgaggcggccagcaggaggcggcgcggtggctggcgaccggcggttgggcgtcgtggccgggaacaggcggctagcggctcgggagtgacggtgctatctgccgcgcgcgcgcgtgatggccagatctgcgtcgccgcctccaccgagtaagaggtggccgggagcagcgccgccctccccacgcaaggtggcagcggatctggtggtggggtatgcaggcggcggcggatctggcggtggtaaggcgtagcggcagcagatccggctcaggtgacggcgacgggagcgggcagaccaggcgacggcgacgatgaggatggtggcaatggcttctctagggttagggtttcggatatttggattttctttttcggttttttatttttgcgtgcgggcaacataagcacccaccttcagggctatggcggccggggggggcttcctctcaatccaagcacaagactgatggatgcagatccgccttcgccatggtctctctaggcgccgaaaggggatcagattagggcttggcaaccagataagattagttggtgatcaaggagcttggcaaccagataagattggttagcgatctaggattttggccaggctcacatcgacctgctggtgttgtggttaccaccagcatgtgcacaaatttcagcgtttcgacgacagtgcccccatcaacatgggcaataccatggatcgtggtacctactcatgctacgcaatccaaccatccataccatcgtccaatggggatgactgcacatggatgaatgatgttgaacaattctcgcctgccaatggcaaatgatcgacggaaccttcgggtccaagaaaggaaccaccccactctcctcaacttggtagttgttcctttcatgtctagtgcaaccctcattctctaatcgtggggacagccgcctgctaggctactagcgatcaactggagatagctacaagagtagtggctttttgcaggattgggaaaattggtcatgggcaactaaggccgattcggcagtcttggccggtcatgagcatgtcatatccgactgttctcggtgaccactgttgttggaggcatatgtttgttttggtgagctatttggtaatcgaacggggccatgaggtccagtgagataactgcgggtgaaaatcctaatcctatttctagatttggcaatgttgttgattgtatgttgtctcctagttgaaggtgtcgtcttagacttggataaaaatctagttccggttaaagatgatagcggcagacatgcgacagtttcttcttgaaggctttgttttgaagtaggtttatataggtctttgtatttattcggtgactgagaattttttttcctctattctggctatgtgcatcctagtatgatggaagaagatgccatgtgtaatttcatttattaatatttttcttcccattataagaaaagtatcgtcatcctcctccctcactatctagctccccatataaaaaaacaccttatgaaaaacctccccaccaaaaaaccagtattttcacgcgaaaatcaactcgacaagccgcatagaaaaaaaactaaatccattaattccaatcccgtataatgcatgagcatgacaccgggtttggctcggttttatgtggacaatgggcagaatagctatattaaggctattaggttagctagtttggttggaccggcactactaccaaactccacatccataaaaccctcataagtatcggttcacttcaaaccaacacttttgaggaattttccggcgcaaacgagcatttttaactggatcaaattaaaaaccggcacctataatcactcattggtgccgattcataataaaaacccgtaccaatagtcataggtaccagttattataaaaaattggtacctatatataaaacaatagtaccggttttataaaactagcacctatatgtgagagataggtgccggtttttataaaaccgacagctatgaattgagccgagtcgaatgcactgacaaaaatatctcaagtagtaggtggtcggttttctaagtgtggtcgacctcttatctcccacattctcttctcttctggatccatctaggcggcgcgggggggcactgccaggcaacgagcgggggtagtggccggcaggtggcacccctccatcgaggggcgggtggccggtcggggcggtctctgccgcgtcgaggggcggttggtcccggtcgacgggcatcccactacagcttgatgggatcaggagctcgcgcgtgttgtcgctcccggtcgcgctctgcctccctcccgcccccctctcggggccttccaggtacggccgccatgagctcggcacagtatggtggcgagcggcgtcagtggtggcgttgttctcttccttgaagatcttttttcctcgatgttaatctatgcatgttagattctgtaattttgtgctttgatgttcttgaatatctctcaatatcggggtctctatatatgttgttgttattgagtggtggattggtggtgtgtggatgttgatgaatatgttcttggatgggatgttgttgggatgatagggagttgcgcgatgcatcagctcaaatcgaaccgacgcatccatcgagccatttttttttattcgtgagaccttgtttgcgtgatgtgtcgttcctaaacaggcacctatcatttctcctcataagtgccaccttggggatgccggttgagaaaccgacatcaatatgggttttccaattggcacctataggatgttctctagctagtagtgtgggttctagcattttatgcatgatgtgatctatgtaactacatgcaacgaatcaaactccaactaattaagaaaatgtgttagacatcatcgcaaattaaatccacacccatgcatgattcgtatatatatatatatatatatatatatatggaaagattagtccgaaattaatcgttgtttttttccctgcaaagaaaataatcacgcgctgaacattaagcgtggatgtaaataatcgctgagtaatttgtaaagagatcttttagttgtcatataaacaaacaaaaaaataaaatggtttcttcgctgtgtacactactagaaaaatcatttttcccgacgtggaggtctcattttcgcaggcggatatgacccttagagccaaatgaccgcctacgaaaatataaatcggggtgaaatttgatgtccacttaagcggcgcctgcgaaaatcattttcgcagggggagcacttaaggggcgactgcaaaaatcattttcgcaggcaccgcttaagtggtccgcctgcgaaaatagacttaatataaatacacgcgggcggcaattttttctaagtcctcagtcctcccctccacacctctcctcaccactggcccctcccctcccctctcctcctctcccctcccctcacttctactctccctggcggcggctcccggcggcggcggcggtcggtggcggcgaaggggcgactgccaaaatcattttcgcaagcgccgcttaagtggtccgcctgcgaaaatagactttaatataaatgcacgcgggggccatttttttttaggtcttagttcttcccttcaaaccttttcttaacaacgggcccttcccttcccttttcttcttttcccttcccttattttaattttccccgcggcgggttcccgcggcggccgccgttcgttgccgccaaaggccgcaaccgccaagaagaaaagccggcccgcccaaggtggccggcggcggccccgacggcgtggagcggcgacggcgcaggctagccgncgncggcggctcccctgcccccctccctcccagatctggccgaggagggaggggggaggccggtggcggcgccgacagcgtggagcggcggcggcggctcccggtgcgggctggcgtttttttttttcgtttcttctattttcgcaggcgggccgttgccccgactgcaaagatgaatgattttcgcagtcgttatggtgcaggcggacctctctcccgcctgcgaaaattagctttgtctacttgcaaaaatgatttttcagtgatgtccgcaaccatcatgcctcaccgatcgagaggaatgatcgcacgtgaaccgccagtactcgtgttcagttcacgcacacacgaaatatctacgagagaaccgcgtcaaagtaagaaggcccccaaggcaataattgactatggaaaacaacatcactagattatttcctgtataacaatgccatgtactaattctataatgctcttgaaattaaggtcaccgttaaattggattaatatatgcacacgtacgtggcccttgatccggattacagccggccggcccatgtctaattgtccatcattgccgacgatatatactactcccgtaaaacgacacaaggttttttttcaaagggttgagttgaatcgaaggccgtgatgcgtgacgccatacgcgacgacggcggcgcggcaggcgtagatagctagcgagcaagcaggaagaatccatggttacgtgcggtacgcgtgccattaatttgacggttgagaactccatccggtctcctgtttgatcgatcgtcggtcgagcatttattatttcttgtaccaatctgcgcacgtacgtacgtaggctgaggcatgcatctatatatggctcgtgcgcatatatacagcacctacaaaggtgacaatcgtacgtgcgtatgtgcgggtggaccttagtcaaacagtgaactcagcatatatatatgcacaagaatttttcccttgcttgatttgtttatacgtacaagctagtgtgtacacgccgcaacacatgcacaattgcacaaacacaaataaagaaataacatacgttggcatatagtataagtcaagttttgatataagctattagtaaatatttatgcttgaaacatttttttctactattatctcgcagtagcactaacagagccaagagcactaaaaaataaggcaacaagtagattctactgaataatgattatgttcaaggtaaattatttcagcggtggaccatgatatatgctacctaagtatttagttcgatcgggtggcctcccacctacctatgaggtgtgcctctactattgtgtttgttatcttttgtggagatagaaaaacatatatatggattgtcgacctagttgtgttggtcgtataggaactatttatattgcgttgagaagtgttcttaattttagtagtcttcctcacctacctgacattaagtacaacctccaaaatctttttatatttgtacacaacataatctctttacatttttttcccaacgtgcactccgtctgccttgctaatgttgggccaccagttgacgcctttgaaacatcaccttcctcactttcacttccatctacctcaaacccctccatgcaatctgcctctccggcccgttcccctctatgcttgatcatctttgtcgatcgagcctttcgtcacattgcaccttcctaatctccatcattttttaggaaataagcgtcatcattcacatcctcgcaccatttaactttcctacctacgtcacgaaacatatatacatcctcttcttttatgctgccaagatggtgacaaacaaagcctcttgtatctaaagcccgtccttcctcccttttacacatctagaacactaatttaatgttgtgctaccacttcgtagctatttgcaataagggatcttttaaagcattggcggaaccaaaactttctagagcccggacaaatctaactgtgccaaagatttattgtgaacttactattatctctctccataaccgcgattaaacttggcggtttaaccgcaaaaaaaatcaggtggccgccaagaaaatttcggattcttgtagtgtttgccaagcggtgaactcaccactgttgtgaggagcgctcatcagagaagccacaccattgtcactggtaagcatatccttcccctccaatggttagagggatgaagaagcatggtaatttttccctatttttaatataatttatttaccgtatggatttctcctacaatgttttccttaagaaaaaaacgaagcatagtaagtaagccgtttgattgggatcgaacagccatcatcaatctgcttatattttctcatcaacagctaattaaaaaaacatgagaaacataatgccttctcgccacctcctagccaggggcggatccagcataggggcagcggggtctcgagccctcactacttgcatgaagattatgagagcccccacgaagataccactaaatttttttaccatatatagttagaaggagggctataactctatctagtttattcagatcccactgctatttatttctgtatcagtcactgctcctgcctccctgagtagcttaattagaaatgccctcgtacttatgcttgcaggctgtagcactgtaggtcacaatagcgaaaattttcttgtcccaatccaaaagtaagtcggcttatgtgaatggtatctcgtgtgctcacagtgcacacagcacatatacacatgcgccgctgatcggcgagggagagatggatgcggtaagcccccgcagtctgtggacccaatccacagccgcttgacgacaccggccgctctcgcctgcgtgagcatttctcccccatcaactctaccggagttatacactcctcttttctataattctactacgaccctcacttgtctcactctgtacatcagactgtacatttctgtacatgtgaaccctgatagatacgtatgcgtaggcatcggaaaaggggtaaataaattaaatcgacttgtcccctgaataaacctaaggtaaaaaggctgtttaaaaatatatagtagcagagaggagagagcatatagtagagtgtggaaagaaggaagcaaaagggggagagagaaaagtatgacaaggagatgaaagaaatcagacaacaaccttcttagcctcctcctctccactagcttcttctcccttgccatgagttccctagtagaccaggactagcaggcaagagcaagcagctggaagagtattagcagcatgcagctctagagacgacaggcacagaggaggggagaggtatggagaagaagctaagcaaagctcttgtttttgctttggttctttagtttatatacgtcttgggtttgggtgtttgcgagctttttttttcttcttttcctttgtttctgagtgtaactgtttgtttggatttccctgcgcactttgttcttttgttcatctcggacgagccctaaccctttggagtttttccccagcttcttgtcgattcctttgttgttgtttcagatcgattccaagcagatacttacataagtattgagaggtattctcatccctttctgtttctcctttctgctcttttcttttggttttatccccatcctccttttgctagagaactttctgacatcttctcatctttgtgtgcttgcatgatgtgtagtgtcaatcttggttgttcttgcttgagtttgttatcgccatgtctcactcggacactacagcttcttgcagtgacgggaaatcaagaaaagaaagctgctactagcccaagccaaagctctacaagaagggaaaagattcccttctgttcttgagtagctagcttcgctcgagggtaattaaatctgagagcggccatggcatccaactcatcagcggcagctgtggcggcgttgtttggaattagggatggcgaccatgaggaccagattaagccgctatttgcccagcagcagcaacaccaccaccaccagccacctatggcgccatccaacgccgcggcggcggcttctgcggcagggtcggcggccggtcaagcggccgtggcggcgccaccagcgaagaagaagagaaccttaccaggtaatccatgcaaagtttatccctttttttttgttcagtttcagactttcagtcatgcatgcatggatgccagcatagcattcttctatctccttgctgatcttgtctcgatttatcggttggagcgagtttcaattcctttgttttagcatgcacaagaagacagctagctactgctagcttgtccaagattcacatggtttttgtatcgattttaccgtgtttgtctagtgattttttttcttggttttgaaatttttgattcacatgcataatgtcttttttggaagggatttgtacgctagcatagagtccaagatttggttcccttggatttaaattacatgaaatggtcctatatcttcttcggtttctaatttctctctcttctctagcttggtccaatgaatttcttacgcacctggattgtagtcacccagcactacttcatttaaagcttgtagtctcacctggatgaatagtatagtcctcagttcaggtgaaggtacaaagcacaaaatgatttcttgttttttttttgtttttttttctcatatgtcattataaatcagacttatttttcagtagatagattggttcccctaattatttctttaccgcagtaaagttccttaattcaaatagacaatcaccatcatttaatcatcaattaatcttagagattttttgggcaagattccatgtacgtgagctgttctcctcttcacccttgctggcctcttcctttctcttaccaatcatgagagatgcagatacgggccatgacatatgcacgagcaatgtcaattcatttgttccctacatgcctcttgctgcaaaattaattctcttttgccccccccccctccttcataatctcgtgcaaatattctctttttgccttaatttgtccctggctactaaaatcaaaaggaaaaaaaatcactactccccattacaaatcatccttgcatgcctaaccgatcttcatcaccataaatctactccgattgggaaattctttcgtgttaagaaacatgcatgcgtttgtcatcatcagccacactgcaatttggttttgtcatcagtagtgcggcaagctgtactccttatttctctctcttctaatccccacataatgttaaaaccaccgtgcatctatatctatatatcgatctaaattaaccattcacatatatgcatctaatatttatgttgaactaacattttgatcaggtagtgcagcgcatgcatatgtatatactcctatcttctaattaatactactttgcactagtactaataagctgtacttgcatgcattgcatgcgcagacccggacgcggaggtgatagcgctgtcgccgaagacgctgctggcgacgaaccggttcgtgtgcgaggtgtgcaacaaggggttccagcgggagcagaacctgcagctgcaccggcgcgggcacaacctgccgtggaagctgaagcagaagaacccgctgcaggcgcagcgccgccgggtgtacctgtgcccggagccgacgtgcgtccaccacgacccctcccgcgccctcggcgacctcaccggcatcaagaagcacttctgccgcaagcacggcgagaagaagtggaagtgcgacaagtgctccaagcgctacgccgtccagtccgactggaaggcccactccaagatctgcggcacccgcgagtaccgctgcgactgcggcaccctcttctcccggtaagcccacactctacccatctctctactacgtatatatgtatggtgtttttcgcagcttgatttctccatctgcatgagacgttgcatgtgtgtgcgtgctagctagcgaagaatgtttagtagtgtgcgcacaaaaatggcagcatgcacgttcggccggggttagggttttgtctgggtggtatagtgtagtactttaactaatctgttcacgagggttaatggctagtgggaggagaagaattatcgatgtcgtacacacgtgtacgtaccgcgtggtctgcaggatgcatatgcatatgtatgggcgaagagcattagggctactgctcgcacgtgatcttgccattgtcttgctgatgcaaatgtttccaagcgttcttgtgctggcatgcatcgtcgtcaagcctggctgaaaaggcctcccgtctcttcctcatgctatatatattacaagtcacacaaataaacgcgatatgtttatatatgtgtgcgcgtgtgttatactgattcatggccccaattcgggatcgatatgcccggaacgtcgacagctagctagcacattcttaattcgttgggctgtctgtctattcatcagacaactgaattttgaaatatctaagcggtcagaattattccaagatccgtgcaataactatatatatatatatatatacatatgtaagagcatgaccaacagttctctaaatgttaataattaaatatacactgtaagacactctcctacagttttttccttaaaaaaagacaatgctcctaaataaaatccaaccataaaaagatgggtttttctatgaaaattaggatccaacaattcccatgtagagatgataaaaaaaatttagcatccccaactccgtttttatcgttctccacatctagggaatggcacacccaaaaaactgatcatgcgtgggatgagagctatcgagatagcggcatggaaggtgggcgagggagatcgcccatgaggagagaagggcccctttttattttaggaaattaagtttagactatctgttatagagatcaaggtatattttatatccttaaattcttattagagatttcaaataagatatttattagaggagaatattggacatttgttggggatgcaataaaccacttcgatgcccggaatcctgatccatctctcgcctccgctagctcttcgatcgatctccaccttattggaaggcgccagaaattccagctagttgtcctctccatatcaaatcctccatccacaccatagcgttattattggggtatatatagcttcatctatgatatacagctcatgcagctgaagttcggatgtcgctggtgccaagagggcttaccaatgaagtcactagtgatgttcttagtgagtcatcctgttgcctccctctcttcctcgcacctctctcggtcggctagaggtagaagatgcttgccacttgtcgaatcgtcggatcaagatcttcatagatcaattggccaagatttaagaaacaaaatcccagtggactagtaaatagaaaaattgtcgtccatatatataaaaatataattaaacaagcttatatgtgtggcactacacgtctgcactatatttttattttaatgaatcagcgagccgtcaattttattgaatatagaaggagtaaattgtacaaaagaaatgagctgtacacgtctgcattatacacccccatatgatcgtaattggctaatctgttttgagctgccatatagaagagtatggatatatatagtctttcgctgtgtatatccacccgtggattgagccgactttctatttatatctaaaaataatataatgcaaactataacttatatcatgcagaatatgatatgtgaatgtgtgtgagctggccggctagatagatgtgcggtgcagggcctttcgttggccttacgtgtcagaagagcctgtggttcacgcttcacacggcttagatttccctcggatacatgcatactccgatccaggcccttacatctgatctcacgagtcacatgggtgcaacttcgcttgctagcagcagtgtcacgcatactgcagactctctctctctctctctctctctctctctctctctctctctctctctctctctctccagaatagcagcaagtgttcacccctatctttcacaactcgagcattttcctctctggcttcatggcatgacctctgcatgcagagttcttagcatcaataattttgatgcaatgggggcctagccctatatatatgtgtaggcttttgtagttttgcatgtgttttttcatccatatatattcttgttggatcaccctttggttccttggaaaatgagctttttacaaagtcttctcatgtctccgggcgagttggcgtgtgcgtgtgctactgctctctaccatggcgatgtccaatatgtctactactagtactagctagtagtagaatttcttttcccagccctttctccttggaagcttcttgcaccatatatattaattaagaacctatatatatcggtgacgccatgctatatcaatctgcctactcttttcctcgttttcatccctgattgacatgagtttctgggatctcgagcttcaattgagtgtgatagaagtcaagtgatgaaacgaacaggttttagtcaaccccacacttgaaaacatgtagaatcactggtagatttagattttttttctaaaaaaaagatttataattttttaaagtacatgcaaacacaagtacgaacaattatatatcaatgttattgaacacttcaaatacaagacattataaaaatgtgattcattgacaaccctgggtggcctaggagctacccggggtcgctaggcatttatctgcaccttggtagaagttgtacatattttgagcctttaaaggtcattctaaaataagaaggtcattgccctccttttgcgtgtcgcttacataatcaataaaacattaataacgtatattgggttgtcatatagttaccctacaaatatgtatgttcaaacttaatttgaacaagtgggaaaaaatataactgcgggaaatacacacacacactactttaatttcatagttaattaggtttgttttttctttgatgtaaatgaatttggtcgtggatgtctgtacagtaatacatgcatgtgacggcataatctatatggccaaatcttgttagcttataactatttagatttcatacatgaaacgagggcgcgcacgacacacattcttgatttaatatagcttaaaatacttctcccaagattttttttttcggaatactaacagtaggagttgttacacgcaatagataaaattcacttacttgtagaagaaagaattaaagatatttcaacgatagtatatcacacagttctactgtttagacgaccattatttctcgtacccacctcaagtcatacgcacagtgtacacacattcatgcatccttgccaattactgtactagctagtactccagcttgtaactttttccgtacaaatatatggtcgtcctgtgtatggaacttggaatcttatcggttcaaggcaagaatggaacgtacgtactacgtctcctaaaagatgcaaatatataattcttgaatacacattgcatctaattattatagtgcttttttgcatggatttctgtactgttgtgcttaacatgcaattgattagagaaaaataatcattttctcgggagtggattttaaactctcgagaggatatcccctcgttatttgcatgcaattcaaatagttacgaaaaaaatctaaataaaatatgagaagatgtattaatatgtgatatatcgctccacaaacatgcaagttaaaattcaacttttacatgtcgtaacgaaaaaaaataaatttaaccatgaatatgcattaactagctataatttaattttttttcgttgtgagatatagaagtcgaatttgagcttcatgtttgtggagtgatatatcccatattaatatatcttttcatttttttaaaaaaaacaactagactatttgagtgacatgcaaacaattatgggacatccttctaagagtttagaataaaaatactattttctcaactctctttgagagtttgaggagagggggattgagaagattgggaagatacacaaaacgaggtgagctattagcgcatgattaattgagtattaactattttaaattttaaaaatggattaatatgattttttaaagcaactttcctataaaaaatttttacaaaaaatacaccgtctagtagtttgggaagcgtgcacgcggaatacgatgtccttttctcacccaatcccccagaactcatcacaaagaacgcagccttagttgttagtatcgatatgatcaatgccttctttccaatatatagtaaactagtcgatacaccgctttttgctgcggaatatgtcgatgaatgcatgttatatatcatagaaatggtaatgtatatgtttaaataatgtaaaaataatgtggagatattgatttgacattgtttgcatattgagttctaaaaatacaacaaaattgtataagtcttttgtttttttctagtcaacttatttaattttgaccaagtttatagaaaaatataatagtatttaaaaaataaacatattattagaatatatcaaatgttagatttaataaaattaatttgatattttagatgtcgctaaatttttctatacatttaaaagaaattgacgagggaaaaaaaatcaaataacttaccgtataaaatagagagagtactactacatttgcacggatgacacagcaaaaattttgcatctagctgtctagctgatgagcaccacttcacgtgatttctgtatcagtacccgatactgtagtgacatgcactgtccttcgagttatcttcacttttgcgtcgtacaatttcacgtgcaaacttgtgccgcacggacagtgatcagtttgatggtacatcgcatgtgtccgtcgtcgtccatgcaaatgcaggagggacagcttcatcacccaccgcgccttctgcgacgccctcgcccaggagagcgcgcggctgccacccgccgccgccggccacctctacggctccgccggcgccgccaacatggcgctcagcctctcccaggtcggctcccacctcgcctccaccctccaggaccacggccaccaccaccaccatcacggcgcctccccggacctcctccgcttcggcggcagcggcggtggcgccatggctgcacgcctcgagcacctcctgtcgtcgtccagcgcctccgcgttccggcccctgccgccgccgcagcagcagcctccggcgccgttcctcctcggcgcggcgccgcaggggttcggcgacggcggcgacggcagtggtccgcacggattcttgcagggtaagccgttccatggcctcatgcagctccctgacctccaagggaatggcaccggcgggccgtcgccgtcgggtccgggtctctacaacctcggctacatcgccaacagcgcgaacagctcgggtacttccagccatggccacgcgagccagggacagatgacgaacaccgaccagttcagcgaaggagggggtggtggcggcggcggcggcggttcagagacatcggcggcggcgctgttcggcgccggtgggaacttctccggcggcgaccaccaccaggtttctcctgccgggatgtacgcgaatgatcaggccatgatgctgccgcagatgtcggcgaccgcgctgctccagaaggcggcgcagatgggctcgagcacgtcgagcgcgaacggcgccggcgcgtccgtgttcggcggcggcttcgccggctcgtcggcgccgtcgtccatcccgcacggccgcgggacgaccatggtcgaccaggggcagatgcacctccagagcctgatgaactcgctcgccggcggtggcaacgccgaccaccagggcatgtttgggagtggcagcatgattgacccgaggctgtacgacatggaccagcacgaggtgaagttcagcctgcagcgcggcggcggcggcggcggcgacggcgacgtgacgcgtgacttcctcggcgtcggcggcggcggtttcatgagggggatgtcgatggcgagaggggagcaccatggcggtggcggcagcgacatgcatggcaccttggaggccgagatgaagtcggcgtcgtcgtccttcaacggaggcaggatgcaatgatctcttaagcatatatacgtggcacgttggcatcaacatgcatggcaggaataagttgttgatttgcaggttgcaatacaatgctgtgacttgtgacacatgtgatagatgtttttgcatgcatccatgcaaaaggataaagccagctttgatgatgatacaatcttagcgagagacatggtgagcagaagagcttctcctagactcctactaatgcatgatgaagctagatcaacaggaatcatgagacttgagctgaagttaggcgttattactgcaatatactattctgttcctgatagatcttattgctaaatttcatttgaaagaataggtcttgctaaatgtaattgggttaattgtactggatcagggataactgcaatgagactgtattatcttcttctttcttttctgtcagacgaattataggtctgtgggggataatgagacttaattaccctactgatcttttctattttttgtcctctttcagtcattcagttaaccctctagagcaaaaatattgttcttgcaattaatgcagttaatcatgatatatagtccatgttgtggtgtatgtcgtttcatgttaattatgtcatcaacgtgtcggctgtgttgctaatatagatgggttatgtttactgagctcgaaattttaaaaagtagccgatgagaaactactagatctttctataacttctgttgctagtttatttcgaaggtatatagctacaatttccaatataactttttttgctagtttattcttgggttctatctatagctactaacattcacaatcaagacgaataatttaggttgttttgggagctagctggagattcttgaagtagctacaattcgccaaaaagcttcctaaaacaggtccataatccctgaagaagaacaagaaagaaaacaaagctaatatatttttatttttctccctgattataatcgattttttttatctttgtactattgttttcattatatatatacgggatggataaacaaacttaataaaaaatgattccaaccttttttttttccatttcctgcaactacatttaggtaattgttccaatatattcaaggggttgcaaaagggcctgtaacctagtggtttccagtatttaacggctttgtgtttttagtggtaggcgatgtacccgttgacagcgagacgtctgtggtgacttcgtcaatctccaggatttgccggtccagtcttcaaagatgctcataggggtagggtttacgtgcgtgcgttcatggggtgagtgtgcgtgcgttgtactgtgtaattctcaaaaatatatatatacatatatatattcaaggggttaattattttgcgactcattttcatttttatatagttagtatgatattcttttacccgtgtgtgtgcgcctatatatgtgattttgtaagattgataaattatgttaacacctagataacttgcaccaaaaggatctcttgaaaacaggagggcggtgcatgagtgtgatctaaagtgttgttgaataaaaatgcaccagtagaaatcatcacccaactcaggccatgtttcattttttgtttttgattctgccccaacaattaattttgaagaaaaacaaatagcttgattccggaaacagattagcaaaatcaaatcctgttttttttcttctaaaatccaaaagcaggatattgagctatttgtggattttgggtaatgatgttcacggcgagtattgcgactatttccaaatccacaatcaatttaagaacttctaaaaatcacaatccagaaaccggattatgtgaatcaaaagaaaaagaatcagggcctcaatttgctttaaaatagcttgagatttcctatcttatatactacaatttcaaagtatttttataaatttgtaataaacatataaatcattaatgatcacatcattcaaaactgcaattataactttctacattggaacatatataattgatttcacctagtacaaatctagccaacgttgttaagttattaaatattttgggataacgattgggttacatgtatatgagatatatataaaaccattgaaaagttataatagatatgcgattgatcaatatgaaatgtgatttttaagtcctggaaataacatttcaaaccattatccttttctgaaaaattgtgagagaattatatggtctatatattaattttaatattatttgggatttgaagtatttcaaaattgagtggatttcatagcctcaattaattctcaaaaagttggtgctttctgtgcagatctggtcaaattattaaaaactagagccactttcgacctatatattaattccccctctcaattatatgtttgacttctgtctcatagcgcatcactcaactaattaatgttcgaatttttttttggtccaaatgaaaattgaatgattccgattttcaacttgggatttaagtttcaaagagtgttttgcaacaacctcaaagacagcacgccaagcgggaaattcttctgacatgaaggttttgcttggggtgagggcacttgataggttctcgcatacacttggctatatatgtagcgagcaggggaactaagaagaatatatagctcatggtcatgcaatgacgagtttggcggctagctctatcatttgtctctaattagcttatcagttatgcaaaaaaaataaatctaattattttagagttgtttttattgtgtttgtttttatgcattaccttttaaatcgctaattaagaacacaaattaatatacaaattttacccataataacttttagttttattgcgttgttcattttccacggatgaaccgtagagtaaatgatgggtgatcgtacgtctgggcttggtactgccacaaatgattggctgcttgttgtggcgtccgcgagctagcaaccttacagctttatccataaaatagcgaaagcgtatctagtgagatgttatccacaacttaatttgccaactagactagttcatcataccgttgattggtttctctataatgtgatctcactgtctcggagtactcctggtatttttctttcaaccggtcaaagaaagtgcatatattcaaatttaattaaaattttgttcagattttgaatttatctcgatgagattttgctcaagatagaggccggttagctcttcgctggcactcctcaattaggttttgaagagagggcaaggagaaaaatgaaaaaaccgtggttcctatcgctatcttgcatactacggcaaccgtgtgacgcagggcgtatacaggacgtgacagcgatgattccccgtggtggggggacaaggtgttcgatcgttcggtacatgcctgcctcgatcgacgttgatatttcacaggagaacggaattagacaaagtcctcgagtacattctcttcttaattataaagtagggcatatacatatgcatgagtacgtccctaattccatttgtgcattaaaaaagttcagcacctagacggcaaaattaattagtcaacaatctgcaagcctcgatggcgatctctgcacgtacttttcgttggtaattaaagggtagcgcccaagttaatatatacttatagggtttgcttgcacgaagctcgcgttccattctgatgataattctgagggaaaacaagtgaatgtttggtagctggtgaaagcgacctttcgagatcgtctgtcgccacaggccacctagtggcgtcgtgttgcctgtatgtgtcgtgtccgtgacagaatactaatgatacagatgatgacgagcttaagatttggcacagtatacagttggtaccatatatgctttcaaacggaaggataaaaagatcaaaagagtagagtcttgtgtaaacagcatgctagaataatagcagacagctagaagagttctgcttgataaattgtttgtccttaatgactaatgcacttgtgtgtacttaagtgaaacaatcatggatatcatcggacgtttgtaatggccctcataatgtctaatcgatcttcaggaaaatgatggatatgctgtaccttttgtactagaagcagtacgcaatgtactatacaataattatggtgattgcaattctgtgttagtgttctggaagctctcagagctacagaaccaaattataattacattgcccagcccaactgccgggaacaaattaagctgttgctaaacttcctttttactaactgcatgaacctgtagaaagcttttgctcacctaacacttgtcattagcttgtgccaggttaacaactctgcacacacacatctgcactgctgctgatgtggcgcctgttttgtttgtagcgttgtcgcagcgtgccttggcctggatgcacggcgagatccttcgcctatagccaccggctgataattgcgcatctatactactataatatatcgcccacggtcacgggcgtgttctagtttctgagggccatatggccgggagaatccaatgtgtgaatatatgctggttaacatatagctttccagtaagcaaatcatagtgcaggagaagggagctgtgtgatcgctgtggcttcttctgtaggccgttttggtgttatgctcatgaaaacttcagaaacaattccagccgtgggtgcaaagcaggtgttgggtttgtaccaggtaggggtctgtctggacgagcggctggaataaattagtagaatataccatgcctttgccgtgtaggtagatgtagcaaagcaacatagctagtgtagagcgctcaggtacagaactattacatgttgactaggaaaatgtcctgtggcactgtataggatagttgctctgcatgctcagacaaactatttggaatgtatgtctttggaaaaaaagaataaaaatgaaagcaatcatacttagagctgtctaccatcaaacaactatttcaaccttgacattatttgagcaaaagtgggctaaactgcttaatgcaaatctagattctatgtaccaggagccaactaagcaataattttgtccgagacaaaaggctaataatccttgcgaatcaaggtgcgcatccaacaagtggaaaggaaccgcagtagctgagatcagcttgtcctggaaacatggcagcaatgtaattgtcaattattacatttcttcgacgatatgatttgagtagccacactgaaagagtctagaatcctcaacttctagtgttgataatagataaacaaccagatcatggtcgatagttcacagcaccacaatcattaacgtacacacactataggtcgttccgtcttagataacagggggcgactcaaaccgtcagacgttttcccccatacacaaatattcccaaacttagcagtagaacatgacacgtttgacattttccttcagatcaggaagcggccttacagcaacattcccagcaggcttagtgctgcgtgcaccaggaagggggccaccgccacgggtatgggcaccgctcgccatcgacccactatctgaagtatccggctccatgtaaaatcgagctcgaaatgccgcgagatgggcataatatgcaggaggaactgcagaaatcaaatccattgtaagaatatgtagccacaccgagggaccaaggggttaacgttttctaatcaggttaaatagaggagtcatctgcttaccgattgatacggaacgggtgcaccttgcatagctgcaataatagggttacagggacaatggttagcttactagtcttgtaataatgtactcctaaatagcaatatataatgacatgaaagaaaattacgtgtagcacaagttgtttgtcagagtttgcaaaccatcagcagtgaacttgttctcatcccacagaacatgataatgtgcagggcgacttgttccctaaaaatagcataaagtaaaatcaagtccatttcatcttgtaaaagaatgttttttttgttgcggagaagtaatatttgtaagtgcagaaaagctgacctgaatgcccgcatggctacacaggtagaaatcaaactcagtaggatggcatatctttgaatcaaccacggtgcctgaaatcagatgaacataaagaaattaaattcaggtaaagaaatgaggtgtcaatcatagggttaacaagatatacaaaataactaaaattacaggaaggcgacaaattacctggtagtatatttccacttctgtcaacagtgcgctggtccttgtggttattagcaaacagccttgtgtgatgacgcttctggaccaccacaaaggtaacgggtggctgataatcggcttccaaagatgcacatgcctagtttttattgaactgttagtcggggactagagagataacttcatggtgagaagaaaagtagataaattaaaatcacctttctaatggcatcaagctcataaaacagaacctgataaaactgtccttcactgacaccatccctgaaatgagagatgttaaatatgtggaaaaacagtaccaactgaatatgcagttgtgcacaaatgaagaaaattacctgtaaaatataatcctctggggtttctgtccagttgccctcttgaaagaaatgagaagctctctgcatatttaactaatagaatttatatatgtactactaccaagaaatattcaggttcaatgcgaactaggacatatatacctgatcattccaccacttacagttcctctttgaggatctttccatactttaaaaagatcctgtatcaattcctgacgatgggcctgtgcactcactaatccggcatatttggtgacctcaggccagtcttgagaagcaacaacctgcatgaagcatgaaatcaccaaaaacaatcagaaggcaacgcaagacataaaaaaggtcattgttctatcatatgataataaagagacggtatgcgtaacattgaaaagctatgcacttacagctgcaatggaagggctagaatcttctccaggatggggatgtgtaacatcagcaccaaaaatgatcgttggcctatcactcacaaggggaatcctccttgtcaaagcatcaacaagtactgtatttcttcctcccacctataaattaaaggaatataaattactacaaaataaaggtaaaaaactacaaaatcgggcaaaaataattggtagaacatttccgaaccttaacattgattttaagggcaacgtttgctaaatactgtttgctcatcttaaaaacatgcttcgtaagacagcattgcgagaccaatccaagatcagtctcacatatccttttgagatcgcctgaggattgacaagcatattaataaagacttttttatcagataacaatcaagtgttgttttgaaataaaaaggcataccataaagagaaccattattgtcaggcaatattgcaatcagcaggtcaagctccccgccctgtggtttcagtatattcatggcctcttgatagcgtgccttgagcgctctttccacatgttcaggtcttgcagtcactagaggaaccacaggatcaattgagaagtcctacaacgagaggatatgaagcatgtgaaaggatgttatggtccaagaatatacagagtcaaatagcaacactgaaagagatgtctggaggcaccattagatggaagaaaaacttaccatcccagatatttggcacataatagcaagctcgcgacagaaactcctagcagcattatcttggacatgacgagaaaaattgatgcatgtccagttgttaactctaccaccattgaccattttctgcaacaagcacattaaagaaaactaattgtcgcaactgtacgcaattatagttgggagacatcttgaaagacggcaaagcaacagttattgaagaacagaagaaaaccaatttttttgttggaaaagaaaaaaaggatagcctaatactgtttttaggggatgcttcgtataggtttgttttctaataactcacttctaaaaccataccttattcatcatattccattggccaattcttggcaagacatccttctctctgccactatcgtggtacttaagctgcaaagaatattagtcaaatattgaggcataacatacaaaaggcatgagatattgacaaatgtcagccatgtcttgaactttgatcttacccaggggggtggtagaacacgagcttcaacagatgcaagtcgctcatcgatccttatgccaaactcctgtgcatatggatcctgatggtatgcattgtgatgcacagtctggtcatcaaagacaaaacaataaaattataaaacttagaagccgattctgatgttccaatagggaacccgattaatggttatatatccaagtaacacaaatagatggtgagctacatttgaaatgtgttttggcataacaattgacatgaatcaaaccaccttaatatgtaaaaacatatagaaacagtttaaatccaaaattaaaatataacgaggactcaactgtgggtacaatagcaaagcattggatatttgagtaagaactaaaaaaacttgttttagagttcagacccacaaaaaattgaaataaggaaaccacaaaacctttacaaataaagggcttgccaatacataaggcaatacaaactctagatacaataacaagtgtttatacatactcaaatactcagtccaaaaagagtagataaaaattttacatgatattggaagaacttatatgcatggcctaaaatgcatatggcttaataaagaaatagatcaccaaggcatgaaacaatgaaatagcacagttttatagtacaacaatgttatagggcagttggaagtaatctgccaacaaaatgcacccataattacctgcaaaatgtccagctcacgctcttgagggcgctggcaggtcactttaagaagagcagttatctgcttctcatttagtctttttgagtaacgctgtccctccacaatcttacagacctgaaagttaagagtgatatgaaacacttttctgatatcataaaggtgcctatagcatttctgaccttaatgggtgttgaacaaaaggaggtttcatacttcataaagatggcattttaggacactaacctccattggtagataatttggcctttgttgattgcccacttgcaagcaaggcaaagttgtgtgcttaatgttaaatccatatgtctcctggaagtattgcaccaccgtcttcacagtaccatgattatcaatgggaaaactatacaggacaaaccaagcaagtgaaatcagcaaattatccaatcagacacacatctgcaaccacatgatagagaggcttcagatatgagcaaagcagactacgtacgacaactctcgtgttgcttgcgaggtaaggccagaaatgcgatacttcctgcgcatattgcctctatgtgtgacctcaacctttacaccccttagggccttcttgatctgaccaatgggacagtaaggaagcatgtaaagcaaacacagagaacacaaatatacaaataaagtagtcaataggataacctaaccttcacacgatcagcatcagataatggtctaactgagatgtctctgttcaaaagctgtgcaacaaagtcaatcacaggtagaggctcaatgaatgctgtcgatgacatatctgcaggacaaaatatcaggttaccccccagatgcaagagaaaagagacgtggtttgatgatctttaccaatatatgacaatgtacacacattctagatgattatcaaccataaccagtgacagataaatattgaatacaacatctaagattcaaggtttcccaatacaagtgattcctaatattggctgctattgtaccataacattagattatgataatttgctttgcaaccaacaagctcaattaatcgaaatttgtaatttatgtagataacttccacagatgtgcatgtaatttatgcagcttagataaactttcttactatcagcctacaacagaaagtggtgtaagtaggaaaaatactaggaaatgaaatattaaaaaagaattagcagttaagagttccatgtatcatagaaatctcctaagttattgtttccaaaacacaaatgatatttatcaatagtcagtcaaatagatcattcaatgagaacacagacctacaggttagtctaaagggggcaaaaaaaagtagctattctaaattataaggaattattatttttcttcgagtagtaacatggaacatgaaaacgaggacttggaatctgaccaatattcagagaaagtcccatctgcgtgggtcgtatgctttggtaaaaaccacgccaactttccaggccctcgccaagttgttggcgccttcctaagttaggcgaataaaatgaccttgcaactggagagtacctacatataaaaaatatagaaatgttcaaaagcttgctaacatgataatgatatagcaacaaatggcagggtaaatttaccttgcagtaggcaattcacgtagaacaatgtcaagaacttgaagagcttcttgaggagcatccgcttgccttccagctaaaaacatggctaaatggtggagatcagcgcgtgcagcaaatttgatcacgaccttaaatggtctctcacgcctgaagacaagcagatgaatcattggaagatgaatttatcaaattgttgaatgttgatatgtccagagagtacctctgtgcaccttgcccaacagcaaggctctcttcctcatcctgcagaataacgtcaaaggtcctagaagtaaatggtaatggaccagctgtgtataagctcttccttccatcatagactggaagacggccacccaaatgagactgcctatattgtgttacaatttctccaatgacagcacgattgacaccacgtgaaggaacctcaggagttatagacacctgaaagcatgttaaatgaaagctcatgaaaaacaacaaaagttacaaagcttcatatgtataagtataacaaggcaacacataaacaagatcttacatcatactggtgaaggtctttgtcaggcaattcagcaaagaaatggttggctttcacgatgcacctatcaccaaatgtacccttgccagggcgcattggaaatctcactgatttgctcgatggtggtgctggttgaatggcctggctagtggggctttgaccctggatggcaagttcctgaaactgatgttggacttcttcgctgctggcctcaacaggcagcgaagatgggccagttcttgatggtgatggtgcaaccaccgtagcttggtactggtcttgtgaggcttggtgcagctcgggaactgttcttgatggactggcaggaactccatgtccaccactgccactcctgtgttgtggcattcctccttgccgttggacaccacggccatagtactcatgtgcttgatattcaaccggaccaccacctggttgatgtgatgttggccctccacgaccctggtaacgtccaccacgtccctggtgttgtccaccaccacgaccagcttgttgagcatattgaggattggcaggttgccaaccaccacctccatgctgttgagctctctcaggtcgctgtgaaggaccccgtccaggagctccagtggcttgttgagttccagaactttccccagcattacggggttcagtttttttctttctcatcatggctaaagctgcaatgcaaggtgcagttatagctttagtattattattatcataggctaatacaaatctaaagagtgatggaggcccaaggcacaaaatcaagtgcaaaacagataagaaagtagaatgaccaggcaaatactataataaatagaaagagggaaatccatcattgccatacaatcgaagatactacatctgccacattgaatgacctgaattacaacatggtttataatctttcaggcaacggcggtacagcacataatattacatagtctttgccaccatattaatgatactatctttgttatgtccccaaatacccccaaaaattcaaagtatctttacaaagtgcagctgctcccagattcatgcattaaaagaaaaagaggagttacaagcaacaagataaacttttttctttttccacatgagatgcagtgatcgacagtagtcaatactcaggtcagcatgctaaaaagtcagagaaagtgagcgagaatcattgtgaatactgaataggacgaaattcgacaaggtaattaaacaagtcacatcatcctaattcccttgacaatgttagaaagccacacaaatatgacatgcatgatcaagtgggagtaattttgctaaagaagaaaagtaaataatagggaaatgggagagatgggaacttggaaatcccttgacaatgttagaaagccacaaacaaatatgacatgcgtgatcaagtgggagtaattttgggaaatgggagagatgggaacttggaaatgaaatggaagtttgatgagcaatgtagtggaagtaattttgctgaggaagaaaagtaaataatagggaaatgcaaaagaaaagaaaaataaatgggtgcagcatcatcttgcatcttaagtactcattaggttttccactttcagaccacgccagcatcatcttgcctgtaagtactatgtttatacaaagtattaggttttccactttcagaccacgccagcatcatcttgcatgtaagtactatgtttatacaaagtattaggttttccattttcagaccacgccagcatcatcttgtatcttgcatctttaacttaagtactatgtttatatatatcggatggattgcatatatggttgcttatccagcatcatctttctttgcatcctaaatactatgtttaacgaagtatatatcggatggattgcatatatggttgcttatccagcatcatctttgcatcctaaatactatgtttaacgaaggattaggtatatatcagaaggattgcattgattaggttcttttccaaataaatactatgtttaacgaaggattaggtatatatcggaaggattgcattgattaggttcttttccaaataaatactacagatcgtgtataacaatctgcattgtaaacatcgaggtaaatcaggtagcaatagcatagaacaacatcgcatcaaccaacaaacaaaggaaatcaggtagcaatagcatataacaacatcgcatcaaccaacaaacaaattacaggatattgcagatcaaccccaacactaacacgtctcactcacgcggggcacctacctcggggcacctaccttacaaatcgagacggatggcccgacagggattgctgggtaggggaacgattagagcgctggaaccggtgactctcccccttcgtcggcgccggcgccggcgcaagagccggtgcggacgagcgcgggcacgacgcggcgcgccgggccgatggaggaagacgggcggcggcggcgggcgagcgcctagcggtagcggagccgaggaaggaggcggcggctgcggaggggggtcgagggctcggtgcgggtgcgggtgcgcgtgcgcggcgaaggggactaggggtaggggaggcgaggggcgagcgaaccggggtgaggacgagggtgacgggagagcggttttgggcgaggtcggtcgtgcactcgtgggctgcgtgtggagacacttttatcctttctgctttattttcgtgtcaatcttctccctgttttcctccgtattttaaggagtctgaaaaaccgaatggtaattgataaggagaaacatccgttttataatcttaattgctttcctaaatagatttctaagagcaccagcacattagcgataatctatacccaaaatttgatttttttagtttcctaaactaaatagggagtgaaaaagctcaaagatagcctaaatttaatcccaaaattaaaagtggatcttttgttaaactaccaatagaaatttctgtttttttcattccacacccagcatgctcccaacataaattttcagcgctcgcacacgtaccagagattgagagtcgctctctcaccctcaaaatccatggggaaggagagagaaacacaccaactagagatggggagttgctctcttacctttaaatccacatagcaagatatatggggatagaaaatccaaaactactgcagtgctttttggatctgttggatcggattttttcactgaaatctctcgaaatcaattttgggaataaaataggatgattgttggtgatattaatcccttgaatttgttcgcttctacaccctcgtatttcaaaataaatacatctatcgaaaaggttattctagttaaactcttctagtacttcttgtatgaaagttagacccaacaatggatcggagggtatgtataatagatactaccaaaattttatatttttgttaagacttatcaaattttgatttggtattaagagcgaaacgtccttgaatttttaaacactttaatagcggaagttgagtgttttaactatatctagtctattatcttaaaaaaaggtaaaattgaaaacttcaaggaccaaaacgtgcataggtacttggtataacattgagccacgatgctagtaaagcacgattttagactgttattttcgctattttattagactgtttgttccacgcgtttaaacatatgttttcccaaaaatattttcttcctttccattatttagataactcgttaataaactgtttgctaagcctatttaaaaagtaataatttatctttataataagtagagaatccgctctcaaacttgacctaaacgttgctgtggaagccgacagtgtagcctatcaagtctataaggacaacaagtccatggtcaagagctttcggaggataaaaccagtcactccagcatcgtatagaagcgaatgcgacgtatacaagtttgaagtacaaacatgaaaatctcaagaccacaactgccatgtactgttgtactaacacgtactacttcaagtcatccagtacgtagtggtacttttttatggatggtttttactcctggttaaactttttttgaggcctcgtagaagatatacttttcttgagatgtgcaagtcaatctgcacatgttagactagtctatctgtttatgcaaccggtttgatctatgcacaaggaagaacaagcaatcgccaggtttactggtaaaccgtccatacatatagacagctgcttctagtagatttggttgtgttataataatcgttgttaaaggaaatgcgtactaggagcagtacacatataatgtagggaaaaataaaaggaaaatggagtacacatcgaaagatgccaagtggggagtgggccggcccgctgacgcctccctacatgtcagcagctagccagtgggccagaggcggcttcggcccactgatggaaaaaaaaaacctggaccgctaaagcctcgaaacgtgtcaggtggggtccacctgcaaggcccccaccgcacgcacctggtgcggcacccacgacctggcccgcggggcccttcctcggtcagtgtggcttccgttaaacaagatcgcgcgggccccaccaacctccgtggctatttcggtttcacgtggattagaaacaagctttgtcttcccattggttattccactattattgtccttggcttatctgccaaatcgcgagtcaaatttcctgctcacctgtcgtatttggtacatttcatttttcctaatccttctcatcgaagttgcaagcatattgttcatctgtcaaattcgttctcctgttcattgatttgattggctaatgttctggcagtgcgaaggtttgctggactcaccgagagaacgccagaacggcagcatgtcgacactcccggtccagattaacccagctccgccgatcgaacattcgacggcagaagagcctgtgctagcaatcattatccctaacctgatcgatcagccgatcctctcaatccgtctcccggcccaggccgcccccctaatttggccgtatcccggtgcacgtcaaatcaagatcaagaacgacaaaagggggagctgcatccaccagcgacaggggaacaggttggaaaacaactgctttgttacaacatgcacgggagactatttagtaactgtagcactaacaccaaccgcaacagtctaatgggcatctcacgtacgtacagttcgatcgacaggcaaaaactgtgttcacagaagcaaagaagggaagaagaatcaaataggaagaagaagaactgaagaagcgaggatcgaggaagaaacagcgatcgcgatcggagaggcaactaaaagcgggaatgcgtgcgtaccttgatgggagtagtacccgttgtccaactggaaggccatgtgcaagaagcttcgacaccgcggtcaaagccgcagcgcaaaggagctagcccctgatcacttcgtcgatcgccaatggcggatcgattgagatatatatgatatatcccgcagacagagtggaaactttctccttttgcttcctagggacggacgacgaatcaggaggaggagaacaaagaaataattggaggaggtggaggcgagagagagaggggtgcgtccttatagataaagaaccggtgtttgatttggcggtgggtgtggtggccgctcgcgcgcgagaaagcgacaccgggggaatcggcgatggtgtatgtgtagtattggcggacgacgcagcagcaacgcacggtcgctacctgcaaaccagattgctatctaatctagctattatctcgctgctggtgaagtggtggcaatggacttaatggtgaggcaccacacgcactgttcggaaacagggaggccattggcacccatttgcagctgtgccttagctagctagcttgccctgcagattatattgtggctaatgaagtagcttgatttggccatgctttctgctcctgctagcaagatcaaactggcgatgattaatgttattagccgggagttgtctagctaggacagtgcgttgccttcggggttaattaggaggtgacaatgacatgtggggccctggacgggaggaaggccaattccagtacagtagcccggtactccatgtcactatttatcagggtcgttgtgagtggtttcgagcctcgaatatgtgatatagtacgcaggaaagagacggatcactggattgacgctttatgtggctctgccgcttcgcgccaccaattggttgttttcagaggcaagtggccagtttggtttggtgcttatccttttgcaactaaacaattacggagaccttaattccatggcctatctatacgactatactgtatctgctttacatattcaggggtttgtttaacgcatagagcgcctagctagtcacacgccacaatggccgtgcacaaaagcatcggttaatttccggcaatcgcatgcaaaggcaaaggaggttagggggaggaaagcgagcattaagccattaattcccctgtgattgttgtgccctgtttcgtgatcaagttgcaatgagacgggaatatgccgtgcactcgtgcaaccctcggcttttgcacctactcgagaacaattaagaaaaggcaagtgtctgtctggaggcactagtagatagcgtactcgttgcgtgcgcaggtgtaaagcgcaacggagaccaatctgggtgtgcgagcgagcggcagcgactgcgaggcagcatcaggatcgcagagttacaagttgcaaagttgcaaggcctttccgagctccggcggcttctctcggttcgcctgcgagtgcgaggcagctcatgcacgcgttgtgttccccctgtctcgagagggtgttgtactgggcctctagtgggcttctttaggctacaattcatttcgtcggcgaatttcctataggaataagtccactttgactcccttaaaagtggctcgaatctaatccatgaccctaaaccgcaaaaccggatatctcgactccgaactattgaaaccggtgcaatttgactcccttggtggtttggagggcggtttcgctgacgtggcgctgacgtggcaatgttgacttagtatgtgggttgacatggcgcttaggtggcatttgaattaaaaacgcatacgtgggacccgtttgtcattcacacatattaaaaattgtggggcccactgatcttcctcccttccctctttctttctctttctcttctcgccccttcggccggccgcgggggtcacatgacaggttgtagcggcggcgggcgggggcagagcggcggcagcgagctcaccttccacgacgaccgcgtcgacctgcctcgccacgacggcgggcgggggcagagcggcggcggcgagctcaccttccacgacgaccgagtcgacctgccgcgcgctggtcaccgcccaacgccccggcgctgtccatggcgcgtaccgcgcaggccaacggcgtgtggttgtggagctcaggggagagtccttcacctacactcgccgcatttcatgccctaggaggctgccgtctcggccccccatggccggaaccctccacgaccccaactccgggtcaggaggcgaaaaatggcgcccactcctactactactcccatggtcgcgccgttcgcccagtatgtagccgactcctcctccacattgcaatccgccgccgccgctctggcccccacccaccgccgttgtagcctattcccccgcggccggccgtaaggggagagaagagaaagagaaagaaagaggggaggaagaagaaagagagaggggatgacatgtggggcccacatgtcagtgggccctacaattttcaatatgtgtgaatgacaaacgggtcccacgtatacgtttttaattcaaatgccacttaagtgccacgtcaacccacatactaggtcaacattgccacgtcagcgccacgtcagcgaaaccaccctccaaaaccaccaagggagtcaaattgcaccggtttcaatagttcaggtgtcgagatattcggttttacggtttagggtcatgaattaaattcgggtcacttttaagggagtcaaagtggacttattcctttgctatatatatgccgttttgttttttttccttaaaaatcatacgttttattttgacatatgattttcactggatttcaattttttaccgatcaagctgtcaagttagacctaatttcatcctttactcatttactccctctgtttcataaaaaatcaacgtagtacacatctagtattaggttggttttttatggaacgaaatgagtacattgatatagtccagctacacgcatgtatgggttggtttgattattcaaaaaagtaacgattgaatgaaattacattacaatttaaatgtagttataatgtaattaaattatctttatatttgtaattgcatttgtgtgattttgagtgatatataactagtctctttcgttagagccgacatgcctaggtgtgtattcggttagactgataaattcagtctaggtattcgttctttagtagatttctgtcaatggaaattaaagcatgatcagctctgaacaatagaattaaagaccgagcaattcagtcttggtcatgaccagattggacaatagaccctatgagtgagaattgaggagcataggcattttgcaaaaatctagctataaacaaacatcagatcagctgggtgggtgcaggattcacaattccgatgaaaaccaatcgaatttcgcgaaatttcgaggtttcgacgaggctttttcctatttttctagtcaccaattgaaatttcggttatttcgctcggaatttcaccaaagccgactggttttcgcgagctaatcagtaaactcagagaatttgtattcaaattttggtttataaaatttattcggaatctaccgacttttcaccggattttgcgaaaaatcgtcattctgtgagagcccgaaacggaaggttatctcggaatcgtaaaccccatgtgggtggggccgtgaggagaggaatacagagagagttggctgtattctttaacttgaggttcccaacctcaccccctcgtttactatatatattgttgggctggtggtgggtctactatcaaatttctatttgttaaagtatttcagttaaccatgaaagtggccgaatggaccgaataaaaattgcttagatccagtgattgaattaggttttatttgaaatacaaaatgggtctaaagtttgtaagttaaattataaggggtttaaaatgttataatttctttgaaatataaacaaaatgatcaatccaaatattaaaaattattcacggtcacagacccacgattatttgaagttaagtaacaagttctaaaaaatttttagatctgaaaaagtatgccaaacaggataaagtcagcggcggagctagcgtgggggcgggggctcgagccccgctaccccgctggactccatggaaatatgagggaggaggggggggggaagagggagaggaagaagaaaatgggggagagagggggctggaggaggaatgaaagggttgagcccccctctcctccaaacctagctccgcctctggataaagtgaccaaatttctcggtccgagtcttttccgtttacgagttatgttccagtatgttttgcacagtacacgcctaccgatcgacgtgagctgtgtgcccgtgtctccggtcccttgtgctgttcgttcgaccgaacgacgtacgcgagctagctactagtatgccgttgtgccccgccggcacgccgccctctcgtgcactgcgaaaagcatctactacggagtacatggtacgcaggccacacacgcatgggccgtgatgcgcgcaggcagaagcgcgcgcgcggttgctaaatttcatgtacgtactccccggtggtccagtgggaattctggtcgatcgcgattgggtcgcgcctggacgcgcgacggctcgtgtcgtactgatcatagcgtatgtcaattgtccagattcatatcatagtttaaaattgctatattttgagatgaaggtagtacgtcatagcgcttgcgggcggcgtgccggtgcctagaacggaagaaaccaacaacgggcaacgtgcaacgagcggtagtgcgagaatcgcgtctgtgtctctcaggttttccgagtaacgacgcgattctcgcatgctagccacagggccacatcacaccatgatcgaccatgtacgtttcgatcgagcagtcaaagccggatcgtcggaggctcggagctagctagccatgtcacctactacctagctagctctcgatgcctatatgtacgtttcctccacgcagcaaggggtgaggtcccggccgttctgaatgtgcctgatatattcttccatctgcgccgtaactgcttactgcaatgccatcaaacagctctggccacgtaggctcacatgtactcgtgcaggtatgcataaacacacactggtaagcacgtacttgtacaagctagctagtagcctgggacgaatctaacatgaagacggtgatgactctaagcctccactattaacgcgagggccataggagtcgccacgaaacccctactaaacttttttacagaaaagctaggagagttgcagttttatctagtctgcttagtcctcctctcttcccttatacgtcactgggagtaactaactacgttagctccaccgtagctagctagctagcgcaatgtacagcggcaattatatacactgtgcatcccatcgatcgatcggtcgacaaaacgtgcagcgcgtttcctgtcgtccgtccgcccgcgcgcgctttctgagctgagccgagcagcagcagctagctagccatcgatcccattgaattcccgctaatgatggccgcgccatgcatctcgcgtctcgtctcgtgatgcggggcgtggttgcgccgcgcgcgcgcggatccgtcagatcgatcgctattgccgatgcccgccgcctggcacgctgtcgcgaaccctagacggctaccgcacacgtactccgtacgtagtacgcccaacgatcgatatatagcagccatgagcgcatagccatcagccaaagcccacaaggcaaacaccacacgcgcgacgtcagagagagctatagcgcttgcgcgcgcgacggcggcggcgacaagcgaaacggcgtggagagtgggagattgatcgatcgagcgagtggtaaaatgggaattagcggcgagaggaagggagccgcgaggcagtacaacaggtccaaggtgccgaggctgagatggaccgcggagctccaccgcagcttcgtgcgagccatcgactgccttggcggccaacaaagtaatgcctcgatcgatcgtcgatcagatcagtcacttcaattaattcctttctcctgctttcttgctgatctctgcttcgatctctctctggaacgggtgttgtttatccatttgtttgttcaccctcacttacgcgtgcgtacattcatgcgatctctgtcttccaatggcctcatgttctcaatggcgttgtttaactgcagaagcaactcctaagctcattcttcagctcatggatgtcagagggcttaccatatctcacgttaaaagtcacctacaggtcagcttcaattctcccgttcttcaggcgttattttgctatactagtcatcgaccatggaattataagaaagtacaccagaatttactgtttgtttaatttcgacagatgtacagaggcacacggcatggcattggacaaaacggtgaggctttgttaacttagttcttctctttcttgggaattgggattggattatgctttacaggagctgattatagtgtaataattcgacaatgttatacgtgcctaattattgtatactaattacattactctatctgaaacaagagatctaaacttcctgaaacttcccagttctggttggtgtaaattaggacctcactttgtggttgtggacttgtgggggctgtaattcttcagcacacatgtgaattgctaatggaaagctaaaccgactttattcttattcttttctcatgttaccatcagatatgcagccacagctacatctgaagcagcactcattcggcagtgatgagcagagccccaaggaattcatgtgcccacccataaaaaggttttgctgccgctagctttttctagctagctcccaatagtgctaagttaaaaagattatctttagtggcctaatctctttaaggcacaagcaccttttccatactcattctctcgctcttctctttggatgaacagggccaaggtagggacagaagcttcaggcaaatacagatgcatggaagggagcagtgacatgaggagtagtgctcctcctgcaggcacccggtacttcatcgatgattgtatgcgactgcaagaagtgtccatggataggaggagatcagatcaacacgatgctgcagctgccgctcgtgctcgtgctcctgctgctgctgcttcaagccttcatcaggcactgggattttgggtgcagggaagaagagaggagccctttatggtacaccaggtaaaaagaaaagctaaaagaaaccttagctagggcaagaacaaaaggcttatcaaaagaagatacatctagctctcttgtcttaactgctttgccgccactgatctttctcttcacatgtctctcactatctctagtcttttcttcctagctttatgcatattgctgcatggttggcgtaatatttttttcgtataattctcccagatgctagctagatttgctgatacctacctcctttccctcatcgtgcatactataacatgttcacttatatggaactggactagagtgtccaaagatatactaggacactttacctattaggacttgggagtcatatctctgattggcatcgatatgggcatgttcatgcacatcccagcaaaggtcaacaaactccagacgtgtccttcaaaaaagagagagagaagaaaagaacaggattaatagaatttatacatagtatagaaatactaggacagtgtggtacatacactgtcacagttgtactaggcaccagtatatataggacactgccacaaatggcccttgagagccctgttttctgataggaacacgacggtggtgtaactttgcctcagagcattcccttcagctcatcgacaatgataagccaaaagaagtggctttttgcagaactcggttgctatccttgcagttgcacgcagcagtttcatgatggacgatgatggcgcggtgcggacggaaagaacaagatcatgaaagctctctggtgcccctgctccggctgcaaattagtagcaaaagttgactagtgtcaaatattttgctttggaagcacattagctcgatctgtagctccttctgtgtgttacagtttcactgcactcgtatatatgggctatcaacctgcatatcagggaaataaatttgacagttgcagcaggacaaaacaaagcctgtcttgcttgaaatgcagttaaacatttagaacagtttgatatatcttcctaacctttgctgtgtcgttggattttgcagattagtaaacccaaagcacatcaactgaaccatatggtcaggaacatgaagatatcttgcaaggagaaccacgaaagtagattcttcatggtgagaagtgcaactagagatgaacaagtcaagaaacgcgcaccgccgctgtcgctagccgtcgaccagaaagctgcgaacgctatctcctcctggcccagcgaggccagctgcgttatctcgccgtcgccgaggaacttcagtactgactgctctgggcctccagggtgcagctttgttggccggagagttaacctggaactttccctgtcaatatgtggatcataatttagatcattaatattaataattatggtagtttttgttgatcagtccctcgtcatggtgctattactaatttctgctgatctcgtttctcgtgaaacaccctcgaagctgtgattgctgatcgtatggatcaaggtatcagagcaagttcaaacttataagctagctactcgacacacgatttacagacgagtatattacttcctccgtttcacaatataattcattctagcatttcccatattcatattgatgttaataaatttagataaatatatatgtctagattcattaacatcaatatgaatgtgagaaatgctagaatgatttacactgtgaaacggagggagtacacaatagcaggctacacggttcctaaacatgaactcgctccgtcccattttaagagcggacttgagttttcgtgtccaactttaattgtccatcttatttaaattttttttatgattagtaattttattgttattagattgtaaaatatgaatagtactttatgcgtgacttatgtttgacaaatttttttttatgattagtaattttattgttattagattgtaaaatatgaatagtactttatgcgtgacttatgtttgactttggcaaggcctctggtagaagtggctagaatttcaaacgcaaaacagtagcatttcagacatgtacccttttttcccctcatttgagctttgtgtgctagtttggccgcgtttagttcctcctccaattttttcttgacgtatacggacgcacatttgaagtattaaacatagactaacaacaaaacaaattacagattctgcctgtaaactacgagacgaatttatcaagcctaattaatccatcattagcaaatgtttactgtagcaccatattttcaaatcattgcgtaattaggcacaaaagattcgtctcgcaatttacatgcaagttgtgtaattgtttttttttcatccacatttaatgctccatgcatgtgtccagacatttgttgtgacagaatttttagaagtttgaagggaactaaacacaacctttgtccattatctttttcaaaaaaaaaaaattcccttttttcaattcacctccttaaccctagttagacacatcaaggaatgcaaactttgggccctcatgaattcaaatttttcacaagatctttgcaacataccacaaatacagtttaattcatacatgaactatgaaaggtctgcacattttaactagatatagtggaaatgaaatgagggcggcctataagaaaaatcacccattaccagtttgccaccgactttgacagctcctgcatctgcaggaatgtgctgaacaaagaagattcctcctgtcctgaaattgttattccttgtctaaaggcattcagcatatataaaagaatcaggtgataattttgaggttcgcaagtgtatatataaatggaatttcagagtagcatactagcatcagtagtgatagctcacatgttgcacagtatattatgtgtcaggagatcaaacagtagtagcttaaattcaggcttgtatttataagcaatatgtactcatgggtatactgtagtagagctaccatgtgcttttctttcttctccctcgctctgctggaaggaacacaaacagaatgattaaaacatagtcagctcatgtgcgtgcgtgtgttgtctgtttcgagttgttgtttctcaaaagcctaagagaagcaaacatgtcacgtagaccactgatttgctggttaaaagattgacaaatacaacactattctggtcgccaaaagtaaagaaaacatctaaaaaggtggttaggaatatatactcgtcagtttctgtgcttacctttgatactgcgaatggcatcatcttttgtcaaaatcaaaccatttaccacttacccaaaagtttcagactgacagcatctcatctcaagtacacattattaccatgatgagcaccacagtagattgcagggaaaaagtacggtggacgaaacaaaagccatctcagtagctgcttcttcagcaacatgcatgcttttgtctgaactggccataatagataaagttcagaaaacagtagaacaccataatagccagcgacctcatggttttgacatcgcaacatgcaaaaataacgacaagaagtaccctccaagagctgcatgaacgaactctgcagggctgcaacttatacactgacctacccaaaaccagccaaacagcagttggtggggactacagatgatatgatgcgtagaacagcacgcaaccatggaagggtttgatgtttgttaaaccatctcgaccatagaagattcaagctgccgcagagttgtaaacttgaaatgagcagactgatcaaattgtatcatctgtattatgcccatcacggtgccatctgattgatatcaaccaaggaggcatcacttcttctttgccgcttttgcatcaggcaccaaagccttgacacagagacgaggcttagtcgagatgagttcagacgggagaacggacaccccagccactgaagatcccagggataccccagaaatagggagcatctccactagtactgccacctggacattagaatatatcatttattgtgcaaaacagtatgcaagatttatgcacaacagtgcaaagcaatttccaaaaggccatagatctaaaacttaagtttttctctgtatttaaagtaaaagaacagagaatataattgcgtattcaaacatgatagtgcagaagttatctaaaagtgtaagttgtcctctacgcttcaaagtaaaagagcagataagtatacatagaattcaactttacatagttattatgactctggataaatggttccaactttttatctcactagtaaattagtttgtttcattttactctcatcactcctcgtttatattattgaaaagtgaattataacatttggaacccatggtagaagccaaaaaacacgtaaagttgtgaactatcagaaaacctagttggccgttgggtttcaaagttcaaacaaaaagacgtggtgaaagtagaggtatacttagcggaccaaaaagattattattgaacaatcttgatgatgacaactttgatgaaaaatattgacttactgacatctgctgcatccaaaagtaaacgtgctgaaattgcaggatgtcagataatcacgtgtcaatactgtccaaagactcaaaaacttatctcagttgtcatcatgatcgagtggaaaataacacgctaacttcactagtcagcattgataactttgttgtttttccaatttggtgtctttagattatggttctttaaatcctccatgttagctggcaagtaactctgctaaagtattgagaggttcattcaaggaaccgattttacctcaggagatctgagatccacaattgagttctcagcaactgatttgacggcaccagcaacgaccttgaagcattggtccctgtccattaaagtttgttgttttgaaccttcattgccattcttctgccctttcatctctgtttcatcaatgcctcttctattatacccaactgcgaactttaccataggttaacattatatgaaatattaacagttgatatgtttccacgagataatgctgccaatgctaaagcccatgccattttcaagatagatacaattataaaccgttcaaagcatgaagctatttcaatgggtaatgattaggataacagaaatgcgtaattttgttacttgtgcatagcattacagtaccattttagagaactaaaccaaatacaagaaatatttttaactcaacacatgcaatggcaagagaactggatatgagatctgcaatggcaaatatatatcacaaaagaactggacaagagaaatccagctatagaactggattgattggattccatcaacggtttaatccaatcagtaaatgtaagcagtgcaatatgctgtgtaccttgataggctcatcttggtcttccttactctttacaaagtcaagaaataactttgacacagtagtatgtagttctgcttctgacagaacacatgtttcctgaataggaaatatgcgatgacaccatctgcccattgaaggttgaatagtttcaaatcagaaattttccagtgcaactagagtcaatcatggcatacggaattggttggcagaaagacgcactgctgccatatttcttgaacaaatgaatggtaataggttgcataaatcaaatcgctatgatgcaaatctagaatagaaaaggacaaaatgataataatattatcttcttctgctttcttagtgatctggtctacactgcacatcattcacacattcagcatattagcagaaagaagcaagcaagcgtaacatattgcgcagtcactaaacggtaccgaaattaacaagttttgaagttgaaaactgaatcaaggttgacaaacttaactatactcttttaaaagggagtagtggtggtggtgagtggtgaatctgctagtaaaagaaattatgctagacaaagcgtgctctagaaatagtatgttgtaatatgtgggatcgcttattacttttcggcacttccatatgacagctgaagcctgtagttaataaatcaactttgttaacagcattttgagagaatgagtgtctaatgaagttaagaacttactgtggagatttaagcttgccagaatgcagtgaatgaaacatttgtgtaagcatttgaacaacacgaaggcctccgctaggaaacgaaaagaaaagcaagccacttcttgacagtttaaccagtgagagatttgaagtgtcgtcaacatttttacttgttttggagtgaggtgaaactgagtctttttctacactgcctgttacagaaccagaaaagacacagcgttagaaaaaagacaggtaaccaaaccatccaaaatcacaccctttagattgaatgaatgaatgtggctaataagttatgaaatacaattgatgctaaccagttgtttctgaagcatcacccttctcatatgttactgcatctcctgaattttcaatatctggtgtctcggaacatattttccttttctttgctgaaacttccgtatcacttggttctgacttttcagaactatagctgtttgcatgaccaatggactggcgaaaaacagtagcacacccagtatatttcagaatagagtgtaaggaagatgaagtggaaaatggttgcccaaagtatgaataaactaccacaatcaaaggtaaatactacaacttaaagttgctctatacttgcaagatattcagatggtagcaaatgtgctgtaacattaagttttatgtgctagaattatccattgcagaagaacaaccaaagaataaggagcaagacctacattttcaagaatggaaatggcttcctttgttgcgcttttctcacgttctgtaagaagatgatgatcacatcaaatttttgcagtagtgaatagaaattaagtgtatatgtagaatttagctatatttaagatttgttttaataaatatctttgtaagatctgtcacagggtagcagctggattctaaaataacccaatagtaggaataagatcaaaacagggataaaatgtaggataacccagatcactcaagaccagcagaactttccagaataaccgcaacctaagtggtttggctgatgcttcagcacattacatacctaagaacactcctggctacacaagcggttacagattttattcaatccttgactcagtgagcatgttacaatttccagaatgcacatacagcagaccaaacatcattacttatttttttaagacaatacacctttggtctctcaactctttccatggtttaagttttcacccccaactccaaatcgtttgaaatatgtcgataaacttttgaaagcatgcagatatcccttgcaaaaaaaaaagcatcagttttgccatatgtctagttagtgtgtatttggcctacttgtcagccccctctcagcttcatcttctagctggactacatgaggactgaggacactggcaagtatagcgaagttttttcttctcaccatatttttttccttttctcctatactgcattatgacaaataaaagtacaatagttgcaggtgatccaccacaaatttataaactatgccaacattaaacagttgtaaatttgatttacttttcagcacatacaactacagttcatcaactactaactgacaagtcaacagaagaagtgtctggcagggtcgagtatacaaccattgggtaagctaaccgatatccatacaacaatgtactaaaaactcatacaccaaagtcgaagggtaacaaaaaggtagttagttctgcgcctccaatatccacatctaatgatctaaatgctactagtaccttttagcgtcacaggggtcactcgaatgaatccactaacaaatccaccacctgaagtatctagtcttcccctacgtatccatatccaacaaaatagtttttgctaaaatagcacgagtaagtctaaacatggatgaggggcacgcactgatggggcaggtgatgaggaagccggagtgggagcggaggaggagggagcccgacgcgcggtagtcgtagcgcgggaggtttatcaccgccgcgtgctgctcccatggctgcagcggtcggtcgctggctgcggcggcgggggcgggggcggcggctggtggctcagttggaggctcgcgggccggcggtggggtttcgatttcgggcttcggctccggttcctccgccgccgccgccatggagaagcgccgaggatttctctctctctcttcggtcgcactttgggcggcgccgaggtccgaggagggtttggggtttgcagacgtattctgttaacctgttaactcgatccgaaggcgtatttctgttggttcccgtgaactcgaacagaaagcgtattctcttcctttgcgtaaactctcctcacgcgcattgcttataggatcaaaataatcgattagagttacacatggaaaagtctaggaccggaatctgatatagtcacggagcttttcttactaagttgatttcagcagctgccaagtactccatatgtctaaattcattaatacctatatgtatgtgggaatactagaaagtcttacattgtgaaacggataagtacctgagatgatgctagtagatttgcgatggccggtctattcatcttgtttatgaaaagatacatctgggtccaggtatgaaaaaacgtacgcataattggaagactatagacaccaaccttacaatcatgattattgaattattggtatatccatgtcctgtcctgaaagaggctatttttgaacaatttccgtgtttgtgcagatacgatatgcacactgttgtgtgtttagggtgctacttacctttatttcagtgaagcatacacaacaaccacacgatccgactcatgtttttgaaaccttacaaatatataaagagattgatgttgtttatcgttgggtcgatgaagatgccgactgatgtatattaaggagaagggagaaaactttacgaacataccctctctagagggagcgcaaatacagtgcgtcggtacatcgcctttacaacattaagaaattacaataggttgaaatctctctgaaactggtgttgtggcaatactcaacaaactaaagagcctttgattttcaagtttcccactcatcacacatgattgcacacaactaagggaccgacgaggttgttccatcgaatacccacatgttgcgctctttctagatctaccaagttacgaggatgactccggcgtcgaacgtcccacggtcgaccttggaaacggagtgctaggcagtaagccaccaactgggaaagtccgaagacgatggagaacaggagagactcaaacgagtccgaatctgtacccaaacctgttgcgagaagggttgagaaggggcaaccctggaagatgtgttagtatgactggccatcattggagcataggtgacaaattggcgcgagcttccaacctcgccgctacaggttgtcagttgttaaacaagcattgcggacggcaagaaacatgaataacttgtatctcgccggcgcgcgggatttccaaatgatcttgccgagagggcttgtttaacatatcgctaaaatttagcgttaacaggtttcacaaggtgcaaacatatagtgaaatcaaacttcacgaataacaacacaaatatgaaaaatatatgaactatgaatccggcattggccatggacgattaagctcgagattaagatcactttcctatagatactaggaataaaaacttttcctgagatcacattgagtagtaattcaacctgataaacaaattgcactcagcttcgtgggagaggcaggaactccacattgagtagtagttcaacctggcaaataaattgcactcagcttcgtgggaaggatatgcatccgataccgagatctaacgattagttgaagaatcggcgtgtctgccaagattgaagtgcgtgatgtatatgaaccgacccatatcaagatctaacgattggtcggttagggatggagttaccgtcaccactatgttttattttttaaagtgtatatagtattagtataaatatgattctcaacgaaaagattagcatttttttgtccattaatttgcaggacaccaaatatgaacagttacaaactattaattgagatcagagttgctagctagatactacgaataaaaacttctccaggcgcacaccatgttgagtagtaattcagcctgaaattttactcagcgtaaataatccaatctggcggatagcttcggcgcgaatctctgaagcatcggcttacccgcgacagctgcgccggacaggactccgccgaggatgccggcgacgatcatcgaccttgggccggacgcgatgcggtagagcgccccggcgctggcccccgcggcgacggtgttgacccagtcgtcggcgccgtcgcgctggtcgcggacgaagctctcggtcccggcgaagagcatcgcgacgatgccgaaccggttgccgaaggcgcggccgacggagccgctctggttgagggcgcggttgatgcgcagcttggcggactccccgcgctcggcctcggcggcggcgcggcggaggcccacgagcgcgccggacgtggcgccggcgaggtagctgacgccggtgtagaacgtgaggttctcgccccaggtgcgggtctgccggaacttgtcctcctcgaagaggcactccggcgaggtgggcaggtcgtagagcgcgcggtacgaggtggggaaggcgaggccctcggggcgatccggcgagtagaagcggcgcccttccgtgggctcctgctgggcgtcaacggcgcgggacatggctggctgatctagggttgccgtgggctgctgctgccgctgcgtgccttctgggtttctggacgatcggttttggttgccgccgccgtgtgccgggggtttaagagaggggagtggtctccgatctgcagtctgcgccttcgccgtgtcgccgaagaaaagggggagggcggagccgtgcgagatgcggactcgaaacccagtaggaaaaggaaccacaacgcgacgccacggttccgacttccgattgagaaaagagggtgtgggccggtgaggtgggccgtgggtgtcggccttcaagtaagtggtctgccagcgcggcctccctccgcctcctctcggcctccacacaactgtgcacgcaaggggctaggcggaataagtccagtaggactccctcaaaatataagtccagtttatttgaattccttaatcgcaaagatatttgaaactggctccgtcgtggaataagagaacatagtatttgcaaacgaaaaacagtttgtgaataaaatttttatacacgtgtttttagcgatctaaaagtaaagactgaaaaataaacttcgatgaaaaaaaacccaaaaatcaactccaaattgagagttgaaaatttaaattttggctgataagcataagcaaaagaaaaagatgaggctgtggtgtaatttgacttcatagattattgtaagagtggttttcgctgaggtggcaggttaacttgtctgctttcggccagctattgggcccgccaccgcgtcccctttctcaaatgggctcgactttataacaggccgggccgtgcaagcgccacgtagctgcacaaacaaggccgtatcgcgtcgtgtcaagctcgatctagagttgcaagacccccaaacccccgtgacctctccgccgcagccgcaacagcaatggaggcgcaggcggacgccggcggcgacgacctcgccgccatgcgggagcagtgccggagcctggaggaggccatcggcttccgccgggagacgcagatgggcctcgtcgcatcgctccagcgcctcgtccccgacctcgtcccctccctcgaccgctcgctccgcatcatcgccgccttcaacgaccgccccttcgtccccaccccgaaccccgacggcggccacggtaagagccccgccgccctcaagccccaccaccgccgcgccctccctgacccggcgcgctccacccgccgcaagacctcgcccggatcctcccctgcctccgtcgccgctgcccccggcggcctcgacgccgtgcgcaccatggtcgccgtgtgcctcctggagctcgtccccttcgccgagatcgacgccgccgcgctcgcccgccgcctgcaggcggagagctcatccgccagcgaggccgagcggactgctctcgctgacctagccgccgaactcggcggctcggcggcctccgctgtagtcctcgccctccgccgcatagccgaggacaccggcggtgtgcagatcgaggaggccatgattgggggcaagtcgatgacgatggtctgggccatcgaccggaacaagctcctcaaggagctgccagaatccgctactttgccgctactccaacctcctccagccccccagatgcccccctctgagaccgatgccggcagcgcaatgataccaagaacaccgcagcagcagcagccgcagccggatatgtggccgcattcgatgcctccgatattcccacggccaaggggcatgacgatgcaggggatgcagagggtgcccggcgtgccaccagggttgatgccgctgcagcggccattcatgggaccagctggagttatcacaatgggtgggggtgtggggcctagccctaaccagcagaagcagaagagcgaggaggacgaacttaaggatcttgagttgctgctgaacaaaaagacatatagagagaagcagaacaccaagaccggggaggaacttttagatctcattcaccggcccacggcgaaggagacggctgtggcagcgaaggtctgttttcccttcacctatgctagtggttttgttgtttgcactgtgtagttagtgatgctttgggttgctgatttgttattgatgtagtctcacactgttagtcctgtagtagtaaatgagctggcagtggcggacctaggatttgaacccagggtaggcctagcaaaaaaaaaaatctgaatgcaatacaatatgattcgatataaaatgtggtaaacgatacggtatataactctaaatggttcaatacaagtagaaaataacaaataagtttgaatcttacctaaatggtccaaagttggcatggaccttttagaatgtaccctcttctagccgcatcttgatcgttggcatcaaaacttgaaatagaagcccttaagcctggatcatgttcaatatcatcaacatcataaagcagcggcggttcttcttcagtttcaattgacccctgttgagttatgtgtcttagtgaatatgtatatgtttagggactaaatgtaaagaccattgcatacaaggagatgggggacaccaggtccaaatcatccaaaatttacagcatggtatcagagcaggacgatcctgcttgattttcttgcaatccctagcaacacgagttaatgtggaatgctggtttgcagactgcagtgaatcatggtccagaggtagtcctgaagagatgaggttgatccatgtttttttttggtgattagttgcatctggtttgctgcctgctgtctgtaagagtacggtatgttttttgccaaggaaatccatccaagccttgccttgtgatttcgctcctggacttgcattttcttcgttgctgtctcagcctctcaggtggcgttgctgctgttttctttgccgtgtgtgctgtcgagagttgcagcagacctgtgtagttgtgtgaccttgtataagttcagtcttgataaatctatatagaagtttgtgttttgattgggttccaacctgctcactaagaaatgagtgagccaactacagcaggggcggctgggcgctggcggcgtcgggcaggacgccgggaccgcgggagccgggagctcgggaggccgctgggcaacggccggacgtgagacggagagggcgcggccagccggccaggggcagagtcgcggagatggcgcggccgcgggggcgccggcgcggcgcgcgaaggcagcggcgttgccgccacggatgggcgtgcgcctggcgtgagccgggaggccgccgaccgacggacgcggcgggaggagcggcggcgtgagtagcggcctcaccggacggtgggagcgccggagttgcgccggcctcgcggctcgagggagcgctgtcgccgttggtcggtcgggaggggagagtgcacaggagagaacagagaagagacttagggttttttttgtttgttgggccaggcttttttcatgggccaagaaaaaataaatacctgatcttctctaggccaaattctagggtagtcctgggcctacctggactaccctctgggcccgcccctgtgagctggtctacttatgcattgctgttgttaaaactatcataggacgcataacagctagttgtcggaggcacactgctataatgaacggtttatcataaattgcttagattctgcactgaattagtgcgactgtcaaagtaaaactgttaaatgttgtttgacccatctgcattgcctatatattgtcaacctctcgacacttataacttccactcttccagttcttacacatttaattgtaataatatggttgacatgaaaatcattcatcttgttttgttaatatggttttatgttcatgcagtttaaaacaaaaggtggttcccagctgaaggaatattgtaccaacttaactaaagaagattgccgacgccaaagtggatcttttgttgcctgtgataaggtctgtggtgatagtgtcctgcaccccttttcacaatgtgtacttccgcacgttacattttgtctacttttaacaacagtagagcaaaacctgttgtgtttgattcaatcacttaaaatgatgtgcctatccacaatcatggcctctttgacgatgaaattatcctgttaacatattaggccttatttctggttacttgaatttattccaatcaaaatcttcacatttttttccttgaatacttgaatagcttttgttatctggtcttttagctgttcatggtaacaactaatctggaagtaactgtttatatttcattctgagcaggtccatttccgccgtattattgctcctcatactgatacaaacctaggagattgttcttttctcgacacttgccgtcacacaaaggtgactatggcatatacacccttgtattttcctctattatgatgtgtgtttttgtatcttacatatatcctataatctgtagacctgcaagtatgtccactacgagcttgaccaaacaccagatatacctccaatgatggctggtgctcttgcacccccaaggcaaataaggctccagagagctgaatattgttcagaagtagagcttggagaagctcaatggataaactgtgacatccgaaacttcagaatggatatcttaggacagtttggagtaattatggccgatcccccttgggatattcatatggaattgccatatggcacaatggctgatgatgaaatgaggacccttaatgtccctgctttacaaactgatggattaattttcttatgggtcactggtcgtgcaatggaacttggtcgggagtggtaagtttccagaactatatttgattagttgtcttcagcagtaccaacaggttaattaataattgcgtagcattttagcattgttcatatcctaatgccccttactgagtgcagatcatttagatatcccacacttcatactcaaataactcgataggatatagatgctactgtaataacaagttatgtcatattcattcctttactgaattttgtttttacttaatgtctactgccaagtgtaaactttccctgaatgaactttcagcctgaacaattttcttactgacaactatgttgcttgtttttaccattcttcagtttggagctctggggttacaaacgtgtggaggaaattatttgggtgaagaccaatcaacttcaacgtattattcgaactggacgcactggtcattggttgaatcatagtaaagagcattgccttgttggaataaaaggaaaccctttagtcaacaggaacattgacactgatgttattgttgctgaagtccgtgaaacaagcagaaaacctgatgaggtacactcgcttctttgattcatggttctatactcgccgcaaaagcattgtgttttttcttataaaaaaattctaactatagtttataatgtttttcttccctactgtaataataaacatgctcatttcaaggctatactcctacattctttaaatttgttttgctgtgcagatgtaccccatgctagaaagaataagcccaaggacaaggaagctggaactgtttgcaagaatgcataatgcacatgctgggtatgctcctgctgtgtattcttcttcccctagattattttgtcctcaaactagatgctaaccatttacgtaccatttaccctttttctttgtttgctcagatggctttctctgggtaaccagttaaatggagtaaggcttgttgatgaagggttgagagcacggtacaaggctgcctatcctgattcagaggtgcagccaccatcaccgcccagagcaagcgcccctatagatggtgatcaaggcacatcacagaaacctactgtatcagacggcgagaggcctgcctgatgtgaagcagtcggcaccttactttgaggactatgacattgaggaatcatcgtgcaagaatacaaacactttggacgacataagtattttatcactcgtcagctttaactccggttgtaaaattagttaagtcggtttacttagaagttactccagttgtaaaattagtaagtcgattgtttttggtcgcttgaggaatgcaggaggagggaagaattgttgggttttgtaatgttggcagacatccatcttgataatggaacgcgtgagccattactgatcttgttaacatgtcagcacgggcaaatcctgaatgcaacatttgttcccgtcctggaaaaacagcatgtacgttaactcatgctgggatggctaattagcgcaagtgcatcgccacacttttctttagtattttccgacgaaactttttaactcaaatactacaactttttaactccagagcaacattacagtacacaaggtttttctaaaaggttgacataattagagtacaaaactttaacgacagtatcatgtttgctgctaagaatggatttcaggttgacataattagagcacaaaactttaacgaaagtactgcttcatgtttgccgctaagaatgtatttcttgcgtgattcatgaccagtgactatgttaacatgactagagtagagaataagctcaaggcgctgctagatttgatgcttggtcgctcaaggcgctgccaagctgatgcttggtcaggcctcatcctcatcctcggggccttccttcagcgccttgatgaatgcgtccagagattactaacaagaacaataatatattgtttagggtgttaatgaagtatttacctaatgaatcaattatatgttgttcttgatgaaaaaaaaaactagcctcgatgaaaagttgcaaagatcagcgctgaattcatcaatgttcatctcatcaatgataggcattttatcaagcgttgacaaaatgacagtcaaaccttctttcttgtaagaaagtacacatgttagaacacggttggatcaaaggtaactctcaattcctatatttcttctttcttgtaagaaagtacacatcttggaacacgattggatcaaagataactctcaattcctatgtttacttagcatcatgaaacaccggtggaagaccggtgacatatagatcttataagaactcatccctttcaccttgcacgaaagtgcacttataaactttccattttagacaacaccttattgagagctgtcgtaacctttctaatcacaacatacccaaatcaaaacatgcacggcagaaggcttgagagcctttgtaatgtgccataaggtacatgactaaatgaattaaagtggcgggaattaaataaaatcttatttcagcccattactttcgtaactggcccgtcctgtttagcgtgagcgtggcctgtctaccggcaatgacccgacgcagggcgaactaagcgtggcccagttgtattctgcggcccaaagaccacgaggcccaatagcggtggtggccctacgtggggctgatatggtccatccgatttgatggacggctcggatcagtcccgtgccgatgaaatcgccggtcggaggggggaggggttcgaaaaccctaaccctaatcccccttctcccctactctcctgatccaatctctggtgatgcgagagagtggacaacgacgatggtggtgacgacagtccgtcgaggtggagcacgcacgcagcagcgatagcgagtggcaccggcttcaccggctgggaggcgtgcctgagggcagcgccaagccaagccacagcgtcaacagtccaatgaagcgggcgcgcaagtagaaacgggtgccgagataggctgggcttcgacggcggggggtgggggcatagtaaaaaaagccggactggtaagtgacccggccgacctctcggttcagcggtctgccggtctgaccggtgacccgggcggtcgaactgcggttcacaaactacatgtatattacatattcactcatgtaatggctagctctttgctcttgtaactcttggacccgggttcgaatcccatgtagtgcaccatttcttgctatttttgccaaaaaaaagaccaccagctgcaccaaatgggcctttaaacagcccattgtggcccattagtatggctagccggttcaaccagtgccggtttagtgtccggttcgccgaaaaccggccggttcaggcgggcaaaaataagaccaacagctgcaccaaatgggcctttaaacatcccattgtggtccattagtatggctagccggttcaaccagtgccggtttagtgtccggttcgccgaaaaccggccggttcaggcggttcagagcggttcgattgcatgtctggtctttaaaggaaaccgaaccgtggtcacctttggttctggttttttccgatctaaccgccaggaactcctagaaggcgcgcaaacggggagcccaacgcaaccgcgaggaggcgaaggtgcatgtccggtttttaaaggaaactgaaccgtggtcacctctggttctggttttttctggtctaatcgccaggaactcctagaaggcgcgcacacgggaagcccaatgcgaccacgaggaggcgaaggtgtggcagtgtcgcttcccggtgagacccacacaacggtggggtttcccggtagaattagggctccaaatccggtaagaatatgaactcaagcctaattttcttaatttgatttggatttggatttgattcagattttggggtactcttcaatttggggatttcgggaaaattgaaaccagatgggattgtcaggtgctattgggctgcaccttgggccgtgccagctattctccaagttgagcccaagtaagcccaaggagaggggacatatacaaaggcaacggcgacacttgggagggaaggaacataactagcaatcggcggcttcggctacagcagcggcaacgacttggttcggttgaaccttgttgatctctattcctctcccaccctctctcttgttactcttcactaatacttctagaagcttccggaatctagtagcttgcatcctttacatcttctcatcctgtccctattgtattttcctgagattgcattgaattttagttgctcttgagattattgagttgagaagaagaggttgctaacactcctcttctacgcccatgctgctttctcccatcggtcgagcaccctggaaagatatgggggaagagagtggagagggagcaaagggaagtagaagatgtggttacactgatatgtgggatccatctgttcttttttaatttttgtctttggtgccacgtccccatcatgtcatgtaaaatgcttacaatactgatttgggactagggatgacaatttcccccgcggggccgggtcccctgcggggacccgaccctacgggggcaggggccatttctgacccgtgggtgagtcgggggcagggcaccgcatttgggcggggagcggacggagaggatattgaacccgggggatatattacccctcgaaatgtagcccatagaaggcccaacaagcccaacttagcaaaatactgtgatatatgagcaaaaactaaacatgctaaccctaccttatcctctcccgtccatcccatgcagccacacaggcacggaggtggcacactcctctcgcctcgcttttcccttctagatctcgccgctctctctccgtctcttgcggtctcgccgtcgtcagtcgccctcttccctcccctccgacctcctgtcctctccagtctcccctttccctcccatctccccacggtagcgcgcaggacgacgcacgggcggcacgcggggaggcgcacaggcgggcgtggcgagggatgcggcacggcgcataggcgcgacggctggcaaggggacaggcgcggcgagcgggcgacacaggtgacaggcgaggtgaaacacaccgagaggtatttcactaaattggtgaaatgttgtttgtttattgagtgaattgttgtgtcaaagtatttgtgaactttgtggtcatgcatgcattcagatcatggacggaacgatgtatcatggaaatatttgtgttcttgcttgattctatatgatagtcttgaaaaaaaaaatttctgattggatgaaaatactacccaatacggggccctggtcgggttgtgggccggggggtgtcgggggcggggcttaatttgcccccgcatctccactcgtgccaggatcggggacggggccgttctagtctaacccgtccctgccccgccccgttgccatgtctatttgggactatatttctacggttattgcggcattgggatgtaattcgaacggcgtcaagttgagcgaccttgagtgaacttattccttctcaaaattggggagcttgcgactctggccattctgctcacgcagtcacgctaggcccaaggcccaaaaacactatccagtgggctcaaactagaggcttctcttctacccagggtttagcgtcggatccagtctccaccggagcgcggggcggcggattccaaggcggcgatggagttctgcccggggtgcgggatgctgctgcagatccagccggccaccggcgggaaccgcctgcgcttctactgccccacctgcccctacgtctgccccgtcaaaaacaaggcacgcctcttcttagctctctccccccctatcacttcgcctccctacttcgtctgcgactttgcgtattgctgccgcggcctccgcgtttgattgatgcctttcgcagatcgtgaagaaggcgagactagtgaagaaggaggtggagcccatcttcagcgacagcgacgccatgaagaatgcccctaagaccaccagtgagcccttcgcccttaactttcttgttaagacaatacattgggattaattgttgtcttaactttttttgttgagacaattcgttgggaataattgaacttagcttctccattatactgtgtatcatctgtatgtcatgaattgttgattatcttgccatttaaatttaggtgaaaaatcattgctattgccacaccaatgggaaattttgttctaaatgtacttgctgatttttgtactagtaattgtttttttttcttttcttccatccattgaaatgtatagctgggtaatctagccgcagtccaacataaacgaaagtgttttatgcacatattctgtcttctgagtttgtttagcttatgtcgatacaggagacatgattgcttgttcataaaaaaaaaaaagagatgaaaaatatactaaaataaaaggctcaaatttacttcacagccaagcagtgctggtttgaagcataataaattaatatacttcttaagctatgataaaatccaaatagcaccagatttcgtccaagtaccttcaagaaacttgctactcctatgtatttcgttgtttaaagtcatcattgagatgggaatgttcattaggggatgtctggcacatatttattaggaaaccagatgattgaatagttatgggtgcttctagttttgatacattgttaccatggccgtggtatactatcatgcatgtgcgtgcttagttccttgtaaaaaaaaggagtaaaatggtggaccatcagtgctttcttttttcaagcatctattctgtacactttcaacacaagataagattgcttgttgtgttgacagaataagcttgtatcttttgatagtggaaggacaaaaaaaaagcatttttcaaagctgtacctgaatttatttagctgttctgattataatggcatgtctccaacccaacgcaaataagttcaatattttaacaatttccacgtaaagaaccctgacctaacatatggttaaacattttaataaagttctaatggttgtctgaattagtgaccctagaggtgacattctgccatacataatcctaaatacattcaatgattttgattttcagctacatgcccaaggtgccaaaatggagaagcatactacaggcagatgcagattcgatcagctgatgagccaatgtctacattttacaagtgttgcagagaagaatgccaatttgattggagggaggactgactttagtaatatttcttgtttaatgtgtgtggatatttttcctgctaaaactatgtaatcatatgaaaccttttgtaatcagctcatgccgcagcaaagagccaaagaaaacttacacatgggaaaccaacgtaccacaaaatatcgtgatattttggtctaggcgtgtgccaaagtcccaacctatcgtggtgttttgtctaagaatccgaactgaagactggtccattaaggcattaacccaaaaaagaaaaggcttctcacaccctcagaagttagattttggtctttgttgccttgttggtgttagagatgtagattgtcctggtctagaacacgagagcatgaataaacgagaagattgcggccataaggcctcccgctctgccgaatgatctacttaggttatcatcaacaacagcattttgcagcaattacggcatcaaacattcattaacaccatcaaaatatcatgctgtaaactcttgccaaacggcttaataattaccaacaagctggctttacagcattgcagactacagcaacgtttaaactaaaaattattaacgttgctcaattatgtatgaaacacaagaaatgttgaaccaggaagctggaacatgaacatctgaacattctttcttatgatgttcagatgaaacacaaaacttgactttatacatcatcatttatctggtaaccacttcttccgggctccttccaaagcttcttcccgcatccttgttaattcacgaaaccattgctcgtactgagcttcaatcagaccaagctctccatttaacacatctcgattttcagtaattgaaaccgatgcaccgatcaccaactccgagtgatgtgatgcttgatccatctgaaagattgcaaaattacttgaaccattacttaacggatgtctgcagcccagtttatcggttcctttgtacgcaccacattccagtgtcctgtattcgtcaacgccatactcactaagacttttggaactcccatcaagctgaacagaaatgtctgacccttcagagctatttggtcctcctagattggttgcattcaagagagaatcaatataatcacttggtgatgcattggcttctttcgaatgcatcataccttcaactagtacataatcatgtgtcaactccgatggatgctgctgggaagtaattacgtgctcactttcacccattttagattcgctggaagtactcattactgcatcattcatcagctgctgaccagggacaagattcactatcaaaagatcaataaaatcagcaatgaaagtaacatcacagtctgctaactccaactgctcgaccatttcagcagcaacagacatagctgtatcagaatccaagtagaagagaaaatgaatgttccttgcatgtcctgcaaaaataaaaatgatatcgtatcacgagaacacaaaagataaattcaattaacaatagaaagtcgtaccacacaaatcggcaattcgcaaaaccagtgatactgaattgtcatcaagtttctcgcctgttagctttagctctgtgtttttgttagttcgcgtgaactccaacacagatctatgtggaccaccaagatcatttctcttgcatgtgctagtacacatagattcattggtgtcaacatccatgtgcaaagcttccaaagagacatctactgatttgggtaatgatgacggaaacttagtgccaacaagaacactagaattatcagagcaaagaaaggggtcttgcaatagttctttggcagacagcctttcagaagcaggaactaaacatttatcaataaattgttttgcctgaatatttgtgattttagccagagcagccggcttgacaccctagaaatcagagatttagataagatagtgttgaggcacaattatacaaagataaattaataaatacttaccttagatactttcttaaaaatttgagctgcatttgtacattcactgtaaggatactcaagagtgaacatctccaacatacacattccaaatgagtatatatcaacaagttcatcataattctcatcatatagctcaggcgccatgaattcaggagtacctgcagaaagtggacccatatcacagggatgtatcaggagaatgcagaatgttttctgtggattaatttggcacctgctaacatgcttagatgagaaaaacaggtgactctcacagttttgtattgtggacctatttacattagtttatgtttttaagtgacatggttggtgcatcgaactcaattcagacatagctgaatattgtaaaaggaatgtaaaatatgaaatgagcagcataggatcaacatgtaagatgtaactataagaatattgtttaaagggttataaatgtggtataagcaagtcaattttgagttaatggaatattgaaaccccaagtatatcggtcacaatacttgtgtgtgtaacacatcagatataaatgttgacaagtcagatcagtaatggctaattagctatagaagtggttgacattgcccatggattatgcatttagttgcacactcaaaatcgtcatttagtctgtctctccaaatcagaggacaataattcagaaataacattggaatcacaaagtagcagaaggttattaccaataacactttttgctctaggcgttagcatcaccgtggctaatccaagatctccaatcttaacttctccatgattcccattgacaaaaatgttgtcacacttcaggtctctgtggataattggaggttggtgggtgtgcaggtaatccagcccacggagtacctgtctagcccaattctttattgccttcaagtcaacacgtggatgtttctgacgatacctataagcaaaaggtaatggtgtcattccacaagaaacatggtagtattaagaaggcaagactattacttagttgctacttactgcctgagacttccagatgtgaaaagttctgtaataacattaattgtcttcttttgatcatcaacccaataattatagaacttcattacgttttcatgcttgagagactttagtagatgaacttcagagtatagccgttcaagattatctggagattgcataacctcatctatctccacttggctccatgcaacctcaatgccttcaacctcatcaaatgccttgtaactatatccgaattaagcatggatgcaaatagttacaaacagcccgatgtaaacaagagcacagacagaaaatgagcaaggtagcattaatacatttgcagctattgccattagaaatgtataccctggatcccattcgatgtttgttctgtaacagtgttgaccgtactagacaccagcaggcagcaaattaaagagattaacctccacgtaaaccattaaacctaaatcccacagcaattagtaggcctaaaagttgaaacagataaaactccttaggtggtcgttagtttgttgcttaggccctgtttctttcagcttaagattattataatctagattattgagtcagattactataagctagattgttataatctgtagtagaataagcggttagttgtttctttcctagattattaaagcctagattattgggtttgcaagtctaaagagggagtgggatggcatggtgggtaatttttcacccaataatctggaaaaagctcacataaatgagcttatcagattataataagctggactccagattataataagctatttcaataagttgtctgtttcttttagcttactcccaataatctggattataacccaagctgaaagaaacagggccttagtatttcttacctcttaggacgatatttggcatagatatataggtgctaaaaggctgccaagacatgagacgattgctagaatactagtagtccttaagttgaaagtttggaacctgaaattctctaatttgaacgctgtttactaccctgcttggcttcttgtgttagccgaaacatagttgcatatatggttaatgcagcattttttcctagattttgaaaatgtgacaacccattgcaatataaatatatctctttgacaaagaagcacaaaaacaaagaagagattccaaggacatacacagtcttcatagctcctctccctagcacctcattgtactgcaccagggaaaaagttcagatgaatacagcaggcagagttcaggagtggcacatttgtggataattttgacaaaattgcatgcagtttttttttccttttggtaatcgtttgagcaaatttccagcattttagtaatgcatttcaaacatattaaattctatgagcaagcaaaatttagataagcctttctgtaccagtaaactagaagcctgaaaattttaatgcaggtatccgttcatcacaaacttaaatagactagcatgggcatgtcaaatcacgttcacatcagatcaactaaaatggaagaggttcctatcagaaaataaatgagaaaaaaacttacgcgtatgtaccgcctggtcggatccacctccacgcactcagcatcgtccaccttatccagatcgccgaacacctccatttcagatcaccccacgcgcacgaacgaatcaggaagcagagaggaagcagagcgagatgagccaggcgagatcgccgggacagcgcgtggagcggcgcgggcgcccgctacgcacggcggtcagcagctagagccggcgaccgatgcagcggaggagagacggcgcggggcggccagttaattatataggatcgccgggcgttcggtgaagggctcggagaacggggccggcgacggcagctcgcggcggcggcggctgctgcggagcgacgtcgccttcaccccacccgcaactcccatggcccggcacccggcggacgccacgcggctggcgcagcacctcattcttctcccccggtcggtctcctcccttcgtcgtcggcggcgcgggcggatcccatggagggctacgcgaacggggacgcgggggcggcggccatggaggagaggcggaggcaagggctagggttaagaattcagcggcgcgccggtgtacggaatccggggaggaggcgaggagaattaaaaggggaaaggtaggtggtggtggggagcaaaaggtgggagagaaatagtaaaggcctggacctttattacggttcgggagcagcagctgcatctgtgaactgggatgacgctcatattactccgtcacacaatgttagcattttttatatggaaacggtatttaaaaaacaggtaaaatgattggaaaaatattataattggttggagaaaaaaatagataaaaaattaaatagaaaatgattgtgattggttgagagaaaatgttagatagagaaatagcaacattttagaataagatattgtgttaaagttaataacattttgaaatagaggtagtactcccttcataaaaaaattgtactccatctcatattagatttatttttttatgcaatgcaggaagtacgagcgattttggattgataccaaaatgtgtcctaccaatttattggtatcttgaatagtaatagtatggatttggattgaagccaaattattgataatgccaatgatcaatttgtcactaatctagaaccttcttctttatatcatcaatatttgacatcatattggtagtaatccaaacatgtataataaatttctatcctaccaaaaaaattggtagtaccaaaacatgtcaagaatttggtattaccaatgatttggtaaggtagagaacaaaacaacccctacatggtacgcaaactcatatatactgataaacggtgatacagttaatacgcatgagcgaaaatccatttttaccaggcttgccgttctttttttttcagttgagaataggatgaaaatttctggattattgtgaaaaatcaaaatgactgccaaatacaaagtgaatacttattcattggttgggtctagataagttcaaccgaaaaagtttgatgccaaattattcctcatgagaatctattaactttcggcctcttgcttttttaaggagattcggagagagaggaaggatgcttacagcctagattaggcattctatacattctttttttttagaccatattatctacgtgtacaacatgttacttgtcatataaacgtgaaaatacatacaagaatgcttgtgctaggcgtcgaaaccatcaagaaaaattaggcaggagcaaaacatccacccgcccacaagccaatcccttttctgtctctttttcccatttccttctccttccccttttacctctccttgagctagtggtggttgtcgatctggttgacaagggaaaacgagcatccgttgttggtaacttgggacatggcgaccacatgtttcctcaaggcgtcagtattgttgaagttgtgtccatcagggaggtgacaatgaattcgagataggtgaagaggatatgtgaacatattgccggccaaagttataggctgatagcacatcccatccagttcatctccacaagcgatggctacatttggtcctccatgttgtgcattttctaagtgcagtttcccatgaagccatagagtgcttggagttggaggtgccaaggtagactgtaacaccctgaaaattcaagacaataaaaatcactaaaattttaaactttttaaaatttttacatcatgctggatgttatggttgcttttgcttgccaaactataaattgtcataatggaaaattaaactaaagttatacaactaagtaataattataataataagatatttattatgaaccctataaatatttacgtacaagaaaacaaagccagaaaaagggaaggttaattactaatttaatttatgaatcaaatattaaatacttgaaccatgtgatgcgtgccatgaaatataaacacttaggaaatgataatcgttcaaataaatggaactctatctatagaatagttttactgggaaaaattaattagatattatataatttgaattgaatcataaatgctaaattatagaaatccatgtggtggtaaaaccaatccaagaagataaaccaatatgcgtgaaaacagataaataccaaaatcccaaatataggaaattatagaatctttaataaaccttaaatattggacaatattaaattttgggcaaattcacattgaacacttaatacggtcacccaaatgcttaggagtaaatacaaaattaatttgcaacttttctcaatttatatatcaaccagagccgtaaaagtaagaaaataggaaaactaaggaaaatatataataataataaggatatgttcaatattaaatttgaatataaatttcgatggaataacttagattttgtgtgaaacacattgttaggtggcaatagtccattttctaaattagaaaaacatctaataaaatccaaataaatcaactagcactgttcattgccccctaggtgctcgaccctgtcccatcaccgccctccccctgcccgcgccgcgcctagccctgccctgccctgcctgtcgcgcctagccctgccgcgccgctgccttgtgccccgcgccgccgcacgatatcgtgtcgccgtcgccgtcgctcagacgtgccgtgcgccgttgcttcgctctgcgcgcgccactgccgcgccccctcgcgtcccatcgtgccgcgcgccgtcgccgtctccggtcgtgtcgcctcgagccccacccctccgctcgtcacgtcgccatcgccatcacgtcgtcatcatcaccgcgccgcgtgccgtcgccatcgccgtcccgtcgactccactgccgcgccgcgcgccgtcctgtcgccgcaccgcgctctatcgcgacgccgtcgcccttgagccccgcgccgctgctgcgccatcgcgtcaccgccgtcgccatcaccacctcgagccccgcccgcgccgcgcactgtcgccgtcgcgctcgccatcccaacgccgcgccgcgccgtcccgtcactgcgtgtcgccatcgccccgagccccgcgccgccgtgccatcccgtcgacgtttaaagccggccacccctcccccgagccctataaataccccctcctttcccttccctccccacgccattcccccctcttctcccctttttcctctttcttcccctccaccgacgccgcattccgccgccgctgccatgccccggcgtctcgccgccgccgcgccgcaccccgccgccgttgccgccggtccgataagccctcccgcctcccttcatcgccggtagccgcgccgcgccgctcggccgtgagagagagagaggagaaaacagagaaagcagagagagagaaaatagaatagagaagagaggttagagtgggcccccacgtgattagtaaatagtaatccccttaatctttattagttaagtctattacatgtaggtccgggtggttaaaaatctagttatggagagtttatagtttcgagtctatgacaagcgggccctactaggtttaatggccggtttgaccctagtcaaaggagtcgggcccacctgtcatttgcccatatggattcctttagaaagaaaagtaaaataaaagaaaagaaaataggaagaccccacctgtcagtcactatagcttgtggataaggttgtattataaataaatgaattaggaacagtaccatttcgcaattattagaattaattcaaatttgaatctttacactagcataacttattcattttagctccgatttgagtgaaacttgaacctaaattcatctaaattcataagctttccaatggtatataattcactatttgataaaatatatttataattattaaataattaatatcaagatgatgcataataattaacttaaaaatgtgctaataaataaaattgatattgtactgtgaagtagatgtcaaataattgtctttaacacgctttctcactataaaacctatgtaaactaattaggagcattgtttcaaattaattaaagcataggaaatactagtgccatttattaatatatgtcaatatataattatactcatgacgtccaaattgtataaataatgtttagcctcatactttgtgactaaaagttgaacacacgtagatgagtctttaacttgtttatgagagataataacagagctagtgtgactaaaatcacccgcacgaaattaattaacggcatttcctatacagtagtatatgtttaggttggaaat

SEQ ID NO: 8725 - DNA, 9798 bp, Oryza sativa
cgacgatggtccctatggcggcgatggttaagggccatcatccggctgacggtgcgtcggcggcgccgccggtatgtggaggcggggaaggggtctggcggcggggaaggaggagtccgggtgcgggagccccgtcgacgccgggaacaactgtgggcggtggccttggccgaatcgctgaagggacaatgttgttgaccgacgacgatccttcttgtgcggattggtggtgtgggtttggacagggaatcgcgggcgaaagccttgccgagccatttggctggctgacaaccgcaacgccgtttggcgtcattcccctccttggaggcgttgttttagcatacccctttcctttccctaccatattctccaggtgaaaaccttgcttcggttccgaacgagcggtggcggcgatccacgtcgcatcctccttgggggcaccgctttggagaaacctcttcgtgcaaggatattgtcattggtctatgcattggcttcgaacttcagtcctaggccttgacgaggccttctagctccacattttgttttgcttttctcagtttgggtcctctcttctcttgtttggtgtgttcaacttgtcttgaactacactctcttctggagtggatctttgtaataattggttgtagttctttttgagcaaaggccgggatattatattccattatctaaaaaaaaacttgttgtacaattgcatgcgaacaaccatcccaatgacatattcaacaccagcgctagtgtaatacatgagataaattaaataaaacaacatttacaaagcaaatatatgaaaaagaaccttaccaatgctttggatgattgtggcatttccaaatcatttatgacgtagaaagcaagaagtgcctgaccaaatacagaaacgttatagttgatgtgtcctctagctattagttcaaagcataaacaagagcattgtagtttaaacctagtgaaaaaggtaatacgtcaatatacacaaatactgcacaaataatcaaacaaaattcccattatccagtaaacatattagaaacagaaaaatgctaatgcatcgtgagaatgtgcttctatagtatgtctcaaaattagtatgttagtagagaatttcacagaaaaaagaatctaggaaaaaaagaaatatataaagttcatatataatatccaccaccatatttaagcatgaactagtcaatatttcatcccaaaacatacaaagtttttgctgcataataacctatgcgtgaatttggaattacatgcaaaagaatttactatgttccaccatgccatggtccatggaacacagttaacaaggtaaactattttggagtacaatacattaatctctacgagatatcctttgtcatacagaataaccatatgcagggacgaagccaggatttgagattaggggggtgtggggtgaagataaaccatgagaccgaataactagtcctttaagaatagtcaccgtcaataacaagcaatgcgtaaactagtcctttaagaaaaacttaaattttagctctttaataatatcattggaaatttaaaactagtctttattgctaaattcttttaatataaactattaaataatctcacaaataagtatcatctattttactttgaaaaatatgagaaatcacaaactaattttgtagatcatgtctcttgctaacatttttagacttgctaactaattaaattgataatactttcaagctacacaaaataaattagataaatacttatcttagctaacttaatatagagtaaaatacatgagggtgtagtggtggtagtgtttggataggggggtgttggcaccctttggcaccccccttaccttcgccactgaccatatgcttgaaaataaacaagtgatacaaggccattatatacatggaactaaaaatgcattatatttttatcaaaggaaagaagatttcagtcccataagaaaaataggaaaagattatagatacctgtgaaacattggtaaccaatctagtaaacatgtatactagagcaacttggtagtacaatactttcttgaaccagtgggtccatgaaatcctggaaagtctcttattctggcaatgctgatttaacctaaaaaattaaaagtcattcaaatactgcaaaaatgaggaaaacctagtggaagaaaaaccatcaaaattatatggcctttaaactatgaactccacaagtgttttttatcttaccctggctcttccgttccaatcaagaacacaacgacgaaacaagatccaagggcaatggacacatatgctatccatcgatactgaaataggattccaaaatttaagataaatccaaaagatcaggcaaatagtaaaatattatcttaaaacaagagagtacctgaactatcacgctcactgactgacgtagactaaatatcaacaaagcaatgccatacaggctaagatttgcgatctagcacgagcacagaaaaggatcatcagattcagctcttttgtaatacctgagttaagaataattagattaaattaatgttctaaccattgtgaaggcattacggcagcttactaatgcaacccgacttgttgggtttgatgtcatgcagttcaccattgaccttagaaaatacgcagatgatgtacacaagtcaaatgcaggaatcacaagaaaagaaaatggagataaacaatgaaaggaagaggcattacatatgagagacctgagtaactgcccagccaacattgaaaatagcagcgaatgtgctatatccaacagtctccattgtagatgaaatagttcccgtaagtttgcaaggcaaacagctaccaaaaacagatgagaaggaaattgctactaaaatggatcctcctgcatgccacagtttaaaatgtccaaagcgatcaatctggataaaaaaaaaagaagatagaatttacatatctagtttggaactatacacaataaacacaggaaaactagtagcgaacgtctaagagaagataagccatgagaatatgatgtcacagctttataacaatgctttagtaaacaatcatgttctttcttaggtcgtaccagttctccaacgaagattgttgcgaagccatctgccaattgaccagaaagcatgacaacagcagcatcactgaaaaggtgaataaaaggtaaaatgtctaaaagaatcctgaagcagcacgtaatcctttcaaacttccaatgtttctcgtagaaaatttctttcagcatctctgatagaacatttctcgagatacgaatacaagtataatgttctgatgatctggtccaacaattccatactgtatgcagtctctacggcatgtctttgatcataaatgagccaataatttccaaaaaaaaaaaagtcaaagttgctaactttgctatagccgcaacagttgcttggacatcatgaagttgtggctagtcttaactcttaagtggcacaataccaataatgatgcaaaaaattcatccgaaaaaagatgaccaatcgttacattcatttgcaggatatcccggtgaaatatctattgcaccacatttaggacatcctgactttaaatatgaacctatgtttttgtacaattcctcatcaagcagagtggattaagtgtttgaaaacaactaaaaaaagtgcactaatggcttcattcaatatgatttagaaatatgtgtaaataacatgatacaaaaattaacagaacaaatggacaacaaaatctatccctcaaaggcacataccttggactaagcccaatatctgtcaagaaaaccagcaaataagtaaaccaacatgaagaagtgatgtcatttagcatatgcccagaaccatatgaaagtattggaactctccctaatggttcatccagttcttcaatcgatgactgattatccattatcttaaccatattttatgtttgccagactaaaggtatcacctacacaaaaaaggaatacatgttgatttcagtatgtaactagcaatctcaatcccaactttgaataaacaaaacaataataaaatgccattttgccaaaagttaaaagttttgaaaaataaaaaatgcctacggtcctgcacactattttagaggcttgaaaatgaagttgcttagcttacaacgagtgtaataagtcaaaccgacagactttttattcagaaacatcaactgaagttatataagaagatagttggtacgtcatgactggcagcataacagttgcttttgtagtgcttataacaaggcttcaagctatgtcagatggatttgagttttattccttaactagaaaaaatgtctgtgcgttgcaacgggtgaaaactattttaatcatgagctgcaattaggagtctgatcgtatcaagttagcatgcgagttttttaaagagatatctatacggctccttctgtatttacaaaagcgaacgaacttaaaaaccgactcatacacggatgatgtaccaaagtaccggcaaaaacatcttcaatttttataatagtagagatgtatgactggtttttactgactgctgtaaaacacattacatggaccatcttaaagcagcaattgatatgactactgtacttgctaacttccaggaaaaaagttcaagttgtattagttcttacatatatgagaatcatgaaatgaatcaaatgccaatctaaaggggggcacaagaagataaggagataaactgaaggttccttttgttgttgtaaagttttttaaaaaaaaaaaacagcaagcaaatttcaatcgcaatggtaatagatcagcaccttcagaaggttgggatgatatggatatgatcaagaatccccaaaggcattattgtagcatatataccagttgactaaaaagttcagatttgaggtaaaagcaactactctgcacacaacatcaacagccacccaaatcaacgtgttatcgctgggtcccaactcgaatcatcaacgaggagtatcgcaagtgcccgaaagctaaagataaaaatgcaatggcctacaaaagaaatattcgcatttccactaactttacgagacatcaacctgatccccctttcctctctgcctttccttccaaaaattgatcctaatcgaacacaacgcaggagcccacacatactctctgcctgctccccccacccaacgtagcaactgacattcgaaccgtaaccaaacaaagttaaaatttaccaaatgaagaaaacccaattttcgcggagccccatgcccgtcggaactccctccaaactctgctacacccaccccaaaacaacacagagcagcacttccatggctggccccaactccatggcgagcaacctctgtgccttaagcccgcaacagactctacccatccaataaccccggaacaatccagtcaaacagatgccgcacatgctcacctcgctgctgctgctacggcgaggaaccggagcgaaacacctccctccgcaagagcaggacgtacggggaagggcaaggcggaggaagaacgaaggcgacgctcggtggtgtcgcgtggacggcagcaggaggaggagaggagaggaggaggagtgggcagggagcgagccgtgcgggaggaggagacgcaacgcaaacacggaggaggaggaggagagaggaggaaccgagggaaatggaaggagactgggcgagcgaaaggcgtggctgacgcgggcccccaccaccgatcccatggaatggagtctggactttggagagacgagagcgacggagatttgatttattctaatccttctgtttagtttattagtggcgtcgcgcgcgcgtcaattcctccgttttcgtggccgccgccaacacgcgggacggcgggacggggacgttttgctctcggctcgtgttctcctctgctccctccatcccacgaaaaaatccatttctaacattccaaaatagaattagtagagaataagactaactaaaatatttttaattattaaaaaacataataagactaatatgtagataaatggtattgaagtaaaaaccttctcgttttacgttgatgatagataagatagtagaagttggtttttctaaaataaaatttaaactctataagttgagtttttttacgatggaggaagtaaagctgaagaggtggccgtgaccgtgagttgccttgattaaaaaaaagtctatctatacggctattagtatgcgtctcgagtaattagtactccataaactaagtcatggctgcgtctcgatggtgttttcttccgaataattttgtgtggtgatcatgttttcttctgtctgcaagaacatggggtgggatgggagaaacgtaacgtacgtagtgacctgtagggcttgctttgtcaacaagtgagttgttagtcttgtcctattcttaaacaatgaattttcacaagtgcaaagcacatgaattttcttaggacatgtacaatggaagacacccatagagtaccctcactaactgaaggcactcacgtgtaggggtgggcagatttagaccgaaccgaagaatcgaaccgaaaaaaccgagaccgagaaattcggttagttgttcggtcccagccatcaaaagactaaatttatttcggtcattttggttattaggctcggttaaccgaattgaccgaaattttggctcaatagatctaggaagcacgataaatataaatatatatatatatatatttgtgtgtgtgtgtgtgaaaaaatgtctcaaaagaggggaagtgctgttaaaattttcattccaaacttactcctgaaaaatttcagtcggaccaagaccgagaccgaaaagactgaaattgaatttgccagccctgtgtttttttaggatgaaattcagtcctaagttttcaaatactgaaatgaccgaaagaccataaaccaagactgaatttttcagtctaaccgaacgtccaccccctgctcacgtggacactcgtctcccaattaaggccacaactaagtgggttcttcaaaacccgaaacaactggatcaaggtactctatcccacagtagatatcccaatcaaaaagccacggatattaatttcctctcctacccctgccggcaacacgtctctctgctccctctcgttcttttcgctgctctctccatccctcaacttgctctctgctctctccctctctctcaacaaagcagacggcaagccgtgcggatcgccgtagcggatggccccgccccaccctgccgtcggcattgaagcggcggcatcgacggcgcgttggtctcggatagtattgtagcgtattgccataggttaagagtaatattttactaaatccttttagaaagcggcttttacacgaaacctacatgtgacagtagatttctggacagtgtgagacactgacgcaaatcattgattcaaatatttgctgcacaaatttgatagataacgggtgtaatatttcgttatttcactatcattgcaaaagaatgaaagtgctcacataatacttgattgattctagggataaaatggttttctgaaagacttaactaaggtccatggataagaacattgatatcttgtagaacttgcgtttaaacttattttcatctatgagacaaatatttgcattaccacatgcacaccttcgcacacgccggacgccctgcctgctctaacatctctaaccttctcaaaattgagcacatcagcacacacacccatatccccccaaaaaagaaaattacaaagacccatattcactggaactccctccaaaggtcaaactctacagcctctgctcaagtcacccttaataccgacccatgcactatccatgctaagcaatccaacagccattagacatttaattgattattaattatcacaaacttgaaaaatgactttatttgtctatttagaaaactctgtataaaacattacatcgtttgataattcaaaaagcgtgttaatgagaaatgcccaggggtcttctggctagctccacaaggtggtgggctagacgacctgggttcaaagcctcacccctcctaattatttgatattaggtccttccctaatattctagtttttcaaaaagcgtgttaatagaaaatgaaaaaaatgccacccctaaactcactatcgaaggggtggattctcccaaaatctccatgccccctaaacaatccatattcttagattttgtagttatagaatatagaaaataaattcttacacagtcataattcttaaaattttaagcttccctaatatagccttagtaatatgtatagaatcacggatttctaattgaaacaaaacacatccgtagagccgtaaagtagggcagggaagagcaaggtcgaaggtggaaggcacggcaggaggagaggaggtagaagacacgcatagtagtaggacatggattttcattcctccacgacatgatatttcctcgttgtttacctatcatttaaatagtcataaaattttttaaaaaacttaacaatatagattaatacgaaatatagcaccccacaaacacaagaccaaattcgacttctacatgttgtaacaaacagaacaaattaaactgaaaatagctatatatcgtacattcgcatatatatttattattattttacaactagtagaagttaaattttaacttatatgtttgtggagtgatatactttatattaatctatcttaccaaattgtttcaatttttttttgataattatttaagtgaaattactttcccatagtagcaaagcaaagcggaggaggaaacggaggaaacagggggctagcgcgcgcgaaaggcgtggctgatgcgggtcctcccgtcttgggtcaggtgtggatggagattttgtttattggtggagtagtggcgtcgcgcgtcagctcgatcggcaggctcgtccggtcgtcccttcgtggccaccaacacacgctgccgggacggcaggcaggacggggacgttccttccaattccttcgcttgtcttttagccgggagaggtagcggggaagtgttcgctacgagtatgcgtgctcggtgtgtacggcgttcaaatggtctatccaacgtatggttgtaccgtgtttagttctaaataattctttaaacttctaactttttcatcacatcaaaattttcctatacacataaacttttaactttttcatcacatcattttaattttaaccaaacttttaattttaatgtgaactaaacgcacgcttgatcgtccgcaagaattgaggaatacgggtggagtatgtgagaaaaggtagcagtgtgtagagcttgcttcgtcaacgagtgcttgtctacttggccactgtttgttgtcactatccatcgaggatgtcttttaacaaatacacagatactttcttacgcctagttaggagagtttagccatggtagtagtttcatattagaatctttagctcccaaacagcgtgtattctcactcactcaaattataagaatatatagttacatagtctaaaaagtaaactgaaatcagctactcacagaattttaaacaccccccccacccccaaaaaaaaacacccaacaggaccttacttattagtagctgaagatactagactattagtacattgatgcaaggttattatattcctacaacaaaatgaaagtgttgtgtttactcggatgggagaaaagagaagaaatataaaggaggatgagaattgttgttgaggag

SEQ ID NO: 8726 - DNA, 8176 bp, Oryza sativa
aaccttgtttaaattctaaagactgatacattgcacatactccgaccggacgagacgcactgtttcacccgtgtcgtttgagaagcactcacttagttgtttttagaaaagagctcaaataaaatcaattgcaaaaacaacagcctttctttgaagcctgcattaaacacttacttcccttggcttgctgagtactcccgtactcacccttgctctatataaataatccccccagttgctgaagaagatgaagcggatcctgctgatgaggagttcttccaggagcaagccggctatgatgagttttagggtttcggcctagttcccaagtcgcgcctgtgttgattagtccaagtcctggcttccgctttccttttgtaatgcagttgtgagctcgggatctgtccgcagcccaacatgactgtacatctactctataataaagagacctctgttgctgtgatattctgtctctctgtgataccagcactgtttcctgggactggtatcgattaacaggttaatttggagcgtcacgggctagttccggtcgggactagttcggggcgtgacagcccaggactttgtcctttcttcctcctcctccttctacccgacccctcctcatcccatctcatctcttctcttctccaactcgaaaaaactcctcctctctcctctcccaaaccctagccacctccctccaccaaatccatccggttcaaccgtcaaaatcactccggttacaccgtaagtgaatctcctcctcttcctctctctattccatggattgatttgagttcttattgagtttgtgatccatggcatggaaccctaggtgaaggaagaggtgttcgtcgatttgcaccaatagagggtagtttcttggtgtgattcaactccttcaaccggtaaatccctctccctcttgtgcattgctctcaaatcggtctatttcaatctttagggttaagggtagtttccccattgcttcaatagaccttgatgttctagttccaatcttgtgcaacactgttctagcagtttttagaatcatttgtgtggattgtggaaggatttgggtgtgctcgcgtgagtggcggtctgaccggacgcggtctgactggccgtgagccgtcggtctgaccggccgagggccggcggtctgaccggccttgagccgtcggtctgaccggctgtggctctcggtctgaccgcccctgacaggcagcactcgcccttcctcccacttcactatgtggtttctaaaattgttgctcatccatcctttgctccttgtttttcagctatgcctccccacactcggcatggtcgtcgtgagcccacgcccgatcccgttagtaagaatgaggaatcgagcggagatgagtatgttcaaagtgatgaggacaatatggaaaatgttgagggtaatgagttggatgtaagtgatgatggtgatgacaatgggagtggcaatagtgaagatgatgaggcaagtgatgatgggagtcctctcgattccaccatccaatttgtgctaaatttgaggaatgctcaacaatacactatcctccatcatcatgatcaattccggaggcctaacgattgtaatgatccaagatttcatacacggttccaaaagtccgtgtatgaacaagtgtatgccaacaaagccttcgccgaacacaagtggatttcttggaggcacattggtgagacaccggagtttgagaatttgcaagagatgttccggaccgttgggattgataggattgtcaccatgaagcaaccttttgatgaagatctcatccggcaattctatgccactgtatgggtgtccggcgattgtgatgcaatgaagtggatgtcggggaccctccgatgctctatcaaccgccgtgaattcaaggagctcttgcacattcgcttcaataacggggatgaccttcatgatgagcacacccacaaccccttccccattgatcacttttctcagttttatgaagaagggggagggtacacatatggaaaggtggcgggtttgagggctctcccaagtgtgatcaaccgcagagtaagggccaccatcctcccaagatgcggcaacaatgatgacatacgcggagttgcttggcatgttattgatgccattatggatggtcgtcggtttgatgttatcaaccttatgatgaaggagattgccatctcaaaggggactattggacaaggaatctattatgctccctacataatgaggttgattcaaagcaagttgggacaaattggtcacaatttaaaagaacataaggagtacaagcctcgtctccaactgtcctcccctagagctcctcgtgtgcgccaaccaacttttgatcaaggtgcaagctcaagtgcagccccccctcctcctcaagggtatgatccaagtactttattccatccacaatatgcctactttggaatgcaaccaaatgacttcttcaacccggtccttggggctattaataccctaagtgaaagcattcaacacttatccaccgggcatgaaacattgcatgaggatgttcgtggcttgcgcaccgatgttggctacttgaatacttcggtggaaagattgcatactagggtgggtgtattggattctcgcgtccaaaccttggagagtacccaagcttttgtctatcattgtcgccgtgatgcttcttatccttccacttcggcgcgtcctccttctcctccacaagagtgaagacctttttagagcttgatgccaaaagggggagaatagtgtgttttatgttttgtgggttgggactagtagtagtgaggttagtcacctcatatttaataggttaaggaggattgggctatatttggtatgggtatgggctattactctatattgtgtattcctttttcgttttgttgttctctatatcatttggacccttcgtggtcttgtaatagcctatatttatttgtgagccctttatgtggtcttaatgtgaacttgtgctatgatggatggttggtgtgacattgatatatttgtgaccatcttatgctcatgaatgaatatttcttgaagttcacattgagatattgctcttgtgtttgtgatatgttgaaatgtgaaattgaattgtgcattaactccatatttgctatttgtgattgttatgcatatgtttagggggagcttttgcttgtcaatacaatatatgtccatgtgctctatgtttgattatatatatttgtggtgtttgtcatcaattaccaaaaagggggagattgaagcatctagacccctggtgttaattttggtaattaatgataagcactaattgtggactaaccgttgtctttgagctatatattttaagttaggtccacgtcatatgtgcgcatggatgattatcgatggattaaaattgacggcgcaaagcaaagggaaagaagacggtaaaactagcgctttaatttagaattgatcgaggtgtagggcgatcaaatttgctagattaattttagtttcgccgtactattaagaggggtaatgacctagcaaagagatgattttaattgccacattaggtcattgcatttttatttgtgctctctttttcattacacaaattcactgggttcggcctgaccaggggcggtcagaccggccacatagtggcggtctgaccggtgtgccctggccggtcagaccggctacatagtggcggtctgactggcggcactttctcggtcagaccggcctcctggaggccgagacgatgctgctcgggatggccgatacagagccgacggagccgtagtcgatcagaccgagccgatgacggtctgaccgagccgaggccggtctgaccgagccgaggccggtctgaccggccaccccatgtcggtctgaccggccagggcgatggggccctctgacagggctacaacggctagttttctagccgttgcagagtagcacggtctgaccggccacatacctccggtcagaccggcagagcacagagttgggggatttcgcccccaacggctagttttggtgggtgggagtataaatactcccccaccagcagcaagggggctctcttggcacccaattcaattgcatacaccccttgcacctctctcacactcacttgagctttgtgttcatccatctagtgttagagggttgattagccaagagtcaagtgcatttgcttccattgtagagctagtgtggcacttgatcatctccacgtcgggtcattgcttgttactcttggaggttgccgcctcctagacggcttgtggagaagttgcccggtgacctctccgagaagattgtggaggaggcccggtgccggtttgtgagtggtttggagttcaccaccttcggagtgaaggaagaactaccctagtgatcaaggcttgggtagttctctccgtgggccggctcccgccttgcccaccccttgacgaagggggcgtgcggaggcttcgtggttgagcggtggagttgggctcgcctcaacggggagtaggaaaccggcgagtttccgaacctcggtgaaaaatctcttgtctccttgtctcatttgtttgtcgcatttacttttgtgcaatttacttttctagagacaaacttgagatcatatcaccctaggattgctaaacattgacataggagtgtgatttactttcctagagatataattgagcctctatcaccctaggtttgcaaaacataacttagttgcttagttagagttgaccctcaccaagcctagcaacttaggttagttttgattaggtgtcatttagttttaaatcgcctattcaccccccctctagtcgacatctcgatcttacacaccgccgcatcctcccagcgctttgccattgatgcagagccgcggagctcgagggggcggcagactcgtcagcatagcccacctcctccaacacccttgtcggcgccacccgtccccgcacgccgccgcccacacccatccccacgcaccgctgtcttccgcgtgtctctacgcactaccgcccatcgcccgcgcgccggcgtcttccgtgtgtccccgcgcgctgccgcccacgcccgttcccatgcgccgcgagacctcagtagccaaccccgtcgtgttcttgactgcttccctcaccgggaagaatgaatggagggagagagagaggaagagaaagagaaagagaaagataaaggaggggcaatttggtaagccatgtaaaaaagtgggcccctctcgcttagtcagcacaaaaatattaatttaatggatagagtgtcccctggcaaataaccacattttgagagtgtcttccctcaaaagtgacttcatgcagtgtcctacagctaaaaccacgaagtcgcgatgtcctgtagcaaaatttgccttagtgccatggtccaacatgacaacgctaatgacgttggcgctgtcccctctgcccctccgctagaagctaagttaccaatgaacaagaatggtgttgaggattacaatattatgctataaatttgatcaaacttaaaaaaaagttaagagaaaaattaaatgacttatactataaaataagggagtataagctaacagttatataagaaatccaaaataaactcgtacatataatgataccttcagacttgtatatataccacgtaactgcgccaccatatattatcaaatttgtcatctactagaaaagatgcccgtgcattgcaatgggtagagccaatttaatttgtacatatgtgtagtggataaataatcacgcccattatttcgtttattcatgtgcctatccaaattacttgttaccaaataaaagactatttatgtgcaaatctcttatatacatgttattagcgacgcaaagtaaatgctgtaaaataaagtatgataaaaaaagtcattccgccaagaagaaattactaccgggttcgttttttcattatagaatcggaaccaaaatgtcgaaatcaaaattaatttctaaaatttaaaatttggcttagaaataagcataagccaaacaatgaggccttcaaacacgagcttgatttgtcgttaacctttatctcaagtcgggcaggaattgatgacaaacggaatcaacaattcgatcgtcctttattttgattagcatgttcttttcgaaagttgttgacgaaaaacacgaggcctgggagatctgcttaattccaatgcaggtccaaaactcgcattcgggtatgctagcgtgctagttgatttgatcctgtaatcaacaagaaataaagacaaagaaaccgtggttaaatcataaacgatagccgatcggctaggtgctgatgacatatcatttatctttgagccgatgtcatatatgcatcgataggcaagcattaataaataaaacagaactaaatctactcgatcggctgtagatattaacgatatataatccttatatcgatatatacttaaatcaagtaattgggatagatcggtcgccatgctgagacaatataaatcacttagatcgaaatatatattaataatgagattatatatgttcatagcatagccgatcaaatagatctagcatgtatcggctaatactccgatactgctctatactaagatatcaaagcaaatagaatatatcaaacaaaagcctaatatacttaaatgcaacaagatcttaacataaagagcggattcaacatatcaatgaagcatataaaacaaatatagttaaaccaggtaagatcggctgaaaccccgatactaccctaatcggcaaccaagaagcaagctagagattgagactctaatcacaactcataagatcaaaatcaaccgatgcagctataagtatgaaaagaagaacaatatctagacaattaagccattggaagtttcatagagtggtggatatcatatataatctaagccaatattgatatttaacctaatcggctgccctctattaatagacgttagccgattgtagattagatagcgatattgtcagagattatataagatatatgatagctcgatgaattacataaacaagattagagtatcataaagatggaagcactaatcccgagaacgcaagccgtcataacaagttttacctcttgttgaagatcgaaaccgatgcagctcaacctaaaagcaagaactcgtcgaaataaaactaaagcaaaaagggtggcgatgcgccgagattgtattgaacgtgtgttaaattgattacatagggctcggggtttatttatacccgagaattatacaacatatccatatcggagacgactcttatccctaacaaactctaagataccataagtctttacggcagacttttgtccaaacatatctctaaggaaattacataaaatattctaattaatagatacaattgtcttctcaggactctattcgtgcatggcaatcatcttgaagcatatcaactcaacccgatgtcgtacaccaagtcatattgtcggaatcggctgtattacccaacccagtctgacttggatttagccgatcccgatcgtaaccgatttggaccccagccgattcttactctgtttccgcgacgatcttcatctttgattccgcttcgatctagtcttcttctccgatactgatattaccaaatttggtcattaacaaaagtataactgattcttatggattaatgtaactaggggtgaaaacggtaccgaaactttccggattccgggcctgttttcggaaacggaatcagccggtcagaattttttcggaatttcttagaaacagaattgaatatgatattagcagtttacgttggaactcggaataggtcgtaaaaattctagaatatttatcggaatttccgaagttaaaaaggcccatagaatcaatagtctataagtgtccccaagttcctagcccaacccaaaatcgcggcatctacccaaattggagcagctaaccctagagaggagagagatacacatgggacacggcatcgccatcgcgagaccgcgagccggcggcggagcagtgcatccagatcggggcatcgcgctccgcccaccgcccgcgcccacctcccacgcccatcggctcttcggctacttgcgacctcgccc

SEQ ID NO: 8727 - DNA, 8095 bp, Oryza sativa
tattaacatctatatgaatgtgagcaatgctagaaagtcttataacctgaaacgaaggtagtagctctcactggagttggagtttagagttaggagttagagtttgaagtttggagccctaccaaatagggccataatttcacgtcatatcaaatataatttcgcatatcaaatacacaagctgcgtggtgactaaggtgctaagggcagcaggcccatttgggtcaggtggagaccggctgaggagctgttccagacttgcagttgggggctgggcagatggcccagccggcccagtgaggagacgtgcaaagctggcccatctataagctagcacgtgcgcgaggaaaattggatatgaatttttgcgcgaggacgataagaaaatcggagatatccttttttttttttaatctcggacgaatatttttttacggacgaaaatttctagccatctaggtcaagccgtcaactcccgtgtcgtctcccttccttccgagttcgcccacaccttacgccgccgatctatctcgcaagcaggccgcgacgccggccgtcgtcccgccgcgccatatccatcctggtaagcaatcccatccgttatgcacatcctccctctctcattcatctctctctgacacccacctaaccctagtgtaccaaatcccaagttagactggacccaggtcccaagttagatccgcctgctgatatttaattaatcaatctaagaaagacatatcgatggtgctgacgagttaattctatttgctgttctatttgaattatgtcggtctagttaactactacagttaatttctcacgctttgctgcgggatatatgtagatgaatgcatactatacgttataaaaatagtagatgtatctgtttaaaaagtgtgaaaaaaatatgaagataatgatttgatattatttacctattgagttttaaaaatataacaaaattataaatgatatttcaaatattttaaataataattactagtggatgatagtgataatgtgacacactgtcatattaagccttaggagctagtggacaccaatcatatagtaagataggactgatgtctcaagtagaagatcggtacgcatactctactggagatagagatgcaacctatctggtatatctttcttgtatcattggaatgctatcttcaccgagtgagaccagtctcatgggagattttttatttctgtagtggcgactggagcgtacttcgttgggtagctttgtcatcacaattttttccacctagtacttgataaaatcaattcgcctaatgtacaacctgactagagggatcaagataggatccccctagcttttttttttaatttttgattaaactaaatgactagtgaaagaatcttaaagcaagccttttttttactagcaaaaatgcatgtccgttgcaataggtgaatataattttcatgatggataaaaactcggccaattcaaatgataaaacgaaacaagataaacaaaacaatgaaaaacaaagttagaaatcatatagcattgaatccagttgcgctcgcttcatgcatcatcatacgaaaaatcccttatatacaccttttaatagcctcacaaatcgatcgggtggctaatccgtaaattgatgcatgggtatttgctatagattgctaaagagatattatcatcgaccaaagattgaaattttgattattcaatttgtgaaaggtttttttactgtagattgggcatttgcaaagtaacatcatacctaccttaaacaacgataatttcaaaaggaaagtatttacgagagatattaggaagagaaaaaaaagaggaaaaaaaagaaaaagaggataatggagagaagatcagaagaagagggacatgatcaggatgatcggaagaaaaaggagatcagaagaagagggagaggatcaggatgattggaagaaaaataaagtgaaaaaatggagagaaaaaaggtactgattgggagaggagcgcaagcagagcggcactatggtgtgggtcggttgggctaggctaggaggaggatatataatagttattcacgttaaactggatacaggcgatgcatcaaacggctgatagaaatatcttcaatttttataaagataaagatttgatggtaaacatctattattgtttctctcatttttttttgttgtttgtggctttcgtcttgttatttttctattctgtaaatgtttagcattgtttctctctttttttcgcttactcactatagtagcgtctgtatatatgaaattttttctatgagaatagtaatgcgaacatccaacatcagtgtgaaaaaaatgcatctgtgcaatgttcaatggatgtcatgtgtgttcttaccaaggggaccttttagctatatcaaatattgaagcacattgctaaattattattttttactatgttttggttcaaatggccttacacttcataatgattcacttcaacgcgcgagatcttacaacgtgaaaatcttagagagtaaatggtattgttggtacacaataacataaaaccttatcaagtgggtgtaattttgtacataatcttgcaaacgatagttttggttcacgaattcgtctgatgcgtgttgtttaagacttcagctcatgcccatattattattattgtttttttaccatgcaatggttattaattaatcgatctctctgtaaggcaagctgatggagcatggttaattctaattttctgtttgatttgaatcagattggtctaactgtttgcacatttttgatgcctcgagtttgtgatcggacggtgctctcgggaggtagagtcaccgccgagctgtcatgcctttcttgcttcggtgggggatgctatcttcaccgagtaagatcatgggggcttcttacttgtgtagtggcatctgggattgtacttcgtaaaatcactttgtcatcacattaacttttatcacttagtgcttgatactatcaattcacctaatgcacgacctgaccgaagggattacgacaggttacgtctacccattttgatttttgacgaaatgaatgacttgtgaaagaatcttaaagcgtcagcctgttttattggatggtaaacctctagtattgtttatctccatttttttaaggcttctgtcttgttattcgattataaacatctaaaatatttgtttctccattttttttggttgttggcttacttgcttgtccgtatatatggaatttgttttctgtaatgcatcagaaaagatattgcgtatgtccaatgttgttctttggatggatattaccaagtagatattactcaagaatggaaaggcacttgggcaattgggcttgggacagtctatgagtgctggggtagatcaggggctaagggcatctgcctcaggttattggacggtgttccaacaacatccaaagcatgatgttgttattaacaacatccacatctggatgccctgaaacatatacatagcacccatcccacatttacaaattacttcctccataagaaagtatatgatatgtacttttaaaaataaaaaggtataaatcttttgaccaacaattaattagattacaaatacacttaccaacaattaatcagattattaacatatctagatgccctcgctctgcctcccatcccacctgccatcgcgcgctcccccctcaagttgcgttgccccgcacaaccgctcagttcgttgatgccttcttcctcttggaccctccgccacactgttgagtcacatgatctggattggaacgtcctctatctccgcaaagcaataaaggccatggctgccaatctactagccttgtagcaccccaagtaacattgtttgtcttcctcggctcaaatgaggcgagcaaaggagaggagcactgtttgggtgatagttttggtgatggaacaatagcaacggtgatatggcgggacacatctcatggtgcggctcaccaaggaaggccactcctagttcagggaacaatggaaaagcggagaacggcgtggcgaagcttgagatctggcattggaaagtatctttacccagtctttttacagcatagctctagcaagcaatggcgtgtatgtcaaccatggaccagaagtccctgaactagtcggggatttcgaagccattggtagagaagagcgcaacgacgagcctaccgctgctgtgaaacagcaacttcggagacgtcgggacaagaatcaggcaacaccagggcatcctttggcttggtttgccatcgagcacctggcatgtgtggtgaaacaacgcctccggcctctctccgcggccgctctggcgtgacctcgagtgtgcacaaagagtacaactcgggaggtggagatagatgaataaaggggagttggggagaaaggaggaagaagaagaggaggggtgaggatgacatgtggggcccatgtcggcctcaccatttttaaaatattttttgtgtaactgacatgtgggcccataatttttattatcttccaaatcagattgccatttaagctccacgtcattgtcacgtcatatgaagaccgagtcaaattaaccacataggcgtcacgtcaccgaaaaccgttgtccataccgtcatgggacctgtattgcattggttttgactgttgagggacccattgtatctggtttttcggttgagggacgaacatcggattcgttcacaagttaaaggacctcaaatgaacttattcctaggtgcgccgattgagttggagggatggaggccttgtcagaagcccacgtacgtatgccgcgccgagccaggggcgaaatgggcctggcctggcagaatcgcgtggtggtgtgttggtccaggttgatccggaattctctttggtcacgagtatgagttggatttttcacattctgatcgttttagaaaacttattctacaaatagatcctaaaaacttattcttgaaatgacgcggctccaacatcattagtgtcaggcaaattttgctataggacatcgcgacttcgtggttttagctatgagacaccgcacgaagtcacttttgagggaagacactctcaaaatgtgattatttgctaatggacaccgcagacaataaaaaataattgctagttcaataggagagaaaaacagtgtaaaaggtcaaaaatgcccccgggcccacttttcatattctttccccacaactaactccctctcgcactccggccatagcaccacgtccggtcgtcgcaggcgaccaccccgaacctccctccttgcctcatctacccccaccggtgacgtcgtcctcaccccacgcatggccacgagcgacgagctcggcgctgggatggagacgagagacgtcacctctgcaaggagacaggagtcagaagagcgagagagagagagagagagagagagggagggagggagggagggagggagggagggagcgcacgccgacggcgctaacctgtgaccccgagtagcctccgccactgcccgttgccatcccaccgccagtgccgtccaacgccctcctcggcgccgctcgtcaccgtgaagcatctaggcccccggtgttaattttggtaattaatgacaagcactaattgtggactaaccgttgtctttgagctatacattttaagttaggtccacgtcatatgtgcacatggatgattatcgatggattaaaattgacggcgcaaagcaaagggaaagaagacggtaaaactagcgctttaatttagaattgatcgaggtgtagggcgatcaaatttgctagtttaattttagtttcgctgtactattaagaggggtaatgacctagcaaagagatgattttaattgccacattaggtcattgcattttcatttgtgctctctttttcattacacaaattcactgggttcggcctgaccactgggttcggcgtgccctggccggtcagaccggctacatagtggcggtctgaccggaggcactttcccggtcagaccggcctcttggaggccgagacgatgctgctcgggatggccgatacagagccgaccgagctgtagtcggtcagaccgagccgatggcggtctgaccggccaggccgatggggccctctgacagggctacaacggctagttttctagccgttgtagagtagcacggtctgaccggccacatacctccggtcagaccgacagagcacagagttgggggatttcgcccccaacggctagttttggtgggtgggagtataaatactcccccaccagcagcaagggggctctcttggcacccaattcaattgcatacaccccttgcacctctctcacactcacttgagctttgtgttcatccatctagtgttagagggttgattagccaagagtcaagtgcatttgcttccattgtagagctagtgtggcacttgatcatctccacgtcgggtcattgcttgttactcttggaggttgccgcctcctagacggcttgtggagaagttgcccggtgacctctccgagaagattgtggaggaggcccggtgccggttgtgagtggtttggagttcaccaccttcggagtgaaggaagaactaccctagtgatcgaggcttgggtagtcctctccgtgggccggctcccgccttgcccaccccttgacgaagggggcgtgcggaggcttcgtggttgagcggtggagttgggctcgcctcaacggggagtaggaaaccgacgagtttccgaacctcggtgaaaaatctcttgtctccttgtctcatttgtttgtcgcatttacttttgtgcaatttacttttctagagacaaacttgagatcatatcaccctaggattgctaaacattgacataggagtgtgatttactttcctagagatataattgagcctctatcaccctaggtttgcaaaacataacttagttgcttagttagagttgaccctcactaagcctagcaacttaggttagttttgattaggtgtcatttagttttaaatcgcctattcaccccccctctagtcgacatctcgatcttacaagtggtatcagagcgtggtctctcttgattgggcttcaccgcctagagagaagatgtcgaacgaggtgaaccacgtagggaaggctcccatgtttaatggcacaaactattccacttggaaaattaaaatgtctactcacctcaaagctatgagcttccatatttggagtattgtggatgtaggctttgcaatcaccggcacgcccttgacggagattgatcaccgcaacctccaactcaatgcccaagccatgaatgctttgttcaactctttgagccaagaggagtttgatagagtgagcaaccttgagaccgcatatgagatttggaacaagttggcggagatccatgagggcacaagtgagtacaaggatgccaagcttcacttcctcaagatccaatatgagacattctccatgttgcctcatgagagtgtgaatgacatgtatgggaggctcaatgtcattgtgaatgatctcaaggggcttggggcaaactacaccgatctcgaggttgcccaaaagatgcttagggctctaccggagaagtatgagacccttgtcaccatgctcatcaactccgacatgtcaaggatgacaccggcaagcctcttggggaagatcaacaccaatgacatgtataagttgaagaaaaaggaaatggaggaagcctcaccttccaagaagtgcattgctctccaagccgaagttgaagacaagggcaagggcaaggtgaatgaagtcaatgagaacttggaagaagagattgcccttcttgctagaaggttcaatgatttcttgggaaggagaaaggagagaggaaagggctccaactcaaataggagaagaaatagaagacccaacaagactctctccaacttgaggtgctttgagtgtggtgagaagggatactttgcttccaagtgcccttccaaggatgatgatggagacaagtcatctaagaagaagagtggaggctacaagctcatgaagaa

SEQ ID NO: 8728 - DNA, 9864 bp, Oryza sativa
gggggatggcgtcgagctttcgtccgcgtgcggctgcgactcagcgtcgtcgttttcatttctatcccctttcctctctcttctctctctagcgccaccaccaccgactccgccgccgctccccggcaccgccacatccctcgccaccgctgccgctaccaactccgcctccaccaccaccctcgccacctccgccgcggcgacggcacccagaactggtcctcaccaacaccatcctccgcggcgacggcggggccaacctccttccggacggcgacgagctctggacggcgggccgcaatgaagccccacaacgcgggagcgtccatgcggccggcggccgcacatccaccggagcgcgccacggacgtcggtgggcgggggctccgcggactcggcctccgcgacggccacggagagcgccgcctcggcctcggcgaggcgcgcggggacggcggcctcgcgggcctcgagcgccgcgagggactcggaggtggatgcgtccacagcgactaggtcatcgtcgagcgacgtggagcgggcggcgaggtcctcgcaggggagggaggcgaggaggcggagcacggcgtcgggaggggagagcgcggcgtaggtggcttgtggagcggcggtgggaggacgacgagcgcggtgtagaggcgctcagcgatgccgtcccggcgcgcgcggagggcgtcttggtcgtcggcggcgtcgatggcgtcttccagggcgccgccgctctgctcgccttcactcggaccggcggcgctccggtcgggatcggcgccgaccacgcccgccgccgccgccggagctcgcttgctccgccgcccacccgcgccgtcctctgcccgggaaggagagagaggaaagggaagaagagcgagaagggagagggaagaaccgaagaagagagagaagggagagggaagaagtgagagtgaggctgacatgtggggcccacatgggccccaccattttaaaattatttttttgtgcagctgacatgtggggccattctttttattatttttccgagagataattttcacgtaagcgccacgtcaatgccacgtgggacggaggcctagtcaaacaagccacgtatgcgccacgtcagccaaaaccgccgagggaccatgtttgcccagttttcataagttgggggatgggtcatacctggttgacgaaaatcggactgggcaacaaatggagggacccaaagtgaacttattccttatatataatatataagccttacaattagggacagagttagtatgacactaaaattaagattccaacgcaaatacaatttggtatttcttcaactggatttccggattgttggacaatgcaaaactattgatttagacttcaagctttaggctctgctcgtttcaaggtgttgggaaccctttctcttgtcacgcgaaacgaagcagtggattagtgcatgattaattcaatattagctaataaaacttgataatgaattactaagatattttaaagcaactttcctatagatttttttttttgaaaaaaaaacgcactgtttacctgatcaggaagcgtgcgcacaaaaatagaaagtaaaggttagggaaagtggagtaaagaacagttcctaagataatttgcatttattaattaggaacttcgaaattattctgattaagaaaaactggaattaagagtatagcttgtatgcattaatccatagagtaacatacctatgtcaggatatattatatccatatcacagaagccattacataaacttcagagatgtgtccatatgtagtatacaagttaaaaccaatggtataccctcatggtcactaggttgacagaactcaactatcttatagccatatgtctaacagtgttattatcttctagagaactttgacaagagatagacaacgaagaagcaaaacagagcaaaaaggaccacgtgcacaacatgattcgagccctgttggatgatgctcttgttcatccttcgcatgttatgcttcactccagcctgagcttttatgagggtcatttgctgtccacaaaaaggataacaaaaatcagagaataactaggatttatattattgttggagaaaacatgaagaaaatccactgttgcgattgcagtaacatcattcaactatagaatgatattacaacaactcatgaaagaaaatagattcaagactatatacaacaattgaactcagaacaaatggaactccaaacatggatatctgtatactttcacatgaagaagcatgtagaaatagtataggtaaatatctctgaagcatacatcctgatagttaggcataaggcatggataggctagacaaattcacaaaggaaaaggaaatgaagggttaaatgcatgccactatcaaggtaaaaaaagacatagccataaggccaacaaatatttatttaccagaggaaaacatgtcatgaccacaagcttaaaggaaaaggcaagacatagtaccagttggctgaggaaatcattctggaacttggcttcagcatttatctcctgggccacctggaaaaaatcaatcaagcctcacaaactgagcgcccagaaatgtgaacagaacccaagatcaacagcttatgaacaaaggaaaaaaaaaatcataacttgaaggattttcttataaagtcatactcgttactggttgaaatctggcataacatgtacacataatttatgggattgtacagcggcctaatacaaaaggtgcaattccatatgaaggttcaatgaaattacataatgctcataacaacaaagacaatattaagtaccatgtcactataggagccttagtttggacgtacaagaaggatttattttgctaaaagtaaatatctaaagaacctttataaattcttaactctccatgagttcgggatttacaacaatatttcttttagatgtttagttgtagagaaaaaaaatacttaggggatgaccaaactacggctcttacaattgataggtcactagtgccaagcaagcaaaagaaaataaaagagcagatggaacactgcaatgtaataattatgtaaactaataaatagatcaagacaatgtcctgatcacctaatcggagtttgacatcatatcagtgtcgaaaatgccatcacatcattgaaacaacctagacaacaaccattttgtaacttaacatatggtattgatattaacaacatatatcaaagaagcaggcaagcagcccttgctccttagtttgaagattatatcaagtataaaacaaactgacaagatgagacgcacaagaaacaatatagttgatcgatcaaattacgaatcaaacatttgagaagcacaaagtttatcttacagcactgcatattaacacctgaacatattgggagcaggtctaaagttcaaatgcacacacaaaccaatagacctctaacttgcaaataatggcaaaaagtccacaattgagcatacctaacagaaattaaaaaaaaacagaaagaaacaaggatggagagaaatggaaatcttacgcctttcagtaggcgaaccctcgagtgcagcccatcgatctcctcatcaagatcgccgtgcaccggatcgatccgcagctggatctcgtccgagctcgacgcattcctgcaatcaataccgaaagaaccccgacaaccccccaaagttatcagggactcgattcagttctccggagcaaagacgagggattcggacgccaccggcgcaagattggatcgaacgaaaattcgctggctgtgggtgcgggttttacctggatcgaagcggacccgagccgtgcagcgggttcgccatcgcgcttaccagcgcagatggggttcagctcgttccctcgcgacttagatggaacgacgaggcggcggcgcacgggaaggagggagggggtggcgcgcgcgcaacggcgacggacgacggcgggtggaggccggaggggaggatggaggagaggagaggacgggaaggggaggggaagacactagaaggaaggcttcaaaatgaataattatttttaggaaaaaaaatttctggttccttcctaattaatggagtaatacaaaattatcttaaggtgtgcttttatacttcacttgtccaacttttacttcctcagtttttatacacaagcttcccaaactattaaacagtgtattttttttacaaaaattttctatatataagttgctttaaaaaaatttatattaatttatttttaagttttttttgctaatattgaattaattatgcactgatccattgcttcgttttgcatggtaagagaaagggttcctaataacttgaaacgagcgcatcctaaagcttggagtctcgatcaaaagttttgcattgatcaacaatccagaaatccggttgaagatataccaaattgtgtttgcattggaaatccggttgaagaagtaccaaattgtgtttgcgttggaatcttaattgtaaagcctatgaattttatagatggtcttatggtttaattgtataatttgaccattagtttatttcatttcgtattatgttatcatcaactataaattagtataacatgaaagtattttaaaatatataaatctagtgttatcatagatattgatagtataattattagtcaaaaattgccaagtttgatttttttttaaaaaaaagggcgccctcttatttggggtagagggaatattaatttaacagtttgaaataaggaaaatattattactaaggtttatctcacataaactcttcttttaatttaaatcatacctaatgttaaccatgttataggagacgaaagcataagcaccaatagaatccgatgcaacaaaaaatctggtccaagaccactggtttcgaacttgaaccaactaaactgtacaaatgtccatactggtaggatgaatgaaagtacgcatttctcatatattattgatcgtgagccaataccacattcgaccaagtgaatatttcatagtagaatctgtggaatattagtattttctttacatattagtatttcctaataatcatgaaatgtagtctagcaacagtaagagtcccaggagaatttgtttcaactcgagattgatagagaaaacacctctttttcacccatacgcttcccgaattattaaacgtgtgtattttttgcaaaacttttctacagaagagtcgtttttaaaaaaatcatatcaatccttttttaaaactaggcattcaaaaaaaaatccttttttaaaactttaaaataattaatacttaaattattcatgcactgatagctcaccttgatgtatctccccaatattctctttctctttttcctcaaacacaaccagttcaaagcctcaaattaattttacattgttcaatagttcctgaattggaaactgagttcaggttctttacagtgaaacctattcatttggatttaagttatagatttgatacattatttttttttcaaaattcaaatcaaacaaatacctacttgtaacgtgtttgaatcttaatttccctattatattaattttccagttccaaaataagaaattaattattaccacctactatataggtggaataggtgtatactattcttttttaacttaaattagtatataaatgtttttagggaaaattagtacatgtaacttactccctccgtcccaaaataagtaatattttgcactgtttacgtctaaggtttgaccgttcgtcttatttaaaaaaattatgattaaattttttattgttattactccctccattccaaaatataaggcataaccacccctaacccaaagaccaacaaataattattatcatcttgtagtttggatcatcctaataaatacaatgcatgcatccaatagaattatagcaagtttaatagtatagcccactgctagctctaattcatttatagccaatctaatagctaattcatataatagttgcttactatactactccctccatctatttttgatagttatatttctaaatctgaaaattttatttttgataggcatatttcaatccaacaacctatcctcttaatgattttctcgaatttaatgcgtgactctctattcttccacacatgattggctacatgggcattgagaaatgtaaatattaatgaatcgcttgtttacgaggaatgactagtagcatgtttaaatggatgataagtagaattacttatccttggtctgtgtgccaagatgaaatatgactatcaaaagtagatggagggagtattaatttatggtcccacctatcatacacatattgtgtcttgtagtccgtggtgcagttggctacagatctgtagaccgatgctcttctctctcatcttttatctcattaaaatatatttatagctggctaatagtctgctattgtacctgctcttagagagcatgagagtgtacgatttaaaaaagtaataatttattggagaagtggttatagttaattgttgtcacgcccggaaattcactagtaattttcgaactaatttgtgcataaaatcctcgtccagaaatcagccgaggtacacaaactgacaatttaatatacaaatccatcataataataacgttacatacttacaaaagaaaagaaaaacaacagcggaataacggtctagcgatggcttcagctccactcccacaggcagctcaactggggtataagccaaacgtctgctccttctggatcctttctcttcaactgaggttgattgattattgcaaggatgagcatatgacatactcaacaagccacacagcaaatatgcaagtgcacaagaataccaaaggatggcataatataggctcatttgcaaaagcagcatttagcaaacatttaagagaagtaaaacagtagagtaattaatcatcaattttaatcaacactgaacagcaccccaatgctgcacaggcccaaccatcctaaacaaccatacccggctgtacagatctaactccaaaccaggagctaaacaaattattaccagttattgcatcaataattatttgtgagaggtgtgagactaatcacgaaaaacattgctcaacccgcccataaccgcgggcacggctattcgaatagttttactctggccaaaggtgtaccactgtacccacaagacacgattccacacatgttgccatgccccgaagtaccaccacggcactgcaaagggggaaatcgtgacaatacccttcgcacaacacaactcaccacagtgcaccattcctggatcataatcacccccttataaacaaggcatggactccccagcgaccccacggacttctcgccgcttctcagtttggcaccccgtaatgaaccatgctatacaaaaggtaaagtcgttgcccacgctggcttgtggttggcacggtaaatgtttcacaacaatagctcgcgaactggtccttaattgtcatgagcacgaccttcaaaaccatatactcacaacccaccattgacaagttttaattatcaattaattatcataacacgataaccatgagctacatttaaatctaaccataatttaaatctaaccataagaaatgatgtaatatgattcaccccattaatgagctaatgtttctaagcatggctaagcaattatatatatatagcatttagctgaaccaaaccaatatataaggttctagctaatcgaattataactcataggaaaataaagtcatcttcggccattaattaattgggaaaggctcaccacccgatgacattcgaaaataatgcataagttgaaataaaacattagctttaaacgggttcaacatgcttaaagggtcctttgggatctgtgtgacttgccttgagcttcctcaaacgcttctgaaccttcctcaacgaaaacgctctcctccaaaacgtcagaaacttaagcgaaagaacaaaatcaacaaaacagtacaaaaacaagcataaacagtacatgtggatatttttaacatgtaatgaatttagcaacttgaaccactcgaatccgagttacgatgatttagttatgaatttccgaagtttaatcgattttcatctaataaagaaaactaagaaaagggattaatgacgtcatcgctgacgtcatcgccggccatggcacggcttccacgcgacgaccggcaaaagagagctcggttgggctatccgagaacacctacacgtagaggacgacgacgcgaactcaccggtgcaaagaacaacgacggacggcgacgaacgacggccggcgacgaccacagcagcggcgcgacgcggctgaaggatcgccggcgacggcggcggctagggcaacgtggcggcggctctacgggcgacgatggagctcgggacttggggcaaacggaagaggacgactaggggatgctatttataggtatgggtggaggagatcggctcaggaacggatggatttggtgaaggaagttaggatttatccgagttcacccgaataaaaacggccgaaattcgtgagatagataacgaatttgatgagggtttcttcgggattaggtagaggagatagagaggaatccgttttttcaatcaattttgggagggaagcaacggatgcaccggatcgaacggagaaggcggcgttgcaacgcacggcatcgggcagaacaggggctctggaggaagaagatgacactgttgcgagagggaggtaaagcagactttaggctgggctgaggaagggagagagaagaggaaggaatgggccgaaaagggcccaagctgaggaggaggatttttattacttttccaaataaatcaatcaccaaaatgatctttgaattgttaaaaatacttccattgctcaaataatttcaggaaaaatcctgaaaatacttggacactcaaagtacttaacaaaattaaaatcagatcatttaatgattaatttaatatttaaataattgctgaactactctttgtaggattaaaattaagagttgagctccgaaaaatccgagaaaattccagagagtataattaacaatggagaatttaataaaacttaaatccagccatgctttatatttagaaaattttatttcccacatttaacttcacttgtaaattaatgaacatttaatataaattctaataataatttattaaataatttataaatcctgaaacgaaaatcaggacgtgacaattgtctatatgcatgcataccttatattatggaacatcttaaaaaaaatggttgtgccttatattatggaatggagggagtggatgataaaacatgaataatactttatgtgtgactatttttaattttttttaaaaaaattaaataagacagacagtcaaacgctggatacggatacccacaactgcatttatttcgaaactgaggtagtagatccttagatggatagccttttaatatatacctccattaaatatgtgtttcctaggtggcctgattttagtatggacgcagagacataatcggagacgtaatctagtagcaggcgtaagcgtaacccagacggactatatatagttggaacccacccacccgttgcgttgccgcccagccgaacagccagaaatccccatccccacaccccagccagccgtctcatcgccaactggttcagcgcccattttggccactccacacgatcccctccgctcccaggccgacggtggtagaggcagaaaatcggatggacaagccagcggcgacccggcggcgggggggggggggggggggggggg

SEQ ID NO: 8729 - DNA, 33267 bp, Oryza sativa
ttgatagtcaaagtttaaacaccttaatagttcgcgaaacgatactttttaagaggaagtatatatgggatccggctaacaaagaactactccctcattcctattcaaattcgtggtactaaaaatgttacacccgatcaaaattattataatatgcaaaaaaaaaatattaaaaaaatatttgatctaaccatgcaactaataggtgtgacataacatagtaaatgcatatttgatcaaaccttataatctgatagtatgtttttacaaactaatgattaagtttttatttcgacgatacagtacttgaaaaaacaaaacaagtagatggcttgccacagaagcaaacaaccgaaattttcatttgtagtaatattcttttccaaaattaattaaatagtaattctaaatagggattttgagaaataggaaggacgccagttagaagagcgtccacatgcggacgcttgggaggatagcgtccagttcgggacgtagtttgtaacagcgtccagctgtttgggccaaacacagcatgggcctgcgtccatgtgcatgggagcacacagtaaacacttatataaaccaaatctttgaacatccacgtggtgtttactgtttagcttatagtccatataatttgtttagaacaatcttatactaacagatattgaacaaatttagtacttcctctgtttcacaatttaagtcattctagcattttccacatttatattgatgctaataaatctagatagatttatatgtctagattcattagcatcaatatgaatgtagaaaatactagaatgacttacattgtgaaacggagggagtagttaatttcagtagtatgcatattggcttcggtcctttaataacgcagtagtctaataaatccatggatagtttgtagccgttttcaaccaatagataatgtcaacgagctagctatcaagaaattccaccagcaacaccacatgacaacaatagtataaataaaaaacccagggtttttcctcaattgcattagcatgcatttcattgaattgtggtggattatctttttttttcgaacggtcaggccgttgccgacgttttatataaagaagaaggtgtctcattttaaggagaaaatgagaccaaaccttacaatgcatggttaattagggaaactgggtgaaaacctcaacactcaaacctaagctaccaacaccgcgaaaaaagaaaaaatggcggagcccaaaacagccatcgataaagagcttgttgaaagcgacacaaaggcttcgacttcgcgaggcaagtgttatcgttgccgagcttgtcgcctagcgacacaacagcttcgactccagagctatcacatcatcgttgccaaaggcatcgaagaaaacgagcaagacaccgaatgtccactttgaacatcagcccaagccacttgagcactactacttgtagatagctaacaccaacctccctcgaaaactgcaacgtgttatcgttgccaagcttcatcgcatcccaataaagcagcttcgacttcaccttgaagaaaacgaagaaagttggatgcttgccacatccaagagcagcacccaggagacgaaggcctcgccgaatagctaggcttatagagctttgacatgggggtccattgtaaaatcaaaggtgtttttgattattattctgtgatgaacaattggcatcggaggttattggttttgttatttggaatttattcacgaagtggttttggagatgattggattttacaggtgaatggctcctggctctcctcaagctaaatacctgccaaactctttttttttaccaaactcttaattacagtacaaagtagcacacaagagttaaggatgtgtttggttgggcggacgcgcgcggcggtggatgcgagcggtggcggcggcggacgcactgcggcgtgcggcggcagatgcgggcggtggggtgaggaggagcggcggcggatgcgcgcggcggcggcggcaaacgcaggcggcggggtgaggaggagcggcggcgacgacgaagtggggaggagaaggagcgacgcccgtgggagaaaaaagaagcgcgaaccgttttttgtgtaatggcagaggtgggtaatttttcccccaaaagcagggggtagaggtgattttgatttgtactaccttaaaagctggctttgggcaaaagcagctgtagcttttgggcgctttggttggcttttggctttttcaaaaccaaaagcaggttgaaaagcccaaccaaacacaccctaagggtgcattacgaattgattctcggattggctactccctcacctatcataagcacattatccgaactgctaaaggatatattttttcaaaatagcattttatataaaattacttaaaaattaaataaatctattttgtttgtactagttaagtttcgggtgtcattgaaaatatgatccgaaaactccaggatttttgactctgcgctctcttttatctcaatgattctggagttcattctcttagagggtcatctgtggtctttagctagggttgccacttttgggaatttcttgggagcgtagcgtggctctgcccctttctattgttatgagttgcgtttagccgcctgttaacgccaaaatttggtaagcccgaagtcatcatcggtttagagtcagtatcgactttagagtactgaaatcagccgatgggagtcgtcaagtcgccagcagtcgtgttcttgatggagtcggatcaattaaaggaagcttatttaagaagagtccgagttcaaggaggatgcggcatggcaagttatctattaattaggaatagtttattagttttcttttatctttaagaaagtgtgtttagtgtccgataaggactttatgttttccttttatctttaggaaagttttttttattgtcctgcaaggactagtatctacccatgggtataaatatgtacacccggggttattgtaataaatctctcgatcaatactactctcagcgcatcgccaccctctttaccgaggtttttacttatcttccagcggaatatggcacctgacgcggggctgcatcggttcagttcgatctccggtgaaggggtaagtcctacgttccactggccctggtgaatctatcggctacattagtgttgttcaaggctgcattgcttcgatctcttagatcgctctggtttggttgatatatttgtctacctaatatctcaattctatttctagttgcattgtgtttagagacgcatcgacttagttgtgactgtctcggttaggtccgatcttctgtcttagccgatatatctctacaatcacaatgttgttgtaaatagatttgttatatccatcacattagacaaatctattggctcatcgagtattagattattatatacaatttcgtgctgcatcggttaggttcgacctactagattgttgttgataatataaatcttgttaagccgataggttcatactagtgttttatcggagtgctagccgataagttatccggacgttgcatcggtttataaggatcgcatgtacatataatatataagttggatttagccgatgacaacaaaggtttcattgatctatctaatcttgtggatttaataacatcggacctccagccgatgtatgctttaaccttcggatcgatgctcatctatagtatatcacattgttagccgattggtttctaccggattatattattgttatattgcatcatcatcagccgactgtctttatattattggacatattgctgatagctcaaaaccctatctctatcggctgacatcggcatcggctggaattactccatcggcttgtcagccgatcggttgtttgatctgttgtttacatatcttgtcagttgcaggatcaaactgactggcacgcccgcatctcatcaaggtcttggacctgcactggagctaagcagatctcccaggccagtgtctgattttcgcatcaacaccgccatagtagttttttcctaagcttcagtttctgttttgttttttctcccttcccttggcataagctggtatggctgattgtgttgtgtaacaaaaactccttttcttttaatatattgacgtgcaatctttttgtgcgttcgcgaaaaaaatatgatccgacatgcatatttaaacgagaaatttgcatatataccacggttaaaaaccggcttcactataataccatcgctcaaatgggattcacccaaacgccattctcaagatgtgggcgttctctacaatgccattttcaccatttgttgcatttccaaaccattttccaccaaaataatattttggctgaccgttttgaccctggaactggttgaaccgaaccacacacacgagggacgccgctgccgctgcccagatgtgccgctcgcctctcaacacgatgatgcggcctcctcccccgccatccgcgccgccgccttccccgcctcgcgccgtcttcccctcagctcgctgctgccttccctcacctcaccgcttccttccctcaactcgccggaagcggctagtgacggtggccaagctggcgttcccggccgagttgaaggcgcacacattgcatctcgtcgacaacggcggcgagctcatgctcgtgcaccactgcttcgggacgacgcgccgaggtgcgggcggcggcggcttcaacctattcaacgatcgtcttacgagtttctactacacgcaccgagtagatctggacgcgaagaggaggagagcgctacgcgtcggacgtacagcacgagacgaaaaatcggacacatccacgagcagtccgatccgcgcgcacgccatccgccatccaacatcatcaagcatgcatgcatgcaaaactattttaacctaccttttctcttaaattatttattcaaattatgatccgattgtaccattaaattcgatgcaattaaatctttaaaacaagaccacatatgaatatattccggtgaaaaaatattagcttattattgaattatttttaaatgttgcacgctgttcaccaagtatatcagaattgtttcactagtagatcgaatcatcgaaaatgtttcaatcgtttaaatcggacgttgtttcaccttatataaaaacattgtttcagcaaatagcgaaagaatgtttcaagtcattgcaacatttgatctatataaagtgaaatattttttgtggaacaaaaaataaaacgaattctcttaatagatttccataatatgtgggtgatttattgcaaaagaattttttaattcacggcaacattagatctatacataaacattgtgagtacattaggtgaaacatttttagtggaacattgtgagcacactagtggatacttgttgaaacacttaaccaacatatatatgtaacatttacgaataaaccagtgaaacacaataaactacttactaaaacatacaaatagtaccatgagatacattaaggaaagatatatacatcgcgacactaaataaatatgtgcagcataataaaatttcagctaaaacatctaattttcatatgtgaaacattaagtttaattggttgaaacatatgtgtgtttttttattataatatagtcatgtgagatcttgttgtaaagatttaattgtaacgaatacaatggtataatcggatcgtaaattggatgagtaatttagaagaaaatcatttttcaagtttgctaaaagggtgttatgtacatgcaagtaaccttgtatcatctctctcacgcatattaatacctagaaagaaagcacatgtaagagagagaggacctgacaaaagctgcatgcagcaaagtcaaagaaagatgtgtccgatttttttttctcaaaatcagatgacgaagcattttccccgaagaggacggtgtcttgccgtgggctgggcgtccgccgccgcgccgcgttcctcggcaggaaccgcacgctgtccgtgtccgccgaggtgttccccgccattcgcgctgacaccatctatctgcaggggatgcctgagcaagaagaggctcacctgaggtcgtatgcctgagcgctccattgattgggccaacccggctggcattgttgactatctgtgcaggtacgtctcatgcttcagctgtggatgaattcattcgtttgttcgcagcgattctctgtcatcgccatgaagaagcagctgcaagacgagatacagcaacatgaagaagcacacgcaggtgctgggctggaagcctggaagtggaagggaaggccgaggggagctcgggctgttaattccaagtatcatgggctggaatgggccatgtaatagctaaacaataggtccagtaatgtgagagaaagagtggttatcacatccccgatccggcaccaccgtacaacaacagcaggatgcaccacaggataagggtgtgaaccgtcacttgcgaaacagcaataccaatccctgtttcagggtatcagcccaaacgtcctgcttagccttttgtagctaaaacttccataatgcgtcagttgaacaccaaagtgaaagcaagaaaattattgcatgtccaattatatactcctaggttggagacttgagcatataaccactctgaacctgaagtgtgacttgaaacttgtaccaatactaatgccatctgtgcagtgtacatgttattttaagttctacaagtgccatatgccacaagctagtcttctgatgtgttcctactgctgtcagtaaatggccagcatactactagtcttggtcaaattttagtcacgtggttgaggttcacatttgttttagtacaaccaaaacaaaaatgatacttcaggtttattcaagaaattctgccattggctgatgctgataactagtgcctagtggctcggcagtattatattttcctgatgttaactaagagttcagcataaagagcatatggtataccttttgcaagcaacacacaatcgaaataatatccaaccaaacgtattctagtttttcttgtactgattgtgatacatgcaagtataatcatgatatgactgaacagatcagtttgctgttcgtgcagatttggcgaatccaaggcaggaatttcttacacctacacaatgccctttccttaataaattctaattgtagagattttgttcagatcatgataagatttgcaagtgccactctgtccgttgatcttttctatatagtttatgatcaagaccatttcagatgtggtatttggcatctagattgacagaatttatgggattgactgtgtttctgactggtctaacagtggagtggataaatgtttatgcttggatctattgcatgacagtgatatctaggcagcaatgcttccaagttccaactgtctcagaaaagaagacaagtcaaagtctgaaacccagtctaaagaagcaaaggagccacaagaaaagatgctccagcaataatgccccatcccagcagtcaatactcaatagagtggaaaacttgaggaattcttgacaagaactaatacaggtatcgaggaacaactccaaaaatgatatttttcagctgtagtatatagattgtctgaaataactagacaaaaggtgaaaactgttaagtcttttgtccattctgaaaagcacagacttttctcttagcacgttttctagaagtatgaaaaggatgaagggctgcatccacatagtactccttttctcttccttgaggtgcatgaacttctatattgggcatggctcagacttaagatgctgtagaaacttttatacgtgtgttttagcaatacaattgccaatgctgaaaaataaaatagaaaatgtaggatcgaatcacaagaactaagccaaccagagggggggtgaatgattggtatacccaaaaaccgaaaacttttagcggaaataaaagttacccttgaaatcgacggatcgcggtctgaccgaagttgtcctgccggtctgaccgcctggttgccgtcggtctgaccgcggttatatctccggtccgaccgccgagatcagctgatgctcgctgtcgccgccgccggtctgaccgccgtgctcccgctggtctgaccgccgaaacccagtaaacacaaatcgaagaactcttaaagtagatgatgactttattgattctctctgtgtttacaaagtgcaccaacagcactccttacaaaaatttcgactaaactcgaaaccctaactcaaaactcaactcaattgctctcaaaagcgataccgggaagcctcacgctccccctctatttatacatgaggtaggcagcctaaagccacgaaccaaactcatactaagagtcctaaacaccttaggaaaccctctagtacaagaaagaaactttacataatcaatcgtaccaaatttggactccttccaaattcgactccgcatcccatacgcacacaataactccatcgtatgccatatggaatctccatcaaccacgtgcatcaactctagcctaagtatctcgcatgatctctgaccaccacggacgtcgtcttatccccaagccgactcccggtccatcaccgcaaatactctcccgagacatcgagtcacctacacatggaacaaacaaagaaaccatattccgagaccaagctatctccaacttgactcattagcagcaaacaatagtattacatacgtatagtatccatctagaagtcataatcatgaaataaactcggatatccaaataaacaacccgaaaccgaaaccgacacagtgtcggccggtcagaccgcgggctgcgccagtctgaccgcgcattacatgccggtctgaccggctaccagagctcggtctgaccagtcacatgaaataatgaatcctgcgatcacctgtgaattcaatcatctccaaaaccacttcgtgaataaatttcaaatgacaaaaccaataatctccaatgcccaattgttcatcacagaataataatcaaaaacacctttgattttacagaaaacatcaaaatcaactttaaaattaacttttaaaatttaaattttggatacggctgatagaaaagatggaactgacgatgcaattgccgttcttgcctctatccctatataagtgcatttttaacactctagttttttgtcaaaataagtcacttctaatgtactacatatcctatcaatcacttcttatttaaatttctcttcatttacccccaaccaaccaacactaacatcccttatttaattaaggggcatataagtcatttattttatctattccctccgtctcagaatatagcaatttagaaccggatgcaggggcggaggtagagtatggaagggggggcacccaggaacccggttaagaaaattttttagttataactcaccgattttcaccatgtgtgcaccccctcaatataaacttagatacacgcatcaacttaaacttgatctaaagtagagtaaattaaataagaggcactatcctctatttcgttctagctccgcgccctttggatgtgaccaaacaacgttgaagattcagacttgcatgctgacatttgcctcatgacatcacattacccggttcaatccatcacgtggtgatcctcactgtcaccaatgatatgcaagcatctagtaatcattttcttctcaatcgagtagaaatggtaccaatcaacctcctaaatcctgccctgtgcatgcatacccccaaccaccagtaagtactaattgtgaataaaaatacttctgaataaaaccattttcaatatggcaagactaactcaaagaaaacagcataaacattacattattgcctgaagattacatacatgattgtgaaatccagccatatccaacagcaatatcattcatttctgtcctcctaaccaaactagcattactaagtctttggagtggtcaagttcatgaatgtgaggtacgggctgcattattaattgagaggcccttaattgagacgatatagtaacagtagagatttttctgatagaccagacaaatgaacaatcaaaagctactagggaagagaaaaggtaggaaaaggggaatcaaagcagaacaaaagcttgaaaagatagtcgagtcatggtgcacgaggagcaacaattattttccatccttcgttaatcctcacgcagaataatcgtgtaagaaaagaccaaggcgtagaacaccagaatggctcttcacctcgttgttgaaactctaaaacattttttgatagtgttcaaaccatttgagaggaacaggtcgatcaaacctatatgacagcactaaaaaaacacttattttctcgccggaccacaaaattttacttttattactaccttttcagccatgtttcagtatcatgtagggaaatcaaagattatgagatgaaacaaaaacagtttcgtctgacaggtagataggcacagcgttgttgaccatggactgctgatttgtcacaactcacaacccagcggagagccttgctctatgcaatgaactggacacagagcgatcaacaattaacaaaagaatctaaggcaaaaaaaaagacgaagcatcaaaacttgaggaatcccaaagccaaaatggacacaaacaagagcagaatccagagcgcagaaaattatcgtgttcacaaccctgttgcatttattttttggaataagaacaaccctgttgtattatccatgtactaaatgttttatctaacatcgtagtctcggttaactgacaggcattgacctgcagtttaagggttcagagtgaatgcatgagctttggccggtcaaagcctgtcagtgtcagatcattgcataccaggttgtcatggctggacgctactttgccatccggtgtgaatacgcatcatccatccatcatcacatcagtagaaatggccgccccttcctcctctccatcctctatataaaggcatgtatgtgactgcagattgcagaagcacagaagaagatactactactacatagtagtacatagcactagtatcttcagagagcaggaagaacatagtagatagagacatagagtgcgccatgtatatctgcagtctgcagagatgagggaggatgtgcgttcttgtggggggtttgggccctgtgatcaggagagatgacaccgacatcgccggaattcgttcttggtcttgtgccatgatgaattgatggtccgtttgatgcaggtgtcatctcccctgaacataggactgactgaccctgaatggatgtgtacctcgatgattcttcggtttcttctgttctgttctgttcttgatttgcttttacaaggtaatgcctgatgctagtatgcaaatgtcagcttgtctcctcgattggtttctctttccatgattatctgcaggtgataagagttgattatccaagctctgacatagacgtgtgagaaggacataggttgcggagtcaaccacaaggtttgccatccactcttgccagggcagacagtaatttaggcgtcacttagctgtaaaaacgggaataccattaactactgcccagaaaaactcggtgtcttcattgacaacacatggtgcattctttgtttgctgcgtggtcaaattttttgtgttacctcatacggtttatcccatcttaggtaacttcatatccctcaagaacatggcgctctatctatttcgtgtaggttgtctgttaaattctgatttggttttgcacttctggttgcagggaagaacagaatcggagaatccgcaggcgagaccgcaccaacccgagcgctgcttcggtttgggccgaaacgattgagcggccaccgttcagctgcggcctgcgggccttcgggccacacggcgaggccgaggcccagcacacgcgttctgaagacttctcacgggctgtggcctgtggaggaagcaaactgaatgccgcaccgcactttgtactgttagcgctgattaatggtgtgtcatggataagtgaatattttgtaaaaagagatttttctgcgaattcaaaaatcgtactgtaccacgttatgtttgttaagtgcagagtgcacctaaaatctttaaaacatatggtagaacaacatgaatgaaactactgaattcagtggaaaaccataaacgtcaaatccgccgtgcccgatggcctgattaacgggttcttatttgtttcagaatagtgaatcagtttgaatgtaagaaaaacattttttttaaccccgcaaaaaaaacatttttttttaaaaaaaagagtggtgaacagaagttagctgccaacatttagaattcccattgataattcattaattcatctcccacaagtatattattcttcatctctcacgacagatcaacccatcaacatttcatcagttagttccacatgaacaccacagggctcctgacctgatgcttccgattctcccacgagatgtgcccgaaatcccagctctggttgacgtgtcctcccgccacgctcgtgaactccaccgtgtagctcttctcctcgttcttctccttgaactccagcgtcgccggcctcacggtcaccttcacgccggccggcgccgacacggccacgctgtacgtctccggcttctcgtacaccttggtcaccgtccgcgttagcgtgcggacgcgtgtgctgccgttgaacgcgacgacgaacgacgggtagttgaggttggccgggccgccgccggggagcgccggcgcgcacccggccgtgtccgggacgaacacccgcagctgctcgacggtgtagttgaggctgcagaggaagtcgacgtagtcctccacgccggcgtcgtagacgagccccgggtccacggcgagctgcgggcggacgtgccccgcgccggccgccagcggcgtcgcgctcgtgaaggtggcgttggcggcctcctggacgccctcgtcggtgatgtcgcggccggtgttgtcgagcgtcgccgcggtcgtcatcatcgcggagcgtatcatggccggcgtccagtcgccgtgcctcttcttgatcagcgccgcgacgccggcggcgtgcgggcacgccatggatgtccccgagaggatgttgaattcggatctcctcgtgtccatgttcaacatcgacaccgggatgtcgcgcggccaggccgcgaggatgttcagccccggcgcgagaacgtcgggcttgaggagctcggggacgacgcggttggggcccctcgacgagaagcccaccgccgtcggcgcacggttctcgccggtgaccgtctcgcaggcgaagctgaacgacgccaccgggctcgccgccgactcgaagtagtccatgagcttctcggccttggagtagctgagagtgagagccgggagggtgaaggcgtcggctaccactccgtcgccgtgccattcctcaccttgcatggagactagcccggcgccaccggcgttctgcagcagcatgccctcgtagacgccggcgaggcacacgacgatcttgcccatgacgacgtcgggcgagagactccactcgtcacaggagtccagcaacaccagcggcgccatggtggtgcccgtggccatcttggtgtacagggactggccgacgagcacctcaccgttgccgagcgtgaggttagccgggaacagccggtccacggcgccggcgccgacggtggtcatccacggcgccacgttggtcacggtgtacggccgagggccgctgttgccgccggcgagggcgacgaacacgccctcccgctgggcgccgaacgtggcgatcgcgaggctgtcctcgtagaacgggatcgggaaaccgccgagggagatggagatgatgtccacgccgtccttcaccgcggcgtcgatcccggcgatgatggcggcgtcgctgcagccccagttgccgccgcacttgtacatggcgatcctcgccttgggcgccacccccctcgccgtcccccgcgcgaacatgaagaggccggcgccgtggacctcggagccggcggccgtcgacgccacgtgcgtgccgtgccctacgtcgtccctcggggaggaggcgccgccgtactcggcggcggagaagtccttggcgccgaccagcttgttgttgcacagcctggcgccgagacccacgcacccgcccttccagctgcggcggacggcggcgagcccgctgtcgttgaagctcgggttctccggccagatgccggagtcgatgacgccgatgatgacgccgtcgccgaactccgtgtcgcgccacaggccgtactccgggtcgaggccgatgaaccccggcgacctcgtggtctgcgggtagtacatcctggcctggtgcaccgcggtcacgccgggggcgccgcgggacaagctccgggcctcgtcggcggcgaggcgcacggcgaagccgtgcatgacggtgtcgtaggtgtacaggatgcggccggccaccgcggcggcggcggcggtggcgttggtggcggcgcgaggggagtgcgtggccaccatggagatgtaccagtgctcgagggtggcgaagcgggacggcttgaggaggtggttggcatggacgatgtaggtgttcgacagctgatcaggcttgtgctcggtgcggttcttgggcttggggatgaaggctgagtgggcgagctgcgcgaggaggaggaacaatgccaagcactgcaagggtttggaggtcgtggacgccattgttgatgggtgtgtgagcgagcttgtggtgaaggaatgcatgcgtagtaatggcttttatagaggcgggatgaaaatcatttagggcttcttgccaagtgccaaactgtcactaatcactgtcacacatccctcagaaaaagggaaaagaggacacttgaaaattgaaaaatagtgtgtttgtttcactgaaactgcatgtcagtatgtcaccaatacttctccatgcatatgcatgtgaaacaactgagatatactattatcaaggggttaaatgatttttaattagagcatttaatcatctaagtgagagctgagacaaattaaaaggcacctagcgttgaagtatctacttcatgagagaaactaatcagatctatattgtttgaaggtttttcagacaaaattaagggacctaatgttcaactgtcattcttctgaaacaacctaaaataaacttttgaagttaaacacccagaaaatttgaagttaagcattcataaattgagattgtggaagttaaacttctaagtatttattgcatgtttgttgtcttgtcaactgcaggcaaaatttgaattttataacttgatttttaaattaatttaggttttttcatcatagactattttcgaacatggcttttaagccactaatgacatagatataaaagctatccataaattattttatttgctctgtgctgttaatatacttgctggatgaattggaggaggaagcaacggtgaacgctctgggctgtgaaacaaattcagttggaactaactaccacactttggcagggaacagggcaacagaaaaccaggccatgcttggcagatcataaacatttagatagctctaaaaaactccaacaatttcgattatatcatggtgactaggccacatgaagcaaaacttctgtcattttccgtttcctcctgggatagatagaaataagcttgtgaatagcaacttctgctccattattcaggacgaaacgggctctccattgttcagaatgaaacggctttctccatccttttgtcttttcttaaattttgacatgcttcagttgtattgcgttcaaccagttgcataaagtatgtacattcccagtattcctgtgcaaactgactttctgttgagatacaggtaatcttcaaacagccagcaatagcacctcaaagctgtttcaggtgctatttaccacaagaaaaaaattaattggattctattcgtatctacattctacagagtctaagaccatagttatgtaagtctcatagtgatgttgcagtcttccaaaatcaaaaccccaagtgaaatgcgaagcaataaaaagaccaattcattattttagtaaaaatagctaaatggtaattcaattacatccaaagcgaataaatataaaattagcatacaagctatgtattcttgtgaacaatgcggctaggctacatttgtaaggggattttggattaacttacacaggattgtactcccatgctacttttggtacatactcaactcgttgctgagtacctttcactgtgtcatctataacttaattcagaatttcagaccaagtcaaaatgaattgacaatgtccgagtttctttcctttcgagtcgtataactgtactgttgttaatagctccagcctccagcagtggagtcattggccgttggacatatatacagttgcaatggaagtgctaccagcagagttatgcgagaagaggttcaactaaaggtcttcgccgagtgtcaggtaggtccatcgtataagctattatggctgagagcagtgaacaggcagctgggactaaccccaaaccaagtcttgtaactgaataaccaaatgccaactctaggttctgtctggtattggtacttcctgccatgcaaagtttcaaactctcagcatactgtaaaagtaccatcccaaatttttttgatgtatcagtgccatgataatagtaacagtcattaccttgataggactcaagaatatacagagctagtccgcatgacactttgtcaacaaaacttaatgagccatacacaaaagcacaaccatttagatcttcacctactaaaattccttccatgctgatacttgttacctagtatcaagagaaacagtgaaaagatgtgaacgatgagaagagaactcccaggcataacatgattatgtatggcatatggaaatttggacaaatttaatcacaaatttacatgataacacgctacttaaaatcaagcagctgaaatgcttcccaataagctaaccaaatgcagatgatagacatacagctttgcaaggttaaaaactacacgatggaaaatacttctaagctatattataggctaaaaatttgccatagaaatgttttagtatattaactctttaaaatataagcagaaactgaagtttaacaacttactgtcataagagcattggcaactcctattgtgattgatagtgcatacatgaagttgtgcattccacttggtagaacaacaattccaacaccagacaatatccaaagcatggccccagcagaaaagtaattttttaaacgccaacttgaccatctagtttcctagaaacaataaaaattatgttaagttgagtagcaaaatagataattaaatactaaggacatgctctgacctgtaatatgacagatactatcaagctgcagacatagataatagcaggtacctgaaatatgaagagcagcgcaaattaattcgtgaaaatccatattatgacattgaacacaaaatcatctaaaatggttaaagtaataaatgaacaatggtctaatgttgatataattcagattattttttctagtctcaaccattgaagtcccaggattgaccagctagtgaactggagtttatacatagctagcttagttatagcatatgcagtgagcttcagccagattagactattcatagttcaaaaatttggcacattaattagttatattagactgattttacttatttgggctgacggtggcggctggacggtggtggctggacgggggtgtccgtggcggtggtggtggcggtggcggtggtggctgacggtggcggctggcgacggtggtggctgtggctgtggcagtggcggtggcagctgtcgacgatggtacctatggcggcgatggttgaaggccatcatccggctgacggtgcgtcggcggcggcggcggtatgtggaggcggggaaggggtctggcggcggggaaggaggagtccgggtgcgggagcgccgtcgacggcgggaacaactgtgggcggtggccttggccgaatcgctgaagggacaatgttgttgaccgacgacgatccttcttgtgcggattggtggtgtgggtttggacagggaatcgcgggcgaaagccttgccgagccatttggctggctgacaaccgcaacgccgtttggcgtcattcccctccttggaggcgttgttttagcatacccctttcctttccctaccatattctccaggtgaaaaccttgcttcggttccgaacgagcggtggcggcgatccacgtcgcatcctccttgggggcaccgctttggagaaacctcttcgtgcaaggatattgtcattggtctatgcattggcttcgaacttcagtcctaggccttgacgaggccttctagctccacattttgttttgcttttctcagtttgggtcctctctctcttgtttggtgtgttcaacttgtcttgaactacactctcttctggagtggatctttgtaataattggttgtagttctttttgagcaaaggccgggatattatattccattatctaaaaaaaaacttgttgtacaattgcatgcgaacaaccatcccaatgacatattcaacaccagcgctagtgtaatacatgagataaattaaataaaacaacatttacaaagcaaatatatgaaaaagaaccttaccaatgctttggatgattgtggcatttccaaatcatttatgacgtagaaagcaagaagtgcctgaccaaatacagaaacgttatagttgatgtgtcctctagctattagttcaaagcataaacaagagcattgtagtttaaacctagtgaaaaaggtaatacgtcaatatacacaaatactgcacaaataatcaaacaaaattcccattatccagtaaacatattagaaacagaaaaatgctaatgcatcgtgagaatgtgcttctatagtatgtctcaaaattagtatgttagtagagaatttcacagaaaaaagaatctaggaaaaaaagaaatatataaagttcatatataatatccaccaccatatttaagcatgaactagtcaatatttcatcccaaaacatacaaagtttttgctgcataataacctatgcgtgaatttggaattacatgcaaaagaatttactatgttccaccatgccatggtccatggaacacagttaacaaggtaaactattttggagtacaatacattaatctctacgagatatcctttgtcatacagaataaccatatgcagggacgaagccaggatttgagattaggggggtgtggggtgaagataaaccatgagaccgaataactagtcctttaagaatagtcaccgtcaataacaagcaatgcgtaaactagtcctttaagaaaaacttaaattttagctctttaataatatcattggaaatttaaaactagtctttattgctaaattcttttaatataaactattaaataatctcacaaataagtatcatctattttactttgaaaaatatgagaaatcacaaactaattttgtagatcatgtctcttgctaacatttttagacttgctaactaattaaattgataatactttcaagctacacaaaataaattagataaatacttatcttagctaacttaatatagagtaaaatacatgagggtgtagtggtggtagtgtttggataggggggtgttggcaccctttggcaccccccttaccttcgccactgaccatatgcttgaaaataaacaagtgatacaaggccattatatacatggaactaaaaatgcattatatttttatcaaaggaaagaagatttcagtcccataagaaaaataggaaaagattatagatacctgtgaaacattggtaaccaatctagtaaacatgtatactagagcaacttggtagtacaatactttcttgaaccagtgggtccatgaaatcctggaaagtctcttattctggcaatgctgatttaacctaaaaaattaaaagtcattcaaatactgcaaaaatgaggaaaacctagtggaagaaaaaccatcaaaattatatggcctttaaactatgaactccacaagtgttttttatcttaccctggctcttccgttccaatcaagaacacaacgacgaaacaagatccaagggcaatggacacatatgctatccatcgatactgaaataggattccaaaatttaagataaatccaaaagatcaggcaaatagtaaaatattatcttaaaacaagagagtacctgaactatcacgctcactgactgacgtagactaaatatcaacaaagcaatgccatacaggctaagatttgcgatctagcacgagcacagaaaaggatcatcagattcagctcttttgtaatacctgagttaagaataattagattaaattaatgttctaaccattgtgaaggcattacggcagcttactaatgcaacccgacttgttgggtttgatgtcatgcagttcaccattgaccttagaaaatacgcagatgatgtacacaagtcaaatgcaggaatcacaagaaaagaaaatggagataaacaatgaaaggaagaggcattacatatgagagacctgagtaactgcccagccaacattgaaaatagcagcgaatgtgctatatccaacagtctccattgtagatgaaatagttcccgtaagtttgcaaggcaaacagctaccaaaaacagatgagaaggaaattgctactaaaatggatcctcctgcatgccacagtttaaaatgtccaaagcgatcaatctggataaaaaaaaaagaagatagaatttacatatctagtttggaactatacacaataaacacaggaaaactagtagcgaacgtctaagagaagataagccatgagaatatgatgtcacagctttataacaatgctttagtaaacaatcatgttctttcttaggtcgtaccagttctccaacgaagattgttgcgaagccatctgccaattgaccagaaagcatgacaacagcagcatcactgaaaaggtgaataaaaggtaaaatgtctaaaagaatcctgaagcagcacgtaatcctttcaaacttccaatgtttctcgtagaaaatttctttcagcatctctgatagaacatttctcgagatacgaatacaagtataatgttctgatgatctggtccaacaattccatactgtatgcagtctctacggcatgtctttgatcataaatgagccaataatttccaaaaaaaaaaaagtcaaagttgctaactttgctatagccgcaacagttgcttggacatcatgaagttgtggctagtcttaactcttaagtggcacaataccaataatgatgcaaaaaattcatccgaaaaaagatgaccaatcgttacattcatttgcaggatatcccggtgaaatatctattgcaccacatttaggacatcctgactttaaatatgaacctatgtttttgtacaattcctcatcaagcagagtggattaagtgtttgaaaacaactaaaaaaagtgcactaatggcttcattcaatatgatttagaaatatgtgtaaataacatgatacaaaaattaacagaacaaatggacaacaaaatctatccctcaaaggcacataccttggactaagcccaatatctgtcaagaaaaccagcaaataagtaaaccaacatgaagaagtgatgtcatttagcatatgcccagaaccatatgaaagtattggaactctccctaatggttcatccagttcttcaatcgatgactgattatccattatcttaaccatattttatgtttgccagactaaaggtatcacctacacaaaaaaggaatacatgttgatttcagtatgtaactagcaatctcaatcccaactttgaataaacaaaacaataataaaatgccattttgccaaaagttaaaagttttgaaaaataaaaaatgcctacggtcctgcacactattttagaggcttgaaaatgaagttgcttagcttacaacgagtgtaataagtcaaaccgacagactttttattcagaaacatcaactgaagttatataagaagatagttggtacgtcatgactggcagcataacagttgcttttgtagtgcttataacaaggcttcaagctatgtcagatggatttgagttttattccttaactagaaaaaatgtctgtgcgttgcaacgggtgaaaactattttaatcatgagctgcaattaggagtctgatcgtatcaagttagcatgcgagttttttaaagagatatctatacggctccttctgtatttacaaaagcgaacgaacttaaaaaccgactcatacacggatgatgtaccaaagtaccggcaaaaacatcttcaatttttataatagtagagatgtatgactggtttttactgactgctgtaaaacacattacatggaccatcttaaagcagcaattgatatgactactgtacttgctaacttccaggaaaaaagttcaagttgtattagttcttacatatatgagaatcatgaaatgaatcaaatgccaatctaaagtggtgggcacaagaagataaggagataaactgaaggttccttttgttgttgtaaagttttttaaaaaaaaaaaacagcaagcaaatttcaatcacaatggtaatagatcagcaccttcagaaggttgggatgatatggatatgatcaagaatccccaaaggcattattgtagcatatataccagttgactaaaaagttcagatttgaggtaaaagcaactactctgcacacaacatcaacagccacccaaatcaacgtgttatcgctgggtcccaactcgaatcatcaacgaggagtatcgcaagtgcccgaaagctaaagataaaaatgcaatggcctacaaaagaaatattcgcatttccactaactttacgagacatcaacctgatccccctttcctctctgcctttccttccaaaaattgatcctaatcgaacacaacgcaggagcccacacatactctctgcctgctccccccacccaacgtagcaactgacattcgaaccgtaaccaaacaaagttaaaatttaccaaatgaagaaaacccaattttcgcggagccccatgcccgtcggaactccctccaaactctgctacacccaccccaaaacaacacagagcagcacttccatggctggccccaactccatggcgagcaacctctgtgccttaagcccgcaacagactctacccatccaataaccccggaacaatccagtcaaacagatgccgcacatgctcacctcgctgctgctgctacggcgaggaaccggagcgaaacacctccctccgcaagagcaggacgtacgggaagggcaaggcggaggaagaacgaaggcgacgctcggtggtgtcgcgtggacggcagcaggaggaggagaggagaggaggaggagtgggcagggagcgagccgtgcgggaggaggagacgcaacgcaaacacggaggaggaggaggagagaggaggaaccgagggaaatggaaggagactgggcgagcgaaaggcgtggctgacgcgggcccccaccaccgatcccatggaatggagtctggactttggagagacgagagcgacggagatttgatttattctaatccttctgtttagtttattagtggcgtcgcgcgcgcgtcaattcctccgttttcgtggccgccgccaacacgcgggacggcgggacggggacgttttgctctcggctcgtgttctcctctgctccctccatcccacgaaaaaatccatttctaacattccaaaatagaattagtagagaataagactaactaaaatatttttaattattaaaaaacataataagactaatatgtagataaatggtattgaagtaaaaaccttctcgttttacgttgatgatagataagatagtagaagttggtttttctaaaataaaatttaaactctataagttgagtttttttacgatggaggaagtaaagctgaagaggtggccgtgaccgtgagttgccttgattaaaaaaaagtctatctatacggctattagtatgcgtctcgagtaattagtactccataaactaagtcatggctgcgtctcgatggtgttttcttccgaataattttgtgtggtgatcatgttttcttctgtctgcaagaacatggggtgggatgggagaaacgtaacgtacgtagtgacctgtagggcttgctttgtcaacaagtgagttgttagtcttgtcctattcttaaacaatgaattttcacaagtgcaaagcacatgaattttcttaggacatgtacaatggaagacacccatagagtaccctcactaactgaaggcactcacgtgtaggggtgggcagatttagaccgaaccgaagaatcgaaccgaaaaaaccgagaccgagaaattcggttagttgttcggtcccagccatcaaaagactaaatttatttcggtcattttggttattaggctcggttaaccgaattgaccgaaattttggctcaatagatctaggaagcacgataaatataaatatatatatatatatatatatatatatatatatatatatatatatatatatttgtgtgtgtgtgtgtgaaaaaatgtctcaaaagaggggaagtgctgttaaaattttcattccaaacttactcctgaaaaatttcagtcggaccaagaccgagaccgaaaagactgaaattgaatttgccagccctgtgtttttttaggatgaaattcagtcctaagttttcaaatactgaaatgaccgaaagaccataaaccaagactgaatttttcagtctaaccgaacgtccaccccctgctcacgtggacactcgtctcccaattaaggccacaactaagtgggttcttcaaaacccgaaacaactggatcaaggtactctatcccacagtagatatcccaatcaaaaagccacggatattaatttcctctcctacccctgccggcaacacgtctctctgctccctctcgttcttttcgctgctctctccatccctcaacttgctctctgctctctccctctctctcaacaaagcagacggcaagccgtgcggatcgccgtagcggatggccccgccccaccctgccgtcggcattgaagcggcggcatcgacggcgcgttggtctcggatagtattgtagcgtattgccataggttaagagtaatattttactaaatccttttagaaagcggcttttacacgaaacctacatgtgacagtagatttctggacagtgtgagacactgacgcaaatcattgattcaaatatttgctgcacaaatttgatagataacgggtgtaatatttcgttatttcactatcattgcaaaagaatgaaagtgctcacataatacttgattgattctagggataaaatggttttctgaaagacttaactaaggtccatggataagaacattgatatcttgtagaacttgcgtttaaacttattttcatctatgagacaaatatttgcattaccacatgcacaccttcgcacacgccggacgccctgcctgctctaacatctctaaccttctcaaaattgagcacatcagcacacacacccatatccccccaaaaaagaaaattacaaagacccatattcactggaactccctccaaaggtcaaactctacagcctctgctcaagtcacccttaataccgacccatgcactatccatgctaagcaatccaacagccattagacatttaattgattattaattatcacaaacttgaaaaatgactttatttgtctatttagaaaactctgtataaaacattacatcgtttgataattcaaaaagcgtgttaatgagaaatgcccaggggtcttctggctagctccacaaggtggtgggctagacgacctgggttcaaagcctcacccctcctaattatttgatattaggtccttccctaatattctagtttttcaaaaagcgtgttaatagaaaatgaaaaaaatgccacccctaaactcactatcgaaggggtggattctcccaaaatctccatgccccctaaacaatccatattcttagattttgtagttatagaatatagaaaataaattcttacacagtcataattcttaaaattttaagcttccctaatatagccttagtaatatgtatagaatcacggatttctaattgaaacaaaacacatccgtagagccgtaaagtagggcagggaagagcaaggtcgaaggtggaaggcacggcaggaggagaggaggtagaagacacgcatagtagtaggacatggattttcattcctccacgacatgatatttcctcgttgtttacctatcatttaaatagtcataaaattttttaaaaaacttaacaatatagattaatacgaaatatagcaccccacaaacacaagaccaaattcgacttctacatgttgtaacaaacagaacaaattaaactgaaaatagctatatatcgtacattcgcatatatatttattattattttacaactagtagaagttaaattttaacttatatgtttgtggagtgatatactttatattaatctatcttaccaaattgtttcaatttttttttgataattatttaagtgaaattactttcccatagtagcaaagcaaagcggaggaggaaacggaggaaacagggggctagcgcgcgcgaaaggcgtggctgatgcgggtcctcccgtcttgggtcaggtgtggatggagattttgtttattggtggagtagtggcgtcgcgcgtcagctcgatcggcaggctcgtccggtcgtcccttcgtggccaccaacacacgctgccgggacggcaggcaggacggggacgttccttccaattccttcgcttgtcttttagccgggagaggtagcggggaagtgttcgctacgagtatgcgtgctcggtgtgtacggcgttcaaatggtctatccaacgtatggttgtaccgtgtttagttctaaataattctttaaacttctaactttttcatcacatcaaaattttcctatacacataaacttttaactttttcatcacatcattttaattttaaccaaacttttaattttaatgtgaactaaacgcacgcttgatcgtccgcaagaattgaggaatacgggtggagtatgtgagaaaaggtagcagtgtgtagagcttgcttcgtcaacgagtgcttgtctacttggccactgtttgttgtcactatccatcgaggatgtcttttaacaaatacacagatactttcttacgcctagttaggagagtttagccatggtagtagtttcatattagaatctttagctcccaaacagcgtgtattctcactcactcaaattataagaatatatagttacatagtctaaaaagtaaactgaaatcagctactcacagaattttaaacaccccccccacccccaaaaaaaaacacccaacaggaccttacttattagtagctgaagatactagactattagtacattgatgcaaggttattatattcctacaacaaaatgaaagtgttgtgtttactcggatgggagaaaagagaagaaatataaaggaggatgagaattgttgttgaggagttgggcgcagtgacggatctatcaagattcttagcatggacaaacacatatggacaatttataatgttatttaacactaaaaatattagtaaagcctattaagtgggatacaattgttaatagaggatttgttggtaaaatatattatttccatttttaaataattatacctgcattatttaactttgaccgctaataatgttagactactatgaacaaatgttatatacttcaataaatatttacaaaatattaaaaaagataaatagtcaaagtttaaatatagatagtaaccgtggtaatctatttgggaatggagggagaaagttacaggagagaaaaggtcacgttcggtggggactcctactcagttttctaaaatttcaacttaggctgtgttctttccacaagtttcccaacccctttccctcgtttttcgcgtgcacgcttttcaaactgctaaatagtgtgtttttttgcaaaaagtttctatacgaaagttgctttaaaaaaacaaattaatccatttttgaaaaaaaattaactaatacttaattaatcacacgctaatggaccgctccgttttccgtgcggtggagttgggttcccaaccccaagtatcaaacacagtagacctgtctagatcctaccctaaaatttttcaccatgtcacatcgaatatttgaacacctacatgaagtattaaatataggctaaaaaataactaattgcacatattgcgactaatttgcgagacgaatcttttaagcctaattgctccataatttgacaatgttgtgctacattaaacatttgctaatgacggattaattaggcttaataaatttgtctcgcggtttactgacggattctgtaattagttgtttgttagtgtctgaacacgccatacgacatcctatataatatccgatgtgacgcgccaaaactttacactcctagatctaaacacccctgagatgatgtttgtttggagcagtaaagcgaaaaatgttttcccattacgtgttgaatgcgatgggccgaggaaaaaccacacattgtttgggttcacatgagaagcgatatgcaaattgctcttcatatttgctccttataaaaacaagagggatgacattttgtactgggttggttatgacttcgcattgggctggccagttcatagtgctcaaagcccacaaacaataacgcaattgcgttgtactgcaatctaattacggaggaaaggagttgaaccaaagttttattatactcatggtgattttcttaataaaaaagtaagtgacattctttttaaaaaatatttctcatggtataacacaaggtgtcactttctttttaaagaagctaatgagtcatcgaaaaccctctccgtctgcctttctattgaaactagtcttcagagcaagctagacctttgcagtgcaagaatttttttcaaaattttttctataaaaattcattaattattgtttaaatattataaaatttatataaaattcttgtgttttaataggtggctaaatatataattaaatcagtactaaaatatctcaaacaagcactctgccatgacatgtatgcccttaatcaagaaaataccaaattactggtgttaagttaaaaagttccaaaaaaacaaataagaatagtagtatggcacttcaagaatagtttgagcacctcgcgaaaaaaagaacagttttattgaagcataaactattactcactccggttccgtttaatcttttatagctttaagtaccaattcttcatgttttctccaacaataatataaatcctagttattctcttatttttgttgtcctttttgtggacagcaaatgaccctcataaaagctcaggctggagtgaacaagagcatcatccaacagggctcgaatcatgttgtgcatgtggtcctttttgctctgttttgcttcttcgttgtctatctcttgtcaaagttctctagaagatagtaaatatttagaagataatagtcaggttttgtcacctaacgataccattggttttatgttatacttgtactgcatatggcaatgtagtatctgaagtatgtgttagcttctctgacagactgatatggatataatttatcctaatataggtacaattatattctatgttgtttgtggacacacgttttttttgttttaaatgatccatggaagatgcgagttttttttgggcatttaccaaatttgaattaataatatttttttttcatcattatataacactgccacatcattcaaaaccactttaaattgatcagaggatgaaaggcaaacaatatgcaaagtttagggacaaatttgggctttaatgaaaagtggggattaaggacttttctccttagtcattgaaaaaacaacacgttcaagacaacaaatatgtgatcatatttactgttcaacatgtagcaatataagataggataagaccaatcttagaactacggatttggatggagtatgatccattcccaccaagataatttattataattagactatcccaccaaattattttaggtacacgatgctaccattgaggagcaaacttcaataagaacagggaaaccgcaaatcacaagtcagttgcaggaagttgggtcaaacggaatcgatgacaacaacactaactccagagaggcaaaaataaataaatatattacattgcaatagttaattctcctttattaatactacccccattctagaaaaaacacagttttgcggtttttctatctaacatttgactgttcgtcttatttgaaaaaaaattattggtatgtttattgttattactccatccgtcccataatatatgagattttgactttttcatgcactgtttgaccactcgtcttatttaaaaaaattgtgcaaatatagaaaatgaaaatttgagcttaaaatactttggataataaagtaagtcacaaataaaataaataaatattacaaatttttttgaataagacaaatggtcaaacagtgcaaataaaaagtcaaaatcccttatattatgggacggagggagtagatgataaaacattaatagtactttaagcgtgacaaatttttgttaattttttcaaataagagggtaacccacgactacacgtaaaatgagacggagggagtatcttccaccaaaagggaagctactcgcggctcatcttgatgattgtgctggaggattcttctgtttctctttaagtgcaagtattgcaaggaaacgttggaggaataattagactctccactctacacatttatattttcgtacaaatcctatataataaaacttaacatgcaaaaatatcatattatcctacactaacaattattacatcttaaacctcaaacatgttgtattatatctatataatttattaatattagagctttgaaatgcaagcatttaaatcatcaacataacatttcaatatagaccaatttatttgacttccatatgtattttcatcattttttacgatatccaaagtacctaaccgttatcatcacttagttaatattatttttttcttctctcattaagtcatattatctcagttgcttctaacccttagatgattaatctatggttcgaattatcttctttattttcttttctcatagctacatcatcttacttttatatttgaataattatctaaaaaagctgccgcaagttctttaagggaaaaacttttaaatctaactataatataattgtaatataattcaactataatatataagtattaaaataatatatgcaactttatatctaccttatatagaaattacaatatagttatagtatagttacactatagcgtaattacattgtacttacactacaactatgctatactatagttacatttaaaagttgtttttttagcaattacgatatactatttaaaatatcaaaaaccacatcaacttatataatattatgtcgtttagctatcttacacactattttcacttgttatcatatttctcttgcagtaatgtgtgaggttttacctcttaataaataagaggacgaaaataaacagcacattgcaggggacagtcttgagatgatggatacaactgctgcatcgtagcctattatttacacccacgaggatagataatcagcgatacttacagggtgttcccattccttgccggggtcttcatagcatgagtgttcaatggttccatctgccaggtgataggcttcgatgtgctccaggccagttctatccccacagtcgaagcccgggtagacggcgtcaccaacgatcgaggggaatgtagcaggggacacggatagcgagcagtcatggccgatgaacacggcccgaccaccgagaccacggacaggcaccgtcttcctcccatccaaatccacccggtacgcctggtacaacctcttgttaccacttagggtacggtgcaccagcaacagctcgccaatattgttgtccaccaggtgcgcgctgccgagcatcctgctgaacctgtgttgcaacgtcaggtcggcggcctccaccagctgcggcgtctggctctcccggctgacctccaccaccatgatggcatcgctggtaacgccgtagaagcgacccgctaatgacatgctcggccggagacaatcgctgaggttgaccgccgtccagcacttgtcgccgggcttggcgacggcgaggaacactgtgttatggatcaccaccgtgcggtcgtcggcgaggccaaagccgtccacgctgagatcacacagcggcagaaggaggtccaacaaagtggtgaccggtgggaggtcggtgagctggtgggtgagtgggtttagaaggcgggcgacatgggtgctctcatggagcaggaggacgaggccctccgtggaggggctgaatactctgtggccacggaactccgggaggtgcgccaggatgcactcgccggtggagaggttgaggaggcggcagtggtagcgaatgcggggtttctcggggaggatgagccactgccgcgggtggaagcggcggtccaaggcgtcatccgccggcggcgccgcgcagcaccgccgccacggctggcacacggaccggaagcggatgtagtcagccacatcgttggcgaggacgcgctcggcgatgagccccgccggcccttcaccgagattcgccaatccgtcccatcaaccgattcggattcaaataaaggaatccgatccgaagatagtttagggcgaggaggaggaggaccgagcgcggtgccggtgcgcgcgcgctttgcgccccaactacaccaagacgacggcgcggcggagcaagggcgcaggcggctaacgctccttcgcttcgctcccctcgtcaaggggatctgcgtggaggagaaggagcagcaccagcaggcgtcgtgggtccttgaccgctttgcccccccccccccc

SEQ ID NO: 8730 - DNA, 45909 bp, Oryza sativa
aaagagattgatggagttttttaatagttttttcttttgaaaaagttttatcaaaaacaatttttgggcgatttttttagaggagggaaagacttaacagtctcattattttgcttatgcttatacttataagctaaaatttaggtgagagaggaagagatcatggatggagttttagcagtttatgaaaaaaaaaagaaaaagttttatcaaaaacaaaattttgggtgggtttttctgttgggaggggaggtgagagaagggttattttttttttcaccttagaaaagaacctttttactttcttttatgttgattttattcacatatgccacttttgttttgtagtgggaagtcatattcttatttgtggtagataggagaaaattggagaaatggtttatattttttgcggtttgtttcgtgtctgaatattatatgacgcatagaaaagttctccaaaccaattgatctttttttacgtgggctggacacccaacgtgtaattgttacttatcgattttttttctcccattttattgttcgagcacttgtgctattgaaataacgtacgacaagagggatttctccacgtaattttgtacatgctagttaaactggatgggttatacaactcatagcttctatttcttatatatatgcaattatgcatacaagtgttgatatcaatcaataatgttataatttggtccaaccacaccctaatggtatggaaatggttttttattaatatggtaatttctatgtcatcggacagaacgtgatgtcatgtttttaagctatctttatctttacaatataatacagagtaataaaatagattgtacatctattccctgtttctatttttcatggatcaatgttatttctaagctatttgtgatgaagttcttaatatcatacaaaagaatagtagcacgattttttaaaggataagttggtgttacatttaatcttaaaagggcattgtagatatacacatatctgtatgctttggtcccaatagagatgattcgatgtttaacacaagttaaagtaacgctttgcatcatgtcgatgtctatgtgtatgtttcagtgctaatcaaataaaaactttgttatcctaaaaggaagctgaagaaaaatatctcaataaaaccaccatatcaagttgaattccactcctaccttctaaactcattgtcaacatttcatcgtgtcaaaacctaaaaccacataaaccactgtacgcaagccaacacactaccacaaatctccgaccaatttttctaccgattttcatttgatcacgacactactctctagaacaaaaaatgagccgttttttcttgcctcaaaagaaagaaaaactaattttccaatcatgaacaaaaaattggacgtggaagtgtggaaccataaggaaaattttcttgtggcctaggctcaacgggaggaagacgacgacgccaattgccatcgtcagttcgtcaccaaccaagccgttgctggaccgagcgtgtggccctccacggaatcgtgcgagctcacgcggccacacacgtgtcacgcggggataaagcacgcagctttgccatccattgctacaggctacagcccttgctccctgaaatgttcagaaaaccatgagcttacccgcacaaagagagagaaagagccagtggtggagtcaggaatttaaacctgcgagaaagagccagtggttaagaaatactgttcccagtaataaacctgaaaaaaggaaggagatattaagttttgatttgtggtgtggcaatgaaaagttgaaaacaccagggcaaaagcacaaacattttcattgcctgagaacatgcataaacaggattgaggacaaatcagagagactatatgggctcaaaaggaaaaaaaatgatgcaaaaggaccgagttgtaaggaggtatgggtatatctgcaaggaaaaactggacgcagggaccagaacgtgaattctaaaatgatgatcatttgtgggtatatccgcaaaggtagagactgagggtgcaattgacaaggaaatgtataaaaaggaccgagttgtaagagttggaataggcggaggggcgtatctgcaaggaaaactatgggctccagggacctggttggaaatctcaaaaaatttggaccatttctcgatttgtgcgtgtcatccttgcgcaggggccatgctaatcttctctgtatcgttccaattttatcggatgtctccgaagagacaacacaagcggcagcgcgcggggttataaggtgggttcttcattgttcggtaggcgaggtggtactaaacctgtctcccctcaacgctcccgcgacccaccgatccccatccaacggcccccgcagcgcccagcggcatcccgcgcggtagtacacgctcgtgggccgtatcctccgttacggcccaaacaagcagagagcacactaggcttctctcgcctgcggcctcgtagctcaagtctgagccccatcatccatcgtgaccattcatgaataaaaccggtttgtatatgtgctccttttttttttgtccggcttagttcgttcttgcataacaactgaggttctaagtggcacgaaaaagggataaaacaattaacacatgatgaattaattattaactattataaacttgaaaaatatgttcatttgaatttttaaagaaaattataccgtttaacaagtgtcctaatgaaaaacaagcaagttaagtttaggattgaagtaaactgtaaactatatgtctgaccgcttgcagaactactgattgaccagcttgattgcgtccaaaatcaaatggtagagcgagagccgaaggcaagcccagctggtttaattagcaatcgcctatataatcagctagcgcaacaactgttagttagttggttgttgatgttgtgcttcaagaaatcaattaattaattagtctgttcttattgcttagtgtactacacactcttagctggagccctagccatgggaagaaattaattaaatccccagataaacacatgaccacgaaactgcattgctgtactaaagctctgaactagctagcaacgcgtcttagatatattccaccaagcaaaagccacatcatgctgtgctgtgccgtgccaaattaaaaccacatcgtggccttcaagtttctgctagcttcgtccttcgttgctaatcccagccagttaatcaattaattcgtcagatagatagatatatatacgcgttcatcagcgtacgttcttatagctagaactcatcctgctgtgcaaaacctgcatcactagctagctagctagctctgaatcctctagttgtctgatctcgatcgatcgatcgacaactatctcgtccacatcaagaaagcaaagttttcttgagctacgaatcaatcgatcgatcgatcgccatgggcaacagaaacgaggtgagtgagaaaatctgaattgatcatgcaatttcagagccaaattgaggtagtagcttagctacatgtgtgtgtggttgcattgcagcagcaggaggaggagcagcggcgggcgagggtgccggcgttcggcgagtgggacgagatgaaggccgccggcgtgctgccggactactccctcgacttctccaagatccgcgccgtccgcatgcagctcaaggagggtgggcccctcaccacctggtcctccaccgccgccggcggcgtagaggtcggcggcgagacggagcggcgctcatcgtcggccgccggcgtcgtcgtcgacggccgtgatcgccgccgccgccgccaccgccaccgccgacacagcagcgacggcggcgccgacctccgccggccgctccggcacgaccgtgctgcagctcccaaggtcagctaattaattaaactgctaattttcatgcgttttggtgttcttctgatggtttactaaaaagtgaagattccaaggtctgtgttactactaccatgttaatcattttaagctgcacggttataaccatatgaacttatccgcgattaagtgaaattaataagcatgattcgttcaacacactggtcaatttgttttctcaacacaaacgtacactgtaaatgtcaacatgctgcccgttagttaaaaattcagaatgttcttggggcaaactgacgtatgttaatcccgcgtttaagatatttttatgtatatttgttttttgaggaaatgtttatgtatatattttactctgctgaaactgctgcaaattgattaaatgcgacatgctgcgcacttcatcgctccttttaatatttctgtctgaatgttctttgggacatctgattgaacaatgtactatacttaaaaaattcagaacacacaagtcgtcgcgccagattgtcatgcttaatttgttgaactattatttgtttaattttgattctgaccattgtttagttttgatcctagcaggagaggagcaagctgggctacctgttctgttgcattgctggatgaagggcattggcagaaaaaaaaaattcaaatgcaagaaggcaattcaagaaaaaacttagtgctcatacatgtttaatttctccctcgtatttctgccatctctcaccgatcgatctgttggtgatttggtggatgttggtgttccatatataacagctcgttgcatctgtaatgttaggctgtctaggaattctttgctgtaaaaaaagaaaataaattcttggttaattttgattttgcctgggatgaaagccattgatttgtagcctgtacattgcacatgttgtaaatagtgaagtcgagagttattttcacaatttttaaaattaaaatggtttcttccgatctctttgataccacaggcgggctaaaaattagtagtcgtttggattctgaagaattcatcggtgcagtgaacaacaagcatactgatcttataggattcgtaaaggaaaaggtgaaatgatttcagaagagacgaacaaaatgaaacggaaagttaaaaaaatgtcaaattaggggtaataccagggacgatattgaataatgtaggtagccaaaagctatctgtaatggaggaaaaacgagagactgcaaagtggcaaaaggacccacctgtagaaaaggggaataggcaagggcgtgatgagaagatcccgggggcatatatgtaaggaaaaccatggtcgtcagggactaactcgtgaattcacaaaattgaccatttgtgggtctgtctgcaaagggagagattgagggtgcaactgaaaagaaaacgtagaaaaaggaccgaattgtaagattcgtaataggcggaggggcatatctgcaacgaaaatacttgtaactcagggacctggatggaaatctcaaaaaaatttggaccatttctcgatttgtgcgtgtcatccttgcgcaggggccatgctaatcttctctgtatcgttccaattttatcggatgtctccgaagagacaacacaagcgacagcgcgcgggtttataagttggtcgcgttcgagttagctgggcaatgtggtactaaactgttcctcccgcctctcgcgctcacactcgccctgtgggccgctcaccgtgcacgtacttgggcctcccgctcccccgcatgcatccagcccatcacagcgaagagaatcgggcttttcttctccccatctccctacacaaccaccaaatacagccaggccgttggttcatgatccggcggcagatcgacatctacctcttcacggtctcacgatgcaagcgcatcatcgaaacgtgtaaagcacccataataatactgataaattattcgcagtttcacacccagattactccataaaaatgatcaataacacatgaattatgatttatgatttatgcttgcttataattacatagtagatgacaaggcttactctgagtaactctctttttttttttttggtttcatttgctgaattaatctgtgctactacagatgaagaagctagagaacattttaggccgactgcatatatattgatgcattacatgagtaggctacggatgaggtcgggcacatctgcgccgttgatggcgagatcggacggctggaggaggaggagctcggcgagcctctcgctgagggcgtccgcctcccggtgaagcctccggatgtagcggcacgcctcctgcagcacctcggcacttgacgcctgctttgattaatcaatcaaattttagcgaggaatatatattaatccctacattataatgggatatataaattgtacttgcagatggggaaagggaaaaaccaataaaatgatgtgattataaacatgcgcatattacacgtcatgcgtgtgtgtttacaataacaatttagtgggatcagtgagacatggaattgtggtctccagctctttcagcggaatggtaacacggggatatgctagtggggctggcgataagcattgtgtgcgtgtgcattttccgtacaactgacgaagggaaaaaaaaataaacacatatatctacatgtggattatcacgtcctaaaaattcaatatccactagccacgtaatgattaacctagtagctcaagcgagtgagttagtgacaggcacaattaatgacggatataaacccaaaagggaggatattatatattaattgccaatgcaatgcatgcatgtatatgcatgcttggtttgtaactgatcctttcgcaattccgaccttatggatcatcgattgcatcgtctagctatggagtaattaaactagggatggagatcgaactcatgttaatattttcccttttctaacgtaaaatactcccgcaatcctaaatagataaaccagttcatataatatgataatatattctaatactacgaatcaaaaccggtttaatttgatcgagatcgatcaaagatcaccatcttaccttggcattggcctcgccgccgcgggtggggaggacggcctgcagcttcgagatgagctccgccatctgctcatccgtcggcggcggcgccgccgccaatctcgacgatgtacggctccgccggctcgacgacattgctaatcgagagagagagagagcttgagcttgtgagcctagctaggcaaagctacagtcaaaggagaggatcgatcgatgagcagtactagtacatgggcagtccagtccatatataagaagagcacgtacgttgtgcatgcgtacacgttgcgttggggacaagctcacatacggtgatagagacatgcatggggacatgcatgcatgttggtagctagcaacaataaataataatattagccatgtcagtctcacacggttaaagtgttagtcaggacatgtttagtatatctccagcttctaaatttagcttcaggagctggatctagagtagaattgtggagcggcctaaatcagctccacctctctagttcattttgtaagagcgctccacccagctccggggctgaaactgtttggctgaactccggctccagaagaggtggagctggagctatgccaaacagtctcttatagtatagtttaaggataaagatatcttgtggttgtagcccgttgtaattaaaatgatcgatatccgttatcatgtctttttttttcttttctaatatttgtatgatgtgtaaattcagctatatttgcagacgtccaaaatagccttggattaattgtaccattttagttcaacggtatgagatcaataaagtttcttttatcaaaaaaggtgttagtctctaagagattgagctagccatgttacatgcctaactgggagctgctacaataagtacacgtagctagccagtgcatatatgcatatacatgtgtgtcgttatgtacataaagttgtgagaagtgaagaaagcaatgccagcttcagcttcagttggcactgtactgatccagtggaccagtggacggacaactggtgcacttatgatgttggatcgatcaatcggcaattgtgtggggccaaaggcagaatgtgtcataagttctttaatttatttttaattatttccccaagtttaacaaaataattaattctcagttgaatgatatatgaagatactccatttttttcccatatggaaaatggcatgtttaaacgatgtcatttgatttgcatgtatatataggtatatatgatgctcatgcaaagaacaaaaggccagtttggttagtttgttcttgcatggatgatcatatatatatcttatttgctctcgacgatcctttcacgtgctgccatgcataaataaatagtttatcagatattagggcactcaacaccaacaagatgtcgatcgggtaagagtggaagatcatatgaaaataatcaaaagtatgaactgcattgtaacaccctccaatatgcagttaagatcgagctgacacgctgcattatgcatgtgctgatcagatcatccggagatttgatctgtgattgcgtatcatggtcacagaattaagcatttttgctttgtcaggtggactcacacgctcacacacaaactttaaccaacagattaaattaaatttcagcttgttggtcaagacagcccggagatgggccctcccaaaaaaatagtaactgagaaaatcacatggtatcagtacgaagttttagaggattttattgccgattaaaaatttaaaataacctcgtctatatattcttattcatgtaagttgagtattgccctctctcgtaaattaggattgacatacattatttttctattacaggaagaacgcatattcgtaaccgcactaacgcctccacgaatgcaccccttaacaatatatgctcaaagagaagagatagaaacctctctagccttactagaaatcccattgtgaaacgggatggacctgtggcaactcattctcgctaaaaatattatggtttgtgagactgcatcccataacatagtactttaggcatcacgatttaaaactctggcggtggagctatacatacaccacaactctactcgaatctggtgcttccactaatatgtgaatcttttttttattgctcaaaaaccgcatcatgtatgcactcaccaaatttacacctctatgaatcatgaaagtgtctcttaacacatgcttaaagaaataaaaactagtgacaattccctagcctcttactgattaaaatcctattgaaagtgtacatctaggctagtcataacccaaccttactaaaattatattaaaaccgcacctgcatgtatgtagtatttctaataaccggtggtggagctatgtaccacgacgatgcttccactgacacgtgaaatttcaagattagttagacgcggaattatctcttccttatattctgcaggtgcttccactgacatgtgaaatttcaagatgaatgagacgcgaagttatcccttcctcataatttgcatgactctatcctatgactcctgtcacatcctcaaacatggctaacttcaaagggattaaccattcacatgcatagcataacttgttggctacatgcatgcatgaaagcatgaagcaccataattggacagcgcatatgaacaaatcaagaaaagaaaaccatcaatccattgtattgcgaccattcaacagggatggaggaagtgaattaattcccaaagttgattgattgattgggccgtctttccaaacctgtgggtaggttgcaaccatattcttgatttactttttctgaagattatgttagataaataaacatgcatgtgccagacgtccaaggttatccatttttaatttccttttaacttctatatgtagtttctttatggagaaggttatgctccaattgtatatgttgacttcattccttacatcaaattggatgcttgatcgtgaaggttatttggttgggagaggagggtgcatctgcatttttaatatatgtccttgaattagcatatgtgttttgtgccatttaattaacataaacatatatgtttttcctccgcaaacacactacattacacatggcttttcctcggtgtcagagacaatattgctacagtatttaattcccaaaagggttttgattaagtggttgttaatttggtcgacagaccaaggatgcacaaaatgcataatcttgtcaaactttctgtggggtacgtatgtgcatgctcgttacccacgtaaaaactcatttttatagtttatcttttacttgctagtacaaaatttgaaacaagaaattaagtagaattaggataggcaaaaagaaaaaactcgtttgtctgtccacttgcatccctacttttctaccactcttatcttaagatatgattagcgaaatgatggcacatattgtattagctaggaaaaaatgtcactttttttagtgaatgactttagggtaaagatgaaagagaaaatacttttataggtgtggttgtgaagtacaaatgagttgtctggttaaacttgtttaacatgaagtgtggcaaggagaggcaatgttttggcattaccaattatactctgatagacctaagcgccacttaggataaacacatctaaaggcccctttgaatcgcaggattgagaaaacgtaggaataggaaaaacgtaggattttgataggaatgtaagtgtaaaacagaggataacaaaacgcaggaaaaacacaggaatgaccgtttgattgaaccacaggaaaaacacaagaattggatgagagagatagactcaaaggaaagttagcaagaggttgaagctcttgctaaatttcctccaaaatctctataggattgtccattccataggaatttcaaaggattggataggattcaatcctttgtttcaaagggcttcataggaaattttcctataggattgaaatcctctaaaattcctatgtttttcccccaaataaaaggggccctaagtgtatacgacatcgctagctagttaatcactaggcacttgaaaataacttgttagagcatcattaagagtatcccaataatcaattcccaaaacaatgttttttggatctcataaactgaatataggaagtgagaaaacctatctctccaacagaaagcttcattgatttcctataatgaaaagtaggccatccctttaactaccaatagagaaaattagtttttctaagccgaactcctcccatacgcgcacatcgcgctatgcctgcgcgctcgagagagctattgggaacaaaaatttgctcccttgaagtgaggaacgagatatgcggagttggaaacctgaattattgagaaacaggttagggattctgttggatgcaatttttaaccaaattttcctaaatatgaggatagggaatagaataagtaagctgttgcccatgctttagcttaaaaagaaatccctggatgacttaaaactattaatgtcagaattttgataaccctatgaattgcctcacaaacggcttaccagtcatccctcatttgaaacatactaattcttaaaacagaaacataagaaactatagaattatagtgacttagtaaattgacaaaacgctctcctcacgagagagggatatactacacaaaagaatttttttaagccaatcgaaaggaatatcataggacttttcgagtagctattcctttgatccaaaaaaccacacgaaaaaagtcttttagaagattgaattcctccaaaatttctccgagaaccgaagggagatgggggtttgttccgtcacctctttaatttgctttatccttacgtacacgatactcgttaactatgtgcatcgatgatacagaggccagacctaacgaacaatgggcggaactaagattccatggtttcgttggatatatatatttaatggtggagaaataaatcagaatcatgtctggtcctccatgataattgctgcctgacatgggacgacatgcctcaacttgggggcttggttttcagctgctagctgctagcaaacgatgtactctctctgtccaaaaaaaactaacttacgtgagaatataatttcacctaagataataaattggataaaaggttgtccagattcgtcacctagattgttttttaagacggggaaagtaatattagtagtactccctccataaatgcttatattttaggacgaagtattatcccgcaaatgcatcagtagtataaactctcacaaagtcacatggatgggatggtgattgtgacaagtacagttatcagtgcaggcaagtgaagatatatatacaggaagaaatgggattaagacaagaatcaatgtatgtagatgctgttatattagtagttaatttcatgtcaggaatggtttctgcaatgtgcccacatgttgtgaaaatacttggaggatatctctgatgaatcaactgtgtcaatcagcaattgtatcatatatatgctctccaagtttccttcgttttgaaatttgaaggatttgtctagttggcgatttgtgatatgtaagaatcacaaattcagagtgtattcaggccaacagacaatctaaaaggcacatgatcaaattttgagatgttaggtgcagaaatggagatggtaatatacaatattttcgtaaaataagatactagtacaatgtattttttgtaaaagcaatgacaaattcagtatgatgtgtagttgtgtacagatccaagtgtgctggaaagattaacagaaaaaaagaagagagaattatccacacttctattgaactgttacagcattttgctaggataaatgcacacaacatacaaattccattccaggggttccctcgccatgctttcaatattcaggcctcagcaatcaagtcagggagaagcttgaacctgttctgctgcataacagagaaaactgaatacacatggacaggcaagtatgtgcaaagaatgaagaaattcaactacaaatttaactatgcattctttctctttctgtaaggactgaaattttatgattttatccttgtagccaattgatcagcagatcaagtcaattttatgattttatccttgtagcccttactacttgccaatgaagtactgtgctaaaaggtccgcgatagagtttttttgggaatacgcaagcggcgcatctttgtattaagaggaataaagtttataaacaacggatccgaaaactgaaaaaaagaaggggacaggttacaggacacagaatggagctaaaggcctaatctccgactagattttgcgaccgtggaaccaagctaggaagaggcaattctggcaccgctgcatttactaagtgccatagttccgcctcggcagccataaccttcgccacttcgacccaaggcttctgttgttggttgaagaccctgttattcctctccttccatattgatggagaatgaagacttattgatggaagaaataagagatcaagaaataactactttcatttgcattatctgctaacaacgtcgaatctaacagttgagagaagccattatcattcagtaaagactgagttatattacttatatagttctagcgagattaatctctacagggttgatgagaatagagaaccaacagcctgctatccgatggtgactcccggattatcattagaacaagacagtactgtactaacacctattagtctataacaagcattagcatggcactaactttgttgaaggtagcagaagtaattaatcaatgaggatactagctcacaagctcagtggtgagatcaatcattaaggaaatactacagagatacaagatgaaactacatgttcacttatatgttatatttttggcggacagccgaaagattggccgacaaaatttcattaagatttagggaagattattacatggttttgtcatgacattaaatgtcgagttgatggtggttaaatgaaatttagacaagctaattgtttaagcgctaccgaagcttttacatgaacaagatcacttttgattaaccaaaattaaagaaagatatgctctcctgtctaaaaattggcaaactgataatcttctgacaaacaggacaaaactgaaggcaagaaagaatcaatattatttggatatcattttcattctaagtttctaactaacaagttgccattttgtaaatcatattctaataaaaatcataaacaagaaaatcacctaacataactccagcatcatgcaaagcactttcttctctgcaaaaacaaacataagttaacttagttgatcacatgagctatttctttggaatctgcattgaagtcatagcgtaagaagttttccccttaacatttctagcataagattctcacccatctctcaacttctgatgctgattcagaaagtctcctcctaagaatggacttttctgcttcacagctctctaaatcaacatctgcataagataacaaaatgtccagaaatgtgaacacttcaaatccgaattacaaacatctacatataaaactctgtttatgccggctctacacatatgcactataaaatatatggataaaatatactgcatatggatgtgttgatataaaaatatagagaaacattggaaaatgtaacatagaacaggtcaaaaaatatatatatcagaggccttaatcaggacatgcgtaataaacatggcatgataaaagcgctagacaacttgcaagtacggtatcagaaatccgaatatggtaagacattttggtgattgggcagagatcagaataattgaactaagaatatggcatgaattaatactacttcattattacgtaaaggtcagaactttagatgctaacattatagtttcttatcacatgacagggttgctttatcagcgtggtacacacctatctaatctctatacatacccaatgccaacaatattcaaatttccacctgcctgttccactactagagcaaattcaacatttgaatggtacaaactaaaagcttgaaatctaaaaacatatacattttattaaaaataaattctaaaacgttgtaaagatgatctcatctcaaggacatgcattctaaggaaacacataacactgtatgtcaaacattatgtgttacataatgctaaattgcatttggtttgcattataagattttagaagcaccaaaagagataaataggagataaaacaagaaacgtttaattcttttcaattccttaccataatagtatgttgacagaatgctgatacgctcaataggctgaaaataaccaaaaaaaaaatgttaatgtttcatttcatcatttgtcatgtatgtaatacactttgacacgaagttcaagaatataatagaagtgataagattgcgtaagggttcaagtatttctaaagccatgcgtgttcagtgagcctgcttggacaaaacacacactaatgaggcaaaaaaaaaaaggaatatctatctgaccaaaaacttgaatacattattttaactacaaaccttttacagaggatttgcagcagagaaatcattatgtgatttaaggaaaaactaaaggatgttttatgcctacataaaagaaaatgctgtacattgcaggtggacgtatacataccattacaaatatgccttctctacgagttggaagttgctcaagttttcttaatgtatcatcaccttttgtgagccttccaaatacagcatactgaaattattatgaatcaatgtttaatcatttaagcacctggtatttaatcatgaaccactgaagaaattgttgaacacctgtccatcaaggtgtggtgcatctccaagaaggatggaaaaggaagaaccaccactgtttggatcagagtgccttggagaagggggggaaaaggtgataggtgatgttatatcattgcaggcatatgaaaataagtgatttcataaaaaaatcaagataaacgccaaggaaattagttcatgatattttctaggactactttgcccaataactatcgcattcattttgatttagacaaatagacaaattaactatggaatatataaaggatcttcttcaatacctatccttttatcaacctggtaatcattgataaacttttgagggattacagaaggtactacatgctcatgttgttttggctataaccagaaggtagcaaaagtgatctgttaaaacatcaacaatgtattcacaaattgacaaaggaaataccttcccatggacagaatccccctgacatgcttgacagtactaaattcaccaacaaccgatttctctgcttcctcttgctgctcatcattcatgggggcagttctaccacccacaacagaagcaacttgtgcaacaaaacccttgtcaacctgaacccagtcatcgaccctttacataatgaaactgacaaagtcgtttagcaaaaatgaaaggttagcactaagaggtaattacccggaaaaagtgatttgtgttgtagcacccaagcctcacaagtttgtaaatgtgttcaactgtcttaggagcaacatgaggaaagaagccaaactcaatgtcaccatgagttgtctgcagatcaaattgcctaatcagaaataagaacagatactaccaactttggatgctatagaaccaattttgcctagtgtgtattagctgcaccaggacattagccaaggcatttcataacaaattgaaaaataaaatgatgtgatattataacaccaatacgagatatagaatctgaaatggaagaacatatccaaaatattaagatatcctgttattttaaatcctgattaacgagataattagcttcagccctgtcaccggcttaaataataaagatgcatacttcctcttcctcgtaagtgttcttgttcatttttaggaaatcagaagtttgtagcaacgaatgccacatgagactggttgcctgatcggcgtcctggcattctcccaattgcacactaggtggcatacatctaaattttaacctaatcctagtaaaatctcgcaataagcataggaacggacagttcaacactgcctgcgcatgaggattgacaccttgtaccccttgttttgcaacatctaattgcaacacaactcttaaatttccaacacagcactaaaccgattctccaacagtcggacgaatctggcgaacagcaagagcaacggcgtcggaattcagcgtagatcttcactcacaactcacaattccgaaatctttgatgagcctacgaatctgaccgtgccaaaatccgacttttggccccgttttctccatgaaccccggtaaaaaccgctcctttcctccctgatttagaacagcaactcgggaaaatgagggagatcgtggcgaacctggaagacgacgcgggcggatccgaggtttgggtccgaggcgtagaagctggtggcgccgtcggtggaggcggccgccgcgatgaggaggaccacggccgccgccgccgccgcggcgtggcggagcaaagccgccatttttttcttcccagttcccacctcctctctctctctcctctggtttagctgcaattgtgtatactgcagaactgaggagagacacaaagacaagtgattttttttaaaaaaaaatggttatccacaatttcacaatttttggcaatctttttacatctcagttccctttcttcccatcacaacccaaacctccaggacagccgccaataggtagggagaatagtgttggctgacggggaaaagctcgacggcggaggccgctggccgacgtggctcccaacaatctggagcgcgtgcgcggtgcggcctggtcctacctgtaatggcaatgtcatctttacctacgcgcatgagggctggggcttccgccttgtcaccttgggcaagctcctatcccggcccccaagctcaaagccacccccgccgagctgctcaaaaaccgatgtgttcagatatccctgagctctgcctctccttcatggaggagcactggtggctctaccgcatcgtctttaaggtcaattccatcttcgcgccgccttccactatcaagcttctcgacagctgcaagccttctccccgcccatcgctagttgtcgtcgtcagggttctacctaccgccgctgcccaacggccgctgcccttctccctatcggtcgccagccaccgcacacctcttccgtgactcaacatccaatgtcctcttcatgcgcacggacgctcatggagccagtggtgctcgggatcgtgctcaggcatcacaatgtactccatctcctgtctcttggagatcttctcgccaatcccaatggtgtggctgacacgcgaccctgaccgagagagggaagagcgcgtgcgctacgtggatccggtctgcggcggcgtgcggaggaagagatgcgacatgagccattggatctcatgatcgtacgatttagtattgcgtgtatatgtcagggttggagtcaccgtcaccactatgcttttttttaattatattagtaaatatatattattccttccgtcccattttaagtacagttgtggttttttttccaacgtttgaccgtctgtattatttaatttttttatgattagtatttttattattttagatgataaaacatgaatacttattttcttaagtttttcataaaattttcaaataaaacagatggtcaaacgttgaacacttcaacgtaaactcacaaaataggatggaggaagtatgtgctaatttaccgttctgatttacttgtcgagggaaaaggttcccaacacccttagcttcaaactcacccgagttcttctccctccatccaagctcaagctaattagccaaacattgaattcaacatgaactcgggttccaataacaagttggaaaactgtcctaaaattccaactgatgtttttgcaaggcattcttccatgggcccttggagcccaacgggccgagccggcccaaatccttctctcttaaagccgaacctgatctcgtcactcattgaaactagcagctcttcaccgtcagcaacaacagcatatcattcattatttttgtcttatttttctcctctttttttgcagtgaaattaaagcttctcgatttcgtcttctttttggccatctctcctttggccttttggcaacctaggtagcctctcgatcgatcgtcatggcgtagaaatcatttccatgtgttgtacacggtgcatcatttgtctgcactcgcggtagagtacacacgtacatacgtatacatgtattttatgtttgtatgtatgtattgtgtatacctccttttggtttttggtcaaaattaaatgatttgtttgtacgtccttgcacaaaaaataaagccattcacgtacctgacatgcatattcttcctagtatgatgatgtgtgtacgtgtatatatgctttaactttggagaagaaatatttgtaacgaattttagttttaaaaaaactatgggtttgtttagtttggaggtaatttttaccctactaaaatttggttacttagtaagtcttgacactatcaaatttgattgtagcatataatttgaactagtatgaacaaacattggtagcaaaccaaatatttgtttgattttagataatggaatagaatatccccgtctttgctcaacgacagcaagcatatcattttgcttaatattcgtttgatactactgaagttgccgaaattttattcatgcagaaattggctccaaaaccaaacatgccttacatatcttgcggattttcaagcgtaacttggcgtgcagataatttttataattaagttcaattagatttgatatacactcttgcttgtgtgttctctacaagtacattttattttgtaatataataactatatacataattaatcatcatcgttcagcgtcaaataagttgattctttgtgtgcctttctgtatgtttttatcagcctcatctttttattatgcttatacttattagctaaaatttaaatttttaatctaaaatttaaagttgattttagggtttttcatcgtagtttattttttagcatttgtttttagatcgttaagaaaatgaatataaaaattttattcacaaattatttttcatttttcatttacagatatgttgttttgctttttttttctccaatatgccaaacaatgggactatatacagatatgtaagcgggccgacccacaaatctacttatttgtcaataagtggtaatccgcgggttttcacgtcatagtctggcttgccgcacctagagatataagtgggtcgatccataaactcatttatagatcaaattagtaggtaacccacgggctatccactaattttgcctataagcagcttagcctgcttacagcctgtatatttttattgattgattttgcatgtatatatgaatgcatggtatatgatgcatgagcacaaatgtatatggttgcaatgcatggtcagataatctatgtcatgtagcatgatgatgtacacgtatgtacttttggggctaccctctgtggtccacggtatgacgaatgcagaagtccagaaaacgaaaaatggacgcttaaattagtacgttacacaagtatataccaaaaaatgcatgtttgcattgtgtgaaggaatttcagacttttttcagggtgaaatgatatatcaatatatgtgttcagtcatatgcctggtcccaaaattggaaaactaaatattttaccatgcctagctaggcttcttcacttgttaatttgtttgtttgtgcaagtgcactccaatcatcagcagtgcatgccttcataattaatttacagtctagattgcatgcattgctagctactttctggtttcagattgatatgtaaagctgcattatataatcctgttatgtgaatacatcatctgtggtgtgcatgtttacatttggggccacttcatataaagtccatgatgatgtgaccaaatggaacactccaaataggggaaaagggtggttataggctatacggccagcaattttggaaggaaataaatgtaaaccataattgtttaacaaaggcctcttagaggaaaacacttttgctacatcctcacacatgtcgacgttgaaagaacatcctaaattttcattaaatgtccaagaacttcgatgtgacaacgcgcataagaaaaggaaaaggggaaaggtaatctagttcctccgcgtcgtcgatcaaatttttcgtgagtacatgatgcagtgtaaacctatagccctttataaatggacaaattattccttctctcaccctctctcaccatatgaattgagcatccataataatgcaacaaaaaagctactgaccaactgtttttggaatttcttggacactggagggataggatcaatttggccactttttccccagaggcatttgtgcccttgcttgtgtgggcccccagctgcttgcacaccttgcatcatgcatcctttcaccatttgaaacccatgagcattttggcatgctttgaggtgttcttggtctctaagcaatctccctttttttttcctctttacttgccttgccaaactacaaggcctactcttcttctctcttagttacatggaaaagacaggccagggggtgcctaggctattaggtgtgtgccttgtgcactctatggtccttagttgtcatgaccccaagaatgggctcaaaagactttagggagaaaaaaggtgccatggagtgtagtactagctacttgtacgttgtttttagtgggatcaagcctctttaattttatttttttccgaaatggagtggcagcatgctgcgtgtatcaacaaatttgaaagcaaaaataatgtccttatttgtgaaacttaattttcacttaagagtagtacatacgtaagacatgttcaagatatatataggaataataaaattaaaaatcttgtaaatataatggcacacaacgttatcttaaaaaaaaatgctccaacacttgaataagaaagagaaaaaaaatatgtttaaaacttatctagaaaagcaaagaaagggtgagtcagatcaaatgcgggtataactcacgaaattgtaaaaatctgtgtgtgtgtgtgtgtgtaagaaagagaaaggcagatacaaagagagagatatagatttggaactatccatgaaaattttcatgatctcacctcattttcgatttccaccaaaccatatataggggaaaataccaaaagagaatgaggaaacatttctccattttcttttactgaaagtattataggggaggctctcatcgtcaaatttattaaaagatgttatatgtgtgtgcatgtattctagtgacggttagttaaaaaaaattatgtacaaagattacaacaatattcctccatttcgaatattaaagaaaatattttgtttggattaatacatgcaattctcccttttcttttctcatttttcctttgatccaaactggttctaatgaagtattacttaataatatttttaggagagtactagctacttaatattagccattttttaggaattgtttttttaaaaaaataccttatgaatcacttgaagtttgacatttcaccctataaatcattttgttgcaaatatttaccccatacttgttgttgttattgtttttgttgttgtcagtccacacatgtttaactcaatcaacatgttttttttaccaaaactaaacatttataggagtacacttttcttggagattccactaatagaattgttgctgagagcttaaacattatcgtaccgagttttgctatatgtataaaaagtttaatgaaacatgaagaataagtctaatgcaagcacttggataaaattgattcggctaacttaacctgtggttactctacatgagcgataaaatgtctgattcggttaaataggtgcgcaattgggtggtttttataataaaaccgaggaggtgggggtggatatttgtaacaaaaataacttaattatggaatgaaatattaaattttaaatgatttatgggtggttttccttttattttaggaaatattagcgtggttaatatgcgtagacatatttggtcaataaccagcagtgaatttgtgttcatgaattgaaaggcaagctgggtaagacactcagctcgtgtcatcatcattaccagtcaaagtgacttaagactgcacttacgtgcgtactctttaactgcggcacacctaattaattcgcattaaccagtcaaagaaaattgagaatatctctttaagtggttgattagctaatattttttttaccctgctgtcaagtgtgcatatatatatgcacgctgacacgcagtcaaaacataccaacaattaaaatgttgtatatttgcctctgtcaatactcaagctagtcactgtcattaaccggtcaaaagtgaattaagagtgacactcacgcactagttaatgctcctatagcccgccaagccgccggcaagatattaatataatgttgaacttttttcataattgtcggtctttccaaggctgacacttgtcatgatctatcatgatgctcagtaagaatggattattggcacaaaattattttctaattatttatgccgcacttcggaaagtgcattttttcaaaaaaaaaaaaagtcaacatctgcatttttctagactttgttttaagctatatgttagatttatctttttttaacggaaagatttcattaaaaaattaaattacaaccgatctctgcaactatttgttagatttatgatatattatatttaattctttcatatataaaaggaagataattcatcgaccttctgccttcatccacatttctctagtattataaaaattgaagatattttttgtcggtacttcgataagttatccgtgtttgagtcagtttttaagttcgttcgtttttgaaatacagttccgtatttgagtcggtttctaagttcgttcgcttttgaaaatacagaaggagttgtacaagaaatctgtttaaaaaaacccgcatgctagcttgagacaattggacacttaattgcagctcatgatttatatatatatatatatatatatatatatatatatatatatatatatatatatatatatagtaaatttgtttggtgctccatggtgcccgtatataacaataattagattaaaatagtcttcatccgttgtaacacattcacgggtattttttctagtcatctaaaaaattaggccccagtgcattaccattgttacacggacaaattactccgtctagttgcaagaacatgtaccattctagacgcaagattaaaaaattatgagcatcaatatattttaaaatatttgacatgatgttaacatgtgtaggtttttcacctcgatcaaaggcaccttcataatcttacaatttcatcatagtttacatttgcattcatttacatcagtcatcgtttaaagttgcattaattaggagatttaaattgatctctgaataagttagtatatctcttcatttttttctgttttggacatcgatgtctaacgacatgctttgatcaggacggaacagttaaaaccatccaggatgcatcatatgtacgccatgcattttcaatttaattaccaccacgcatgaataaatgattgtgactagccggctttgctacaagattaaacctaagcttgtttttttaataatgacctaagcttatatatgaaagctcctaatatctgatgtgacggtggccgtggaaagagaggtttcatgaatgattgcgtttaattttttttgtccacgaccgaaagtattgacgctgtgttgaacggtgtggatcatcacccatctctgatggagatggcacattggagatcatcagagagtgatcactagtcaagagctagcagcaggaacagaagaatacacacacgacattagtggtaccagccatctattttctatataaaagggggaagagaaggagtctcggagacgcgtgcatggatagatgagttcttagctaactgtaagacacgtagctttctccctgattttgacatgcatatgtgtagtttacgtggtttgttcacattttttggtcgtcatggttttttgtttgttgacgatgtcaaactgttctattaaccactagattggctttgagatcggcggtatggtctaaaggtttgctttgagattcgttattaattatatggtttattttctgggagctaagtaaatggaactgatcatggtggatagtgactgcatatacatgtttccttctacatgacacaacatgagatgattagtagccgatcacttcaaactttaccttccaagctttaacgaagaatacttagggagtgcatgcatcgagacaatatttgtgcatgtctacgggaagataatctagtctggattaacatgtgttatatattaacttattttgacccatagcaagttttcttaccctagctagtagctatctattttgacacatgtccttgatcgatcctagatgaatgaagcaccggtcaagatgtactacatacacacgcacatgcacaccaaaacaaaatgaaatgtttctaatcaataggaaaaaaaagttttccattggtcaacctctttagctctagtttgggtttgatttacaccctataatgtaatacccagtggttaattaaatccgttgcaaattatgtccatataactgttcaagcgagcatttcttttggggcgccactccatctatcaattcttttacacatgccatcctcatgattaaattaattaattgtagaattctcgcatgcatgcatgatttcctttcatgcatcgatcatcaaatcgcattggcccacacaccatgtgaaatgccaaatcactcaataggctcacaaccatccttggacatgatttgcatttttttatagtaaagacattttctaaattaaacaatatcaaataaattaaacctgaactaggattgatagactaaaattagactttccttacatctaattaaacaagttaaactattcatatccccacaatcaaaagattaaataccttcttggaacgggttcgtatcctctaccataatggtactaccattataaacactaacatgtggggtaatagaatagtgtgacccatgtaacagtgattttggaattttgcatatggatttttttttgctggattttaatcaattgatttaattaaaaaccctgcaaaattctaagaggtctaaacttaaactactcattcaagcattaactgtaattaaccatgcacatatagtaacagcttctagctgcgtcaattgcgtccctctccttctctcttttcagattccatttcaatatatatatatacactatggcacatgtgggaaataaggctgccaaactctcttgcaagtggcaagcccttattagcagggaagcaacagcagccaatccaaaggccctcgtcgccaaagagactggttccgttcagttcatcgccgtagaaaaggcaacagcgaaagcgtcacccccttcttccccgttttgagtggctgccaatagacctccggttgctgtcaatggcggaaaaccccccctaaaggttgcaatcttcatgcatgcggtgatctgctggagctagcaccaccggcgccagccgcctgtcggtgtcacgcgcagctagcgaatagcgataacacatatataccgacggggttgtggctgtacttgttgatatatctttttctccgcagcaatgtgcggggtgttttaaaagtaacccttggcacgtcgcccgttgtggacggtcgttagaacggtttccccatcgtggcaatggtgttgtcactaggacatctctccaaggattgttcttaattggcgcgtgagcttttacttcgtgtagagaagtttagggtgctggctcgaaacggggtttgctgcacattgtgtgatgtgaaaggtggctttgttagggtgtggctgcgcatcgagggtgttgcctaactagaaaggttttgcttaggtttgcaattttttttaggctgaccaagataggtgtcgtggcttgttttagtggtagggttacttagtttagcacatgagaagattgataaccaactttaccctactcatttacatgcagcatgtacgtgtgtgtatgcatatagctgcatgtgcatatatatctaattttttgaatcaattaattagttattttgttgataccaaagttatcttaacttttaaaggaagctaaaatatatttaacctgacttgctgaatgtcgtgctttgcaacggatgaaagaaaatatactataatattatataaaataaataaatatatgttttccacaaaatatggtgttcctatccttttgctctacgaaatatttatcttaatttgattttacatgtaattatccatttagatttgattgtcttttaatattatgaagttggaatagtaatttgcaaaaattacaaataaagtaggtgagttggcagattaacaaccaccacgactactttttttttaaatactaatatagattatccactaacaatgctttccaggtggtaataattagttcacgccctccctctaaataattaagcgtcccaactgggatttcaatagaaatttagtgagatcaacgatgtatcattggtgtttcattggtgtttctatctctttcaatgcgggttgattaggggacacatttatatatgtgagcgcgttgaggactgaacacaagttctctacttaacttggttatcaaataattagaaaaaagcttgagcgtgttgagaattgaacacaagattatattgaggtcaaaatcataaactcatcaccactacactatcaagttcatttcttctctactgtgtaattaaacttttgttatagtgtgccaataaaaaggaatagggttaaagctggccttctaccaaatattctcatatttgtttcatcgtataattgtttaacattgtgtaacgtactaaaatcaatagataattcggaatgatatatatgctgtctacctcaggttgatccaggaagataatcataattagacgaccacaacgtgagatatcttcaaaacctttggagacgcgtgagtacgcgttagacaaaatgaaaacttaattaccatgtgctcgtaaacgttagcatcacgaggactaagattcaattacgctcatgtactctccctttgaccatttcaacttaaaattgatgttttctctaacttagtacttaattaactagtaatttaatatcattaacatatactccctctatccaactgaataaggcgtgatcagatttaactcggtctccttaaattttttatatactataatgtttatagcaacaatataataatcatatgagagcaaattcaaatgttaatataataatattatttttatcaaataaaatttaatttataataaattattttttgttcaaatgcttaaagagctaaatcttattccgtgggatgaagggagtaatagtttatctaaataaagatcagttgaagtttctcactttatacataatgcatcatgtacgtaattaaaccgagctctgtgatgaaaattgtgcagtagaatttaattcctttaatttcatttggcctctcctttttggagttcgaggtaaatgtacgcaaggcaaaatcatccatggtacaagtagcagaggaacaaaaacggcaggcagtacagagtacactgtcaaattctaccctttttgggaatgaaaccccatcaaatttccatcgtggagaaaagggctctgtgcctctggtgcctgtcccttttgcctatcacaggataaaaaaggcaaggaccacacagcaactactagtgtaaggttggcatacaaagctgcaaattcaattgccccaatttactactactagcattgaagtatctaattaaaaccccacattaatgtgggtaaactctttgcgcacataaacgcaaattattctcgagaggaagaaccaacaaaataaacgttggaaaaacaaacccgcttaataaaaagaaccggttacgtaaaaaattcaaaaaggacgtacgtgcggagattggttatgtggaattagcgattgaagatgtgcgtcgtggttattccaatgcaacctttttggagttaatgttaatatctttacctgtcagttgattgaacttaacaaagattgactaggaaaaatatcaaataacctataatatgaaacggagaagtattttgcaatggatcacattatactagtgtatagtgttggggttggggaggagttgcatggtacacctagcctgagaaccaaatatgatggtgagacactgagtcagtacttctgtactgccttttgctccatccaaaatgttttggctcgagagaagtgtacacaatttacgagagtaacaccagctatcaaagtagtcctaagtattcacttgcatcatgtatgagctaagcttcaccatcgctttcaactaacgaggggtaaagtggttagtttcatcggttaatcaaacaacattggagaagctgtaactctcgtagatatatttgttctattggcaaagcctgatacacactcaaatgagttgtgttgaacctctcttctctctgtaaaaaacaaacaatttctagattttaatttttctctcaaaatagttgttttttctctcttttacctatcctctatttgtaaaatgagaagttttatccctttaatactccttacctactcaaccaccaactacttttctattaatgattttggtcatttttcctcctactaaagttgtcttggaataagagttgcttttattttggaatatacacagggactacatgtgtctaggagaagctgatgacattgtccattactagtacagtagtacttaagcttttcctcttgttcattataaaatactttctaaaattattgaaaacgaaatattattttagcctttcttactagcatactttgtataaattctgaaaaaaaaggcttgaatatatgaaatatatagacaagcttggatttattctatatttcttgatggcttaaaaatgaagaaaaaaagaggggagaaatcttcatccagtctcttatgggtgactgctaccgattcaataagagtttggcctaggaaccattgtttaagtcggtgttaatcatatctttttcattggaatatatcgcgtaaggttcctattgcatgattaaaaatacatcttcccactgccacaattgataatgtaaatattccattatggcttgacgaactgttaattgtgactattaatactatgcatatgttgtatgttgtcgtgtagctctttgaacttctatttaacgccttctatccctttgcgacttttcaatcgcaagactgggatagagggttttccttttgctcccatgtaaccctccttcgtaggtaatgttattcattcctatcttctataccacttattttcataagtatttctcatggaattcaatctccccctctgatctcctttcattttctttgctttcaatactctggaaaatctcttttaatatcccatggaaagtctcatctagaccaatgttgtatatttaaatttgtgtcactagcatgttgtttgtgcgttacatgagattttaattaaagaaaattatcattaatcagttattaccatcttttctgtatatatcatttcttaattgctgcatatatttgttactgacatgtgaatcctttgaccttacaatatactttttcctccccacagaaagtaaagagttgttaggggtggttgacatgtgtgagccctctagccccacctatcttttatgttttatgctctcaaaaaagtagggagttggtggtgccaccaccacttcctccttttcagagagtatagatatgaaaaacatggtctagtatgtatgatattttgccatgttggagatcgatcgatctataagatgatttaagatagttttaagcttcttactcatatttatatttttcttctactaaagtttgacaatttacatttaaccataatatcatagcatagccatctcgatgttttcattgaaacatttttagacacacacatgccgtttccttcccaatcaaaataaaattctaccaaagtattttgttgatacttatgcagggaaaaacaaaacatcaattgttagatcaaacatatgtttcgattcattgatgtaagatatccagccacaaaaatatcaattaattcaccagctttcattctcttgtaaaaaaatattaactctttgatgggagatatgaagttgaacagtaaaaactgcaataaataaatgcaaaccttatgcatataaattctaacatttaatttaacaaatacctaccaattatatatatccctaacattaatacataaacaccatgtatatgtgtttaatgttagagatacaggtggtgatgtgtaattttgtctataactattaatgttagggatacgtctagtttgtattttgtttgatagcatctttaaccgtacattcatgagatgcaggtaaattaaatgtttgagttatatcttgtttgtatttttaagatatgtagatttttagtgttggagatacaattgttatatatttaaattcattcatgactagagatacgattaaccagatatattcatccatagagattagtgggtatatttggttgatcacatctgcagccatcaaagaatttaaagatataacagttatatcaccaacattaaaagcctacatcttcttaagcatatctttaaagatacacaatccagcaaaaaaaaatacaaacaagacgtatctccaacatttaatttacctacatcttttaaacgtatcgttaaagatatcctctgacaaaattacataccagacgtgtatctccaacattaatagttgcacacgaaatccaaaaatatacacatcacccccctcccctacatctccaacattaatagatgaatttccctcacatctcccatgtgtgcatgcatctttttttgttgtttgctggttgtatggttttttggtattaggctaaaactgtggttaaatcagtggtataaaaaggggtagagggagggtggcctccatcagtcaccacaacccccccccccccctctctctctctctctcctctcctccatatttttctttctcatctcatcacacttggagtttgccaatagaatacaaaaacagcaggtgaggagagaggagagaaaaaaaaacagagctttctctctctccctccctctctctctctcttcttccaatctgcggcgcgaggcggaggtggtggtggtggtggtgggcgccgccggcgagatgggcccgtaggcgccggtgtgggcggcatcctgtcctcgccgaccacccgcccccgccggtgcggcctcgccggcaagaagtctttgtttttcttttctttttttttttcatctttgaaggtgcgtcgccgactacctccttgtgcttcaatctcggttcgaatcgaatggaagattttgtttttcgtgagaaatttcggggcttgagatgaacacatgggcgctcgagccaccccggtgcttgtggggagcagacagatttttctttcttttttttttgggttgttgttgttgggtctatttgatgcagggattaggttgtgtagatcttgtttctgaaacgcttgcagtttttttttgcggtttttttttctgtattggttctgatcgttttgtgtgctgtcgttgcagattggatccttaatttaggggcgaaaagaggggagtttgcaagaggaatcatccctattgggttgtttcttgctgctgggtaagatccaatccagcctctaggttaggtttgtttgctgttggtgaggagattgaagggttggctggtcatgttgggggaccagcgcaggaaattcctgctagagtcagcgagctcatcatctgaagaggttgtttcaagaagccggaaccttgcggttgagagctcggcggtggcggtgacggcggcgggggtgaggaagggagaagaggtggaggaggaggagctcttgaaccgtagaagcaagaagaataaggttgccagtgattcggggaattccggtaccggagtttgggactcagaaatgcaggatgctgatcagaatggtgaagccaacacaagcgagctcataggcgcgatcgggcgggagctggccattacatgcctgctccataccccccggtcttattatggtatgatagcatgcctcaaccggtccttctgctcccttatgaggtccgggcagctgtatagattgcggcgggaggctcgcattgttgagcacatgatctactgctcctgcaatgtgcttgagtgggatggctttgatccgtgccgccagcgctggttcaacatcccttccatgcctcccatagagtgcttcacgcttgctgataaggagtcccttgctgtgggaaccaatatccttgttttcgggaagaaggtggaggcccatgttgtgctgaggtatagcctcctaagtaactcttggacaacaggagatatgatgaactcgcccaggtgcttgtttggctcggcaagctttggtgagaaggcaatcgtagctggtggtatcggtgataatggtacattgagctctgctgagctctatgattctgaagcgaagacatggaccactctcccaagcatgaatagggcgcggaagatgtgttctggtttcttcatggatggtaaattttatgttattggcgggaaagctgataaccataatgagatccttaattgtggtgaggagtttgatttggagaagggcacctggcgtttgatcccagatatggcatctggccttaatggcggcagtggtgctccaccacttgttgctgttgtgaataatgaactttatgctgctgattatgcagagaaggaggtgaggagatatgacaaggttaataatgcatggatcactcttggatcattgcctgagaagtatacatcagttaatggctggggtttggcatttcgtggttgtggagataagctcattgtgattggtggaatgagtgcacctggtggtggagtgattgaaatttgttcatggatacccaataatggacagccagattggaaaatcattggcagccgccgttctggaagctttgtgtacaattgtgctgtgatgggctgttgacataccagggctattacattattgactgtacatcttgaccaaaaggaaggataaaagaggcaaattcttctgagcttgtttagtgattgtgctcgatgggtaatttctgccttctctggcattttaggctgagctgaagattgggtagaatttctcatgtagcttcttacttgcttatgtctaatctcttcattttaattccatttggagggcctgcaaatggtttccagaaagtgggacatgcagcgcagcattagattaataatttggtgcaacctcaacattttgatctaccttggataccttcatgaaagttttttagctccagagagtagtgttacattggcaaaccatttgcccatagattgtaagaaataaaggaagaaagaaaaaatgtccttgttgacgattattgccttgttttctttgcctcttctgggttagctgtgactagcgaacattgtgatttttttgtttatttatgaattgagttgttagatatattgagtgataattgcccattgactatctaaattatggtgtctgagttgttgattctgtgagattcacttgtggttagaagaccatcattggtcttcgtgtggcctaacattctagttttggaagacaaaaggctgcatgagattaaattgacattctgaacttgttcaatagacttatcctccgtgtagtatttattgtatggtgcctgttgttaacatacttgagtttggaacacagtgtgttccctcattttgtcactaacatttaaacatgttcagcttagtacttatatatgaaattatgaacagcatttgtttgttccatcttaagactttgttatgatcaatttaaggaaactatgttagttaagggcataatagccaggagtgagttgtatgtttgttgagttaatgcctaacggggattaaaccttaactacttcagcacatttgagctacaagtttaggctaggactaacatgcagcttatcttgagcttattgaataagctcctggataagcttaagctggtgaggaggtgtctggttgacaagcagaaggccttatacacttgcacattggaggaaattcagaaggccttgtacacttgcacattggatgaacttcagaaggccttatacacttgcacattggaggaacttcaaagggctactcatgataagtgctttctctttttttattatagaaaaaatatcatgcttgtcgtatgcatttttctcctcatctgttcaaaagcaaactaaatatgtgttagattgacatttttattgtctaatgagtccccaggcgacagattcttcttacatggagtcctatggtgcagtcttttgaagcacatcggcagtatttacctgaagtatgataacattgaactactcttccatatgggcttgacattacatgtgaatagtgagtactgagcagaaacaacaattgatctactgtaacaactgaccaaatcagtttctgttcattttcttttaataataattgtatcacaatcccttgcgaattgaaaacaataagtataccgattaccctgtgttgctaatggggcttaaaaaataacagcctacaatactttgtctttgcaggacacattatgagattatagataatcttcactaagcttatgtatttatttggcgtagttatttgaaataaaaatcacatttgtccttatctgcatatctttgtttcctcctttttgttcgttcatatataccatgggcattttgtggtagtctgtgagagattcttttgcgaatgacatttgggaataaattcttcatgtctgcctggctaattttcttgttattcttcttcttttcaattgacttgaggccaatcatataggtcattagccacagtgaatatttacaaaatttaacatctgtgtgcatgggcctgcttaaattcaaggttgcccaattttttttctcagtgttcattcttatggaaaacctttgtgatgctgaaaagtacatatctaacactttaggctatctcagagagcttcaagtcggatgtcatatgtggaacatgttatgagttagcaggtagtttgtggaatgcagtattcaatgtaaccaagttagcagtaggaattattccaaatgttatggcgtaatcctgactaataaacaaggtttgcatgaacagaagaagaaaggaatatacttatctattttattgcttcatttcatgctctgtgtcactccaatgttttgtagggaatacagataagattcaaagttaacagttattttagtgggtatcatgcagttgccgctttgcttttctacacagttaacctgctataaattcttggttcggtcctggactcctgtcagaagcaggttttgcatatcttgaagttataatttcctctttagtgctgttatattcttaggtaacattaaacttcatattgatgacactatactcaactgaagtgcatcgcagtttcagttgctaacctgctatatatcaatcgtcatggtatgttactcctatttggagctaagatattacccctttctttgtttaggttttcacgccttctacagcatatgttgagttaaaattcatgaaaaggaatccgatgattgtgtggtgtctctggcatgactaggtcagtagatgattaccacttaacataataacatttattttgtttatgtttatgctccagagatcctgctacatacatcttttaattacccttttttgcatggtatcgatggcattgtttatctcatttctttaattattaatacatgtcaagtaaaaccacttaatcctctcttgtgatattcagtatcatacatccttccatcttccgagtttaaattgtccgtcaagactgttgatagatgtatcattttctgttggctggatcaaaatactgttaacatgtttaatcagatttaagtacctttaaccatttagcaggttaatagtagttagtatttagtaacatacaaacgtgtaggaacttcatggctttcaggctgtcttgaactgtgacgtttaatttatatttttgtggataagccatttctaaatacaaagtgacttgggaattggaagcaaggtgtaaaacattcaatcaataagtactgctagttgactagcaatggtacattatatttgaacttgaagttcatctcgatatttctggagtcattattgatacttacttaatagccctacttcataaaacttgatcacaatatcttgatatgaggttaggaaattaggatcataatataagacattctcatgcactttgtggaaattagggtgtcggtttcatttggtttttgctatgtgtagtgatgaatttattatcccttccccaaataccttttgtgcctttggctatttgtccgttgttgtgagaagtatcttgaagtggtttgtctagtagaatagacatgatatgattacataaaaaataattcaaaatataaatggaattatagtatagttcatcatgttaactcttatactagagaataggtcatttctgccatagtatttatctgcatcattactgcgagaggagttttctttttcatatagaacaatgggaaacacttagttgttcaaagcaactgagaataaagcttggatcatctagggtacaaaaaaatgtctgtccacctatgaatttagtagtgacagctgcattgctttctagactagttccttgtttgcttgagttaatgagttcagttatgtagctcaaactagacccctatgtttgtagaattttactaagcattgaagcatatacttacaaatcactgttgatattttatgataatatttagtacatgttattcacttctgtggctacttgtgcctatcctctagttcctagatattctagtccaatgaattttgcaccattttagttatggacaatggagtaggtattttatgtccctctccagagaatggcataggacctgctttacattttggtaatttgcagacctgctggcaatacatgaatttctactttgccatcatacttcggtggtaattattctgctctaagctattatgagattaaaaatgtcaaaatgcaaacattgaagaatagtcttgtctgcatagtctcataatcacaccctggtcttctataatttgccaaaattattcacctgagctatcagcagttttcatacccatcatcattttgccagcagttcttttttttgttcaaatataagtcaacatgccatgttacatttagttttttttttttaaaaaaaaatgatgttgcctatttgttcacattgctttcttttagcatttgaatctaatgacatgttttccccttttgatgcctaacagaatttgaatttactttttgtatatgtatattgctactgcagtattgttgatatttctaatatgtttggttttcatccctgttcaattatcaaagcaatttttagattgtcaagttggttttacaccgggggcaatattttcattgctttgatcttttgattcatggagaagttagaacttagaaatgccttctttactagggataatatcagtggagaacaaattaaagcacggaacaagcatataaaatgttcttgaagaacttttccttggtgcttcacctggagaaccaagaaaagcagaagcagaaaagacaagcaatcaaacaaacggtgttactcagaagtgcaacaagcctctcaaagtagaatcaaattctttcccattaatggagatatttttaattatattaaaattttaattataaatatttctttgatccagagaatccccattccgttcatatgtgctgcaggattcgatttggtagaatctccaacagaaccactccattaggagcatatgtcttggtggctacatgatgatgaaagctccaatatccaagatcaaatttcaactctgtaaactatctacgcgtggggatcgaacggcggtatgtaaaagcttcccatttacttgattgaaagcaaatttatatacagttctatgatgtaactatgccatgtgtcattttagaaattccctccaaaggaagctgggagcataaagtcattgctatggaatttgtcctgccctatattgttcttgatacgcacctacttggagcataaaggtgctaatgtcactgctttatgggcatgatgtgtctatattttgttggtatgaagtccaattatgtgttttccctatcaatttgcacaggtcacaacccacaagattagatgcaactcactcagctgaggggcatgtgaatcgcttttatgtggacgttgcactagctcttgagaagacattagcattaccgaacatgtcgaccccaactgaacatgcaagtgaatgtgcatcaggctcgtctcaacgctacagtttctcttcacttcacttcacttgtcacttgctggtcgagtcgaaaggctatgccaatggagacctgtaagttgtttttcaggcttactactttcttggtgctgtcatgtcaagaaattgcatactgcaagttaccaaacattaactgttgggaaagtggcgccttttgcgttagcactaatcacaagttggcagaatcgtggcatcttctgctttttgcagttccctcacttgcggtccataacagagtgcacaactgatctggtataccctatgattcttcaggtgtttccttttcttttccttttgagagtccttggtcttcatcgccatgtttttgttcattatgtgcagcaaatttaagcgatgccatcttagcgtcaactattcgactgctaggttattcttacatattcttctatctttccatagggttacattttaagaacttgcacatagatcaagatgtgttaccgtatgaatggcactctatctttcctttgatgaccttagcatgctccaattcctccagcagtccaacttgctccacctattaaaagaattcgttgcggaggaccttccaatctcgagattcctcgtttccatttgtccatccaacattcctgaaacatggttctggtttttaatagttaggatctttgtttttttactcgaagagcactctggccaatgtgacattcttgccatttctcatatatatgtttggcccacatcctaatatatacccacttgtcttgagagaattgcataagtgtggaagatgctagcctatattaatataatataatgcccattcagatattcttttaggagcctatgggtatagtacctattcatttgacaacaattgatataggtgataattttataagaagatgatgacaatggcagcataataatttcatgatcactagtttcagaaagtgaatcctaaaaaactagagacaattctatgtggtgtttaaggaggccacgattttattgcctgcttcatactcccaccttttttcgaatagttgacactagacaacatgactcttatttcaaaactgaccaacaaaaaaattattatattattctattttgtaggttattaaattattaaaaaatatattatcgtattaagattcgttccacaccatacttccatattattggaagttccaagtaattctaaattcgttatagagaaaagagtgaccgtacttaattgaacactagtgtccatacatgctatgccaataagttttatgggtttgaagaccgactgatcaagtttaaattattgaacatggacagcatattttgctaagtccatgaaagttcactcatagcattgctcacttcatgcaagattttgtttccatttctccttgcaagattttgctcggatcacgcggtttccgtaaaagacaaaaccattcctcacttcatttttgttttgtgctagagtaggaaaaagaaaggagatgccgaagtggacatgagttctgtgagaggtaccatctctcacctgtgctgtcctgtccaagaaagaagaagaagaagaaaaaagagaagaaaaaggggagaagaaaaacggacgatcatgaggtagtccatgtcatatagaatcacaacaagtaggatcaccaaactttccctgttggaaaatgatatatgcttgggcagcattgacagtggatgtgaaggcaagttggcaaatggcaagcatagtggcgtcttagccctcctcctctggctgtaattattccctaatttttgtatcttctctttttcttccctggatgcataatcattgttgtatactgattttgaaatgcaaaaaaaggagaaattttctgaacctcattaatgtttgtgagaattttgtacatggctctgattatcacatcaggatgatgggtacatcagttgaaatgcaaaaaaaaaaaaaaaaaacaaaaaaaacaaaaaacaaaacaaaacaaaacaggaggataaattttcgagcagggtgttgaaatgcaaaacgaacaggttgtttctttttttcacgggaaagaacagggtgtttctgaatcatcaggaacagggttttaatggaattcgatggattttgacgacacttcttcaaaatttgtcgataacataacaggagtgaattatctagcgaacgccatttgtaggaaaatgcgctgtatgattggatttagatcttttggtctgaacatgtaaatattacctgacacgctactaaattaatcttaactacataatccatgttgcaacttccaatccataaaaacactaaaaacagcattggtacgagtgagtataaactagttcaagcacactggtacgagtgaggattaccatgaaacgaatccataaaacagcattgaccacaatgccgaatgcaaaaacatataaaacaccaaaattaaacatctccaggcatatctttaattcgagctacctaacatggtgccaaaaagagctaacataaaccaacatctgaaggccaacctgcttgaattctgaaacccagataggcaagctacagaatttgggcccagttactcagcacagaaagttttatgatcattacggaaacaactagttgcaaacttcttctcattcctcatcttcctcctcaccatcaccgccaccgccgcttgccttcttctggttcttcctcttcaccctaccaggggggcctccaccgaatgggcttgtcagtgagaagtcaatgtgtttctcagactcaaccctcaccatgaacgacgggatgttgacaatttgcctgccgaccctgcacagtgattttgaaactttaatgaatgatcttcaggaaggctatcaacttggaaaaaaatattaacaatggcaacatcatgttcaacttatggtcgacaagtcgtcaaacagtaactttagagtgcattaaagaatgttgtggcagtagcctttttcaggacaaaatcatgtgaagttgccaaatgttctcatcatcgctgtacatagttcaacctaacaaactaatctagaattataacactgcagaaggcaagtaacgaactacagcaacagcaagtggtacgaaccaaattgcttgttcaaagttaaacatcacaggtaatatgtacacatgaaaagagtaacacttgtgctcaaggaacattgaatcctgtttagaaaaatgttgtgcaattaagttcaacactctcaaatgcgacattgacaagcacaagaagagtatcaaatacacgaaaaagactaacttgaaagcatctgcacactcaaattataggaagttaacaggagtacaggaccaatactaatatattatgaccttcagctttcagctcatagggcatgtgttgtgcctaaaatgacattttagctctgcctacacaatgctggatcaagagaaatgatgaatatacagtgaacgattactatgagagaatgatacagcttccatgctgctgtagaagaatcatatagaagcatacttgggaatacaaactaaagagagaacatactgagccatggaaattgtaatacctagagcttcatatttacccatttacaagacaggagatctgtagtagttaaatcatcatacctgatgtggcgttgcctgatcaggacacgagcatggtggatggacttggccatgccagccttgaagacaagagtctgaagacgccttgcgaggaagttctcaacagtgagggcaaggacataatcaagcttgttctgcccatcagcaaggagcccataacggttcatgcggcgaagcagtgcctcaccctcgaagatgcggcgtggattcttctcatcaagtgtgagcaggtgccttgcattgttacggatacggctcaaagcatactgaacacgccacagctcacgcttgcacctcagtccatactcacccactagcttcagctctgcatcaagacgctccttctcgtaagggcgacgtggcttcttgaatgtcttaccatctgcaatgaagtaataaatttgttcataacacttgacagagaaagaaaccactgtagatagtatagttgttcataagaaccaaacaataacatagaaagaagccctacagtcccaaattccttatatcctgaccccaaaaatatacaaagcaagaaagcaactgcacacacaacccagaaagacaatgcaacaacacaaataaagaaaactacagtagttgttgagattacgcccaataatagtatggatattcaagacaaatagtagtagggatcttgtgtacagtaaatactataagagcttcagatatacaaccatgtttgacaaggatttataaaacaattcataacattgtgtctgattaacccataaatagcttacatgccagatttagttttgctgtgttatccctggttagccatatcatacatacctaaattatttgttctactgtaaaatggaattcatgacctaaagcgacaatacttgaaagatctcatcaggaactatcatataatatatttaagaaaatatacatatagaatacaattagcatactacaacttacacagaaattttaaaaaaaataacaaatatagttctcgatggaccactctatgtataaacaaacagttagtgcattacaagtatatagtcctctatattaagctccatgattcattttcgtaacaaaattcacaagcttatgcataactccattccaccaaatgagtgatcaaacagaatacttgagaacaaaaaaactctagctaatgaaactcatatttccagtccttaaaacaggtaaattatcaaattttgtaccataacagaaacaaccattttcaagctacatagtaccaaatgccaaatgagtaaacatgtcctcattcctcagtactaatcaacacatcttagcattctagttaaaacccccccaaaatctacatatctcgaaattaaatccgcaccacacaagtttcaacaacagaatgcgcagtcagtcgaaatcagcacgaactaatcggcataggtacggatccaacgcaatggaaacgagaatatgaacaaagctacgggaacagaccgcgtcgaggcaaatcttgatccagatcatctcgccaaccgaaccagccatcccctcattaactaaccgccactcgctaatcaactaacacaccgaagcaagaaaagagataaaaaaaaaagaaaagaacattctctcgctgcgccaaatcgcactagcaccaaccaagacgacgcgccgttcttggacgagagagagggagaggaggaggaggagctacgtacagttgcggtagaagctgacgtggaccatcgtcgccggaccgcctctcccgcgtcgccgccgccgccgattgctggagctatggtttcccgaggggaggaggagtgaagaggagagcgcttttatatgcggcgacgagaggaaaccctagcttgagggctaggttaaatgggccgagatttctcggcccattaacgcacgggtggcaattaggcccacatatcgagatcataaatgggccttcggtgagaaggcccatatttgcaaggaaaaagtacaccaaaaggtccctcaacttatcatccagatacaaaatcgtgcctcaaccgtaaaagcagatacgtccctcaactaacaaaaccgttcactttatattcttggctggttttgaccccggttttatcctacgtagcaacagagtcagcatgagtcccacacgtcatgtgaccacgtcatcatctctctcccttctctcccttcctcctctctctcattttttacaacatacgggcggcgcggtggagcggtggcgacggctggccgggcgcaggtggggcgccgcggcggtgggtgtggaggctaaggcgaggccgggcgccgcggcgacgggcgcagaggtggaggcaggcgccatggcagccgtaagcgagcttcttggcggcgacggacaggccgcgaaggagcgggaggacctccggatagaaaccaaaagccatggaaggcctgcaccgagaacgactcgatcgggctgcagga

SEQ ID NO: 8731 - DNA, 11778 bp, Oryza sativa
  unsure (1)..(11778): unsure at all n locations
ggggtctgaatctcatgaaaatgaagataaagatgaagattaagtgttttacgtaaaacgaggtggtaataacatgtgattaatttagtatcttcacaagaaaatcatgtacataattaatgacaactacttaagagtctaagagcaagtttaatagtatagccaaccattagctccaactcacctatagttaatttaatagtcaattcatataatggttacctataaacatatactacgctattaatatctggtctcacctatcatacacacatcgcgtcttatagtccgtgctgtaactgacaacaaatctgtagttcgctactcttgtctatcatcttttatcttctcgacatgtatttatagttggtatatattccgctattgtatccgctctaggatattaagagacataacttggtacataaattggcgttgcgaaattgcgcccctagtaagtactagtagtctatttttaccctctagaacacaacggaagcatgatgaagatcattgatgaaggatcagtgataaagctcttcacagacaaactggacgtcaccaattcaccaatctgcccgaactctgaaaccgtaagcttggaaggcgttaggaactactgcatgggcctgatcagttcatcagcacattcgtgccttcttctatcctccatcagtccatctatccaattgaagggagaagaacctacaagaaaatctccggacgatcgatagtcctgcgcgccaatccgcatctctgattctttaggctgagttcgggagcctcctgatacggcgcataattaataaagtattagttaaaaggactttaaaaatagattaacataatattttagacagtggttgcgcttatacgtggtgagtttgttcttctccaatgacacattcacaaacgacgctgagatggagtagatgtggcatagaaggcgcggcggatgaattgtctgctcctagacaccaccgaattgaagtggatgctgttagttgagagatgttgttctttggccacatttctagttaaccttttcttcaactaggaaggattaatcacgcgggcatgcatcgtagattgtgtttgagaaacttatataggagaaatattaaccgaaacatataaaatatcatttggcttgtctggattatctgagaacatttagaaaaaaaacccttggtaattggtatattttatctaattaaaggcactcgatttttgatccagtggctaagactattcatatttcactcgatatgggcatatgtatcttacattgttagtttaattataaagagagatcnattagataanaatcaaatgtgtagcttataaaaaaacactatagttgtttcaatattgattgtttatcttatagtttagtagctaccaaaataaagaagaggatggcggtgtttttttgcatgtgagagggaggaggagatggagggactttatttttctaaataatttaagtgaaaaccgattataatatgtttctttttttctcaaaatttcttttattgcttttataacttttaagacatgacacatgttgacttaatgttttgcaaaaaatatatttaattgacgaaaataatgaatccatcgagttaatatgaattgttttctaatttttaagacgtaacacattattagttgaaagtactctgggatgtttaatcaatttttatcatgtaaacttatttatgacataatgcatatagtcaactttttttaaaaaaaaatttcattcttatttggtttccatgaaaaaaattggagtctacttcaagtgatgtattttaatttatggtaaaatatggataatgatgaacttgaattatttatttagtacaaataaaacaacaattgaaacaaactaaaaatcatatactccctccgtcctagaagataagaagtttctagggttggatacgattattaagaaagtaggtagaagtgagtggtggagagttgtgattggatgagtagttgaggtaggtggcaaaagtgaatggtggatagttgtgattggttggaaaaagaatattggtggagaagttgttatattttgggacaaatcccaagggctaaaagttattatattttgggacggagggagtacaacttttaaaattatagtcgttaagctatctgattattgatttttttatatgatgtgtatgtgtggggatgttcatgtgaacacatatattatgtgtgaagggttggaagtgggccttttcgctttttatactgttaagatatcagttgaaaataataaggacaccgtgtttaacttaaaataatcaatggttaggttttgtacaagttaaattatagtcaacgggtgcattaaattctaatttatgattttaatcataaatagcataattacacaaatataacgtataatttggtctgatagaaaaaaatttcataaagaaaaaaaggaagaggggacatctccttttcaaaaagagaaaaaaatcaatcttatcctgcggcttggagtggtgggcctattaattttagtaaaaattaaaaggctagttatttcttttttctcatcttttctaagattttatctaatttattaaagcgccacgtagtatcataggagtatttatatgagcgtcatgtggtggcttagaagtgtttataggaagtttaatggacttttattatataatagatagatagattgattgattgatattgtcgatataattcagcgacacatgtttgtagaattatttaaggtgacatagtatatgttgtcaacttttttatattttaaaaatatttcattgttatatttggttgccatgtaaaaaaatagcccatagaacaacatagatcttgaattatttatttaattataaataaaacaacaacaaaaataagccatgtaactattgaaattggaagattaggaaaaggtagagaatatgagaggagggagtacgtaacgtacgtactaattggaggagggtaacataccagcgaggaggggaggttgggaccggtaccgtgaagagggggattttatttatttttattactaaggccctgtttgattcatcttaagattattataatctagcttattaggagtaagctgaaataaacaagtagattattatagcagattattgtaatctataagccagattattataatctaataagctgctctaaaagagcttttttcagattatcgagtggctaaagacccactactcctacatacttgagaaaaattacccacctatgccatcaaccgaacagatagctgggggcattatagactttagcctttcaaacccaataatccatgcctccaataatccagacaaacaaacaactcacagcttattctatatcagcttattataatccagcttatagcaatctggtttaataatctagattataataatcataagctgaaacaaacagggcctaaatctaatggttgaaaatattggacccaccaatttaaagaaaaatcaacggttgtattttagagtgccacttgacggcttatgagcgtttgtaggagtgacacatggcggtttaggagcgtgtatgaactaattggaggagggtaacataccagcgaggagggaggtggggaccggtaccgtgaagagggggattttatttatttttattactaaatctaatggttgaaaatattggacccactaatttaaagaaaaatcaacggttgtattttagagtgccacttggcggcttatgagcgtttgtaagagtgacacatggtggtttaggagcgtttgtaggaagtttaatggacttttagtatataatagaagatagatagatatatagtagcagatttttttttaataatggattaaaccaatctctgcacccaaggcaaatgtacacaacatatagtactagatagaaaatgaactaaatatatagtactagatagaaaatgaactagtaaacgggtttttatatgctgctagcgggtttgccgacatacatacattagccgtcataggttacaggagcaagacacaaatgatgttcgcggcgcctctggaaaaggtaaccacaggtaattctaatctatcactaggaagttcatcccgttttcattggacactgaaaattcagtctgcgcctgcgtgcatctattaactggcagtatattatatatttatgtcatattttattagacatctttggtgccttctaatctactccttctagatatagagtaatgtctacatttattgtactatgatgtgttatatcctagtacgtacgaggttagtttttttttttttggacggatggagtatactgattctaccgtgcgatcctgatgaatgttcaacaaacaatattgcatcatggtgcatataaagtgcaaaacacgatctcatgtagtttgcgaacatcatgaacatgaaatttatcaaatctcaagtttggcaaattttgtctgccttgaataaaactattatagatatctagtgcacctgtttgcaccggctcgtgcgactgtcgttccttcttactctctccgtccaaaaaaaacttaacttctaggctttgaactttgtcccacaaaaaaccaacttctaccatctacctaccgtcagcacgtaaaagaataagttttattccttcaatagtttttacctacctatcatcattactacttttttcaataatgaggagcattttgatcattttcactctccaataattttgcattgggatgcttgggactgagggagtagctttttagctagaggcgttattgttggagggtctttatcgcggttcaagtgttgctacagttgagtatgtagatgacaattgtttgtggctgtagctcgccgcggaatgatattaatttgctgtcgtcatggctttttctttttttttcccaccttaataaatataggttatgttcatcctatgcagaggagaggattggtcttagattaagtgtattactatcttgttgtaatagtctgggatataaaattcctttatcgtaaaaaaacatttgcaccgttgcgcagattaataagatccttttcacaaaagagctatgaaaataaaaatgttgtacataccataagcttgccaaatgaaaaaaagaaacagctcaagcaaggagggggctatgttttctaagagattatgcaaaccaactcctggaagacttactgtaaagtatttgccatactgcccatatgggtggtttcaaacaaaaaaggcaaaggacaactgttcttagtttggtttgttgtaaaaaagtaagaaagtaaaaaaaaacttcaagtgctttctgaatccttattgtgaatgagcttcatggaaccaattgcgtgttgccacgttaacattgagcgaactcatgttgactgctgagcaaatctggtaattgcatatctcagctaggtcatgcaagatgaacccaaacaatcgttcttccatataagaaaaaaatagtcttatacaatgagagcatattgaaactcttcctattcaggattaaagaaacataccaaagtacattaaaagcttgaagggtacgtggaaaataaaccattgcatcagaaatagtgcccattgaaacattaaagaatctagcttttcagaagttcaggcatatatagcataggtgtaaagtcaaacaaataaatagtaatttgacaaaagaaagatacttgagatgggaatttatcttacaacataaacagatatccacagggaattgcatgagctagtgtaaatcctaatggcctaagctgaagacctggacaaaccaatcacaacagggagcaaagatcacctgatcaacattagtcaatcccgatataaaaataaattagtgttgaactgacgtcggaaaactaacatggtttttttcctcaacaaacttgctggagtaattaggaaggatcaatcgaacaaaccaacgtaatgcagataatcgtcattttgacaaacggtcagcagctatatataaaatcaagttgttgggggtcaaaacatcggcaaggtaattcagcatcaccgaggatgagaaacatagattagtagttgtatgcacttactgctttactgaatcaaagggctggttagcacgctgcttgagcacgaaatcctcctacatgaacaccatgtaatccaaacttgagatgaatgcaaagaaatactgggaaaaacgtagggaaatcatcaaatatgctccctgacaaacttgtgtccggcaacaatgacgacgccagtggccaggaatcggaagggatggagaagtgaatagattgaactacaggatgagtgagatatcattttctaaaaaaaaggatgggtgagatataagcctttattgggtcgtcggtttctggtgatcgatgatcatggtttctggtgagggaggcgaagaggatgcttttcatgacttaatgtcagccatcaagacttctcgttggttggcgtcggcatttgccgcttttcatgatacgtacgtcgaggaagcgagcagcctggaggagtcactagtaaaaaaaacctcatatagatcagcactataggtgccgaaatagctaaaaccggcacctataatgcttttccctcctccatggactcaaaacacgtaaaaccaacacctttaagcaactataggtgccggttctcaagaagaaccgacacctatagtataggtgccggttttttttaaaaaacaacacctttaatataatataagtgtcggttttctaaaaagaaaccagcacctatccaaattgagccgatccaggccgacgcatcggcctcatcctatattagtctcgtccttatcagcctcatcgatctcttagtctctctctcgcctctctcgatctctctggtctctctcgttctctctcgcccctctctctctctcgcctctttgtgtagcgcacggcggcggtcgggcggcgtcccggcggaggcgtcagtggcggcggtgccctcccctccaccggatccggcggggggagacggcgggagacgggaggcagcggcgccctcccctccgcttgatccggtgggagggaaggcggcgggcgacggcgagcgcccttcgctccgctggattcggcgggaggggaggcggcgtgcgatggtgggcggaaccaaggagagggaacgcatgcagctgttgagccgggtggggaaggtgacacagaatcgtcggggagatggcgcggatgagatgggcccgcccggaggaatgcccgtcgcctgcatgcacgcgggagagttaacgttttggcctatcgggtttttctgtgaatagcgtccaggatgttccactgaggggacacgcaggaccatcgatatttgatcaaacggatatggatcaacctgatgtaggcacacggaggaccatccagatacgattgaatgggtgtgatcaacttgatgacgtggagcaaccacagtgcaggaaattagtaagtggggataatttgtatagatatataggatttcaggcgaacattgggtgatgagccacaacctatacatggcctctaaggccaaataaacgtacatatcttaattagtgctagctcttgaatatggagaaattatgtgattaattaagaccttctaattatctgacaatgagtactatatcatgcaatttaatgcaactattttaaacacaagacatagcttcaggctttcagccaacgaggttttaccttatccctgttttatttttgtcatttcagctcagtacacagattagagatgtagaatcagccaagtacaagtggtccaatacttttatgtgttcatttgttagaattaatgaatcttttttggtatcataaaggcagcgagagatatatatgagaacagatgacatgtatatatatatctcacagtttgcttcttttgttctaggttttagtttcgccattaattctcacaaaccaacatgtgtttcttttatttttttggactcatgcagtcatgctggatgtaggtttgggaagcattgggagattggtacgtgccatcttggctcgagtgatgccaccactccgcgacgactactcctgtagatagtgctgaaatcggagggattgattgtacgattgcacaccaataagtaagccaaccagagggggtaattcgttgtagtactccaaaaccaaaacttatagatgaattaaaagattcccttgaatcgatgaagatcggtctgaccggagttgatgcaggtctgaccacctagaagccaccagtctaactggtgtagtagctccggtttgatcgtcaatcaccggtctaaccgccgttcactcgccgaaacctaagtaaacacaaatcgaaattctcccaaagtagattgaactttattgtttctattcgtgtttataaaatgcaacaacaacaatacggctgtcatttttttttctaaagtaaaatatcattggcagtgcgaacaaatatgaaagtacatctgaagcaaaattcaacgatactatttttatatcactaaattttatattgttaagctaattgctagttaaaattatttgaaatgaattgcatgctgtttgggtcaccttttattaccaacactttggaccaccatttattacctagtgcaaagtgaaaatactgtgcaaattattgtggtctaaagtaaaaaattggtgataaaattttgtaataaatggtgaaccaaattgtagttcactctgaaatttatagactttgactcttgaaattgcgtgggcaccttgtattttctagtggaaggagtagtattatagttctttttttttgaaatttccccaaaatttctttattatttcaaatttgaattggatcgaaataatttcgatttgctagcggaatatattcctagaaaggccaggtatcacggctcaccgtggaaaccggtcggtatttaccgaaatggtgatccttgactatttatgaaaactattatttgcagttctactgacacattacacatggcctctcaaaaaaggaggacatattacacacatgacaatcgatgcataggttcatatgtaccttcacatatgccatggtcttatagtactgaacaaaatagtatttgaacacagatagctataacataacgtggtctagaaattacaaaagatgaacaaagattatctcaatatcttgtctatcacaaatttctttgaagcaacaggtttgggaggtatcaggaactagtgcatctgagctagagagatcagagaacattcttgccctccaattcttgcggttcttggcactctgctcacactggaaacaactgtcaccgcgcattcatgatcactgacgtgaaagaggaaaggattgcacggctaagtgagaagatccaccgatgaaaagacttgcgtgttttcgactcatccatcggcattggagctacaaagagtaagcttgatggcaaacgtagcaacagccaggacataattaatttagatggagttgttcagaacatggttcagaacttcagattgcccacttgacattggtaccatggatccctcccaaaatggtttattatcaatttaattttctcctcatttggttgaaatttgttggaaactcattcaaagttcaaaatcgagtgagatatcaacatcacgtatggacttaaatttcaaaaactgatattgtgaacctggtatagagttgactcaatggatatagtcaatgtgagagaagcatgaaataattctctcttggatagtctctatatctctctatttgtgctatgtatgtagtagtattttctcaataaataactgtaaaatcaatcataagcaacactttaaaatatcctatatatattgttatcacaatttttttgctattaccaattgaagtaaaacttctcgtccataggttaattttttctgatggatctatcatggcatgactaatgcgagccacagagctactaaccaataatttcatccctctggcacatgcacatgccacttatagataaaaaagaagaacatataattaatttgcaaaaaagatatcttgtacattagtgcatatacatttaataactggttgctaacatacataacttggtccataaattggccttgcaaaattgcacccattgttgacttaaaccgggagacgtttatccaactgggagaaggccttgctacgtctcaaaagctagctaaagaggtgagcgacttcctccacttttaacctgattcaattcttcataaactattaatgtaggactattcccgacaccactaataagtactagctagtagttgtatttttaccgtctagaacacacaatggaagcatgatgaagatcattggtgaaggatctatcagggataaagctcttgacagatattctttcaaaaaaaaaaagctcttcacagataaactgcacgcatcaccaattcactaatgtttccgaactctgaaacagtaggattggaaggcgctgggaactgctgcatggacctcatcagttcatcagggcatccttggcttcttctgtcccccaaatttccagttgaagggcgaagaacctacaagaaaatctctggacgatagcttcaggtcccgtcctgccaatctgcatgcatctctgattctttaccagaacgcgtatgttttgaccatccaaagttcctatgcatttgatgtgtttttgaggacagtcatgaatatgaacatgcatgtaaagtgcaaagcatgtcctaatgtagtaacatcatgaacacatgaaatttagcaaatcaggttgtcaatttttggctgccttgaataaaattattatatctagtgcaccgctacaatgatggcgtgtgcacctgttgttccctgtttttggagggccgttatcgtggttcgtattgctatagtgtggatgaaaatcacttgtggttgtagctcgctatggcataatatttttatatttttaattagattaattttatcatcttgatgtattgtctgagatataaaactttctttatcttaaaaaaatatacactgttctgcaggtttaataagctacttttcaaaaagagctatgcagatccagtgatcaactggtattaacaatttgtaaccacaataatgtacatagcttaattagtgctcttgaatattgagaaatgatgtgactaattaagataccttcttactttatatatatgacaaggagtgctatatcgtgaaattgaatgcaactattttcagacaatttcatgatatggtttgtacgcaaggcgtagcttcagactttcggtcaatgaggttatgccttatcccaattttcattttacactctagcatacaaagtagagatgctgaatcagcctagtacaagtggtccaatacttttatgtgctcatttgctagaatgaatctttttggttggtgatcataaacatagagagaggccaatatatatgagcacgcatgtgtatccactgtttgcttatttgttctatgtttcaatttctccaccatcagaaaccaacacatctggttcttctatcttttggactcatgacgtatgtaggtctagaatgcattgggagattggtatgtgcagtttaggatgtcgactgatgccgacactccgtgacaactactcccattgatagtggaagtcagaggcacaattttaaagaattctatcagataataggatcaactgcattg

SEQ ID NO: 8732 - DNA, 31406 bp, Oryza sativa
cggtcaaacatgtgctaaaaagtcaacggtgtcaaacatttcgaaacggagggagtagtttgtatgtcatattgaccttgcatagttaaggtctcgagtatatctccactgaaatagtcagatggcaacaacattacagaaggtcactcactggataacaaagttatcattgatgatcaatgtgcgatcaatgccctttaggacgcctttcccaatgatttggaactatctctttagccctttttaacatttctcatgatcggattataagttacgggttttatgagtggtttgttgtgagaatagtcacttcacacgtatggtttgttattatcttttatgttcgtgttgatccaatcttggttggttgcatgcatatagagcatttacagatacacatttactatttgctcaaataaaaatagagacagtttagtagaggatgattatttcggaaaaacatcacgttgattatagatgatgactttgttatccagcgagtaaagaatcaatctgtatgcatgtaaactattaaataaactataaaataaagacattattaatagtttgtttccaatacttgtatagaatttgaaagaaaaatgtaagaaaatgctacttactagtctcacttgcatccttaccaacatccatcgatccatccacgagcaccaaggtaatcgcgtcgtcagtacgtcacgtacgcggcggccggctaggatatgaccaaggggttgatcacttccccgtagtactgtcagattagttgctattcttcgatccgcatgagctattctagaagcttcaaaacactgcaatctcgatcgaaagtcgtcctttcgaggtaagcaaaaagcaacttaaattagcttttgtaaacaaaaggctttatatacaatccagtccgtgcaaagcaacttaaattatcttgaaataagccaaacggtatatttataaacgaaaagtaatttgtaaatataacttttatatacgcgcttttagcgatctaaaagcaaaaactaaaaaataaacttcagcgtaaaaaccacaaaatcagtttcaatttaaaggttgaaaatttaaatttagctgataaatataaacgaaaagatggagcccatctctactcgtcagtggtatcacttgattaattaggggtttaaccattggtttcctcgttgaagctgttgcggtacaaaatcaagacgtgctacaggatatgaccgggcgttgcgccgttgccgtcgccagcgcgcatcgtcgcatctccggcaacccgggaatcgatcgatcagctcgtcgcgtctccaaccataatactcctcgtcaaaatctctattctctagtggagcttggcgtatcgatgcgtttgtgcgaggcagagtgcgcgtcggggaaactattttaacgtacgttctttgcatgtcacttaaatggttataaaaaaatttgaaaaaaattgggaaggtgtattaacatatgatataacactccacaaacatgcaagttcaaattcaacgtctacatctcgtaacgaaaaaacaaattgaaccgcagctagttaacgtatattcagagtcaaatttgtttttttcgttgcgagatgtagaagttaaatttttacttgcatgtttgtggagtgatatatcacatattaatacatcttcttaattttttttaaattttttcataaccatttaattgacatgcaaacaacgaggggatattccctcgaggatcaaaatcctcttccgtgcgcgtcgtcgtctgcaccgcggacggcgcaggtggccatgctgcagggagaggctgggctcgacgtggccccgtgccggcgcgcgcccttgcagttgccggctgtgcgtggcactgtatgcaccggagcgcgcgacgctggggcgtccacttcgcgttcggacacgcggttgacatgctcgagagacgagacccggggccgttcgttcgatctgctcggcctcgcccggcgccgccgacgaggcgaggcaaaacgatggtcacgatcgacgcagcgatctcataggctgcactgcagggagcttgcgggtctcgacgtggccgtgcgcgctctcagctgtgctggtgcaaagagcacgacgcgcgcatgcagtagtgccacaccatagagcgcggaggcggtggtggactggtgggtggtcgatcgcacagtggcacaacacttaagtaggatggcaattttacccagggtcccgatatccgcggatacccggctcaatgggcatgggtatgggtgtaatattttgcctatgggcatacccgcccgagacccgagaacatagcgggcagcatccgagtattgttttttacccgcagataacccatgcccaacctaatacatatgtatttgctaattttggcccatctcttattcctcgtacccttttctcttagcccatttgacccactaaccaaggacatatatatactcaactaatagaaaccctaacctaattccccaccctcttctcctaccccaatccccatggcggctggcggcggctgcgcggctgccggtggcggcggcagcggcgcaggctagcgacaatgcagtggtggctggcggcgcacagcgcaggcggcggtgcacggccaagcaggcccgatgggtactcatcgggcatgcccgtgcttgacgggcatgggcacgggcataggattttgcccgatagaccttgcaggcatgagtcaggcacgggcacgtgggtcttgggtcgggcatggaatcgctttacctatgcccgatccgacccgttgccatccctagggctgtattcggcacccgttcttcccaacctctcttccttatttttcgcgcgcacgcttttcaaattgctaaacggtgcgttttttgcaaaaaagtttatatacgaaagttgcttttaaaaaatcaaattaatcaatttttttaaaaaagctaatacttaattaatcatacgctaatgaactgttccgttttccgtacgcactgttaactttgggaaccaggctgtccgaacacagccttaatcaacaacgttttcatggtagagtttgagtttgacgtccacaagctgaaggtcgtcgtgtcgggctcgaaccacatgatgatctggccactagctcactacgcatggcacccgctgctatggtgggccaattgagttctttttaggttattgctagaccggatatccgtttccgtgtctacgtccaacaaaaacagatttattatattcgtatttgcataaaaaaagatacgaattttaaaaaaaaactcatgtatgtttccgtatccgttttgggctaccctaagcccaataaaataaaaggaaaagcctaagcgcagcccaataggaattcagcgccgcatcaggtgattcattgcagcgccgatcatctgaattctctccgctctcgccacctccctctcatcggcggccgcctcttcttcccgctccgctggtcatggaaactcctggaccggagccgaaggcggcgacgacggtggaggtttccgatgaggaggaagtgaaggcgatcgctgcagatgcgggatccgtcaccggggaggggaagcgtctcgacgcggcggcggcggcgacggcctccactgcaggtggagacggcggcgaggaggagaagcctcctgtcatggtgcagatgcctctgaacaccatcgccgccatcctctcactgaagagggagccgaggccgatgcccgaggacctggcgcgtctctcgccggaagagcgcgacgagcgcctggcgttcttcgattcatgggaggaggtcaacgacgagttcgaggagttccagaaggagatcctccgcgaggtgaaggagactggccgctacatggtccaccagagctacttcacggagcaggcggagatgcaggctcgtatggagaaagaatgggccgagatcgactggaccggcgtcaaattcggcgactgggactacgacgaccccacttgctgtcaaccactgtgatttcaggctcgcccgctaactgagatgctgcagaggactacttctttactgtatcttacccaaatggtctcaagccagcttagcttttgagtactgcctcacccttagctactaaattactagctctctgtcgggtagtagtatcagttatctatggtgtttgctaggtagtaatgtcttgtgtgatttgaccgacccttataaggaagaccatgtggcttatgctatgaatgaattactttaatagtagtaagtctgttattattaagtttctgctggtattaggctcgataatattctttcttggagttcctttgtgatgctctatgtgattattactgtgctaactctatctgtgatttactactttactaactctaacccttggttaataagggggcataccagtgctctgtgattagtggtaattttggtatttagtttttgttattctttgagactgcttccaagagagcgcaaaaccctcctctaaactaaattttgggaattaagtctgaaatcatataccaaatccccttcctcgacggtcgccctgcacacttcactaggtgaatgatctgcttctctgttctgcatctatacgaactgtgatggatgagttgttgccaaacagaactgttggtacttctttggaaaatatgctgttgaacttgtcttgaaaatggtacagcatgtttgttgtaattttgcacatggttggacatatagcacatgtgatgtttgaaagcagcatctttttggcagtcaaactgccatgtgtgtagcttagctttacaaattgcaagaaacatagcaacctgaacttctagaagacttttgccaatgcctctacaatcagatttatatccgtgttcattttcttcatctgcaaataaaccaagcaataacagagtttttagatgtacattaattgagctgcaataatagagttgttagtcgttttatggcataaggtagagatagcaaaagtcgaagtactaagaaatcaaaatctgcgtgaaaacataccctatagaagtcttcaactttggaaatcattatgatccagattactatagctgaaaagcatttgtccaagtgataatctatacctagttgatgatgccaatatcatttttggttgtgctttcatggcaggtctaattttggacagcagacataattttgtctgtgcagatctctatccagtttatttgtttgtggattataaagcgagcactacattgttttgtatcacctaaaaatttatttgattttaccatgctaattatgccctcagtccaagtgtgataatctgttgacctagtttatgacttgttcatgttaagattatatatgtattagtgtgtatgtgttaaggggtatttctgtcttttcacgttgtattcatctcatattagccctaagggccaactcaatgaataaatagttaaatccccaattcactcactgattttgacatggtatcagagcagagatcctaaccctagcctcaatccgacgtcctccccggtgcgccggcggcggacgccgccgccggcagccacaccatcaagccgtcagctctgtcaagatgcattagcttctcgtcatcgtctcattcatcttcaagtagcagccagtagcagcagccagcagcagatcgtctagacattgactacctcatcccatcgccagtcgcggccgccgtatcctctgccggcgggcaaaccgtcgtcgtcggccgtcgcagcctcgccgcctcaatcactggtctcgtcctttcatcaccactcgcagtattcgtcaagcaaaccaacagcagcagccctgctttcgtcgtcttcaagcagcaaatcattaagaagcagcagccattgagctagttgcagacttgcagcagcatgtgtcagcagcagcaagtcatcttgatccatttcatcctcaagcagctgaggaaactcctctgctttcttctacattctcaccaaatctaagtggatctgttgcatttaggcttcagtttgagcctctgcttgttgtcctggaactccattttgtgcactatcatcaacatcctttgtttcctatcctatattttgctagtatcagattgccatgctataagcttgattgctcatcatcattttgtgcactgctagctccttgatttatacctaatatcagttggcacaagttctaaaacctcccgcatcatgcttctatcatgtgctgcaacacatcaacagcataaaccagtggattacttgggatatttctaattgaaattggcttcttgattagtagatgatcttcaacctttagttcgaaatggttctcttccattgatatgccatgatttggatgaagcatctagggtctcagtctcacagtcctacccacaaagagtagtgttgatttgttagcctctaatcgtattccatcaacagatctacttatttcttctacatttgctatgtttgcttgctgctgccatcaacaattctactaatctccttaggcctattgatatactatgttgtcatatttcctttacaatccttttgagtccatccaagtccaatacacaacgattcgttgaagcgtgctaatctatcttcatcactagttccccactggagctggtttatcacaccacatcatctgcattgtcaactccccatcggagttatcatctccaacttcaccagctccatatcggagttggacatcgttatcagtcaaggaccgaagaacaatttgtaaaggtccattatcatcaccatcaacatctctagatctacaaaggtctgaagaacagtttgtgaaggaccttcatcctcttcatcatcatatccacatctccgaatcagtgattggccgaagaacggttcgtgaaggctttaaggtaccaaaggagctgaagaacagtttgtgaaggctccaagatcctcttcattgaggaagggatggatttccatcttcatcatcattctagagttgcacgattcgacaacatcttcaagcatggactgtggatttattctagtgtgtcattaatctatatttagtttcaaatgcaatgttacatatacattgcatttgagtaggggtgttaagaatatatatgtattagtgtgtatgtgttaaggggtatttctgtcttttcacgttgtagtcatctcatattagccctaagggccaactcaatgaataaatagttaaatccccaattcactcactgattttgacagttcattcatcaaatttgagctgcatccttttactgaaaaaagtgtttactggactattgatagacttgatgtttcgaggttcagagactattaatttggttccctgataatgtctcaagagttttgtgtacgtactattgatgatggaaggagaaggatacttcactaactcgttgaatgagggaagcattatagattttggcaaagtaggtgtgttcattgtctgttatagtcaacatggttagccaagggctacatgagccaaatctgtgtatgtgggtgaaagaagaaaagaaatactgtccaagtgctatgtgagccaaatctatgtatgtgggtgaaagaagaaaataaatacaggaatcatttatattcattcgaagatatttgattctgtaacttcctgacaagagtttctttattgcattttctttgtctagcttttaccttgagttttattgtgtgcaagcatgtgaagccaactacctccaagattcagatgttgtatccgctcgtttccaggtaaattgttattatttcctgcaggcaactagttctgcacatacatttgttttgttctatgatatacaattttctctcttccggtttctacagaaagatgcctatggatcttgggagcggtatctttggtaaccgcagtctggttgtgaacttgtgaagtgaacgtcgtgaattcttgtggcaacctctttttaccttcattctgtcactcggcttgggaatagatatgctatcttgcgacctgcatttccactgctactgtgttatttcttgcataccttttaaactttcatcaaatgatctttcaaaatatttgggtttgcctgatgttttaaaggattctgtttaaatcccttttagttgaatgtatttatgaacccagtaataaagatgtttttacttgcattttacagtatttccctatatgtcacaaacttagagatggcttagcttctaccaaagaagatacctcacctggcacatctggtaaaagatcttgaagttaactttggatttccccataaatatcttgttagttcacatgcatttttctacactgtaccgtagcattccagtgccgttttatgtgcacgttactatggattagaaggacctgtatcttcacgaaattctgcttttctcccctggtttcaaccaacatgcagaaccgtcacacgacaggccaactacggtctaacgctgggggctcgctctgtcttcttctgtataaatcatgcttgtttacggtttacataatatctcatatttacatctgcttgttgtatcctgataatcctagaagatccatgcagtttttcgaatacatactcgatattatctgctatatgtcttgccttctagaaaatatctttcaggaacaattgagcactcgagtagaatgtagtcgagtacgccgcattatcgagaacgatctcgacaaatgcagagccgtcgcgcccaacctgccaacgaagaccgacgacctatctcatagcaccggccatcgctgggctactcgagagaaggttgttaacggataattcctcgcgaacgtcgtcggcttgatcacctgacatgattgcgaacggacatccgggtatgctataagttgggtacgcgagtcatgctggccacatgagatacacttgcaacaaaccaactctagcgcttccatcggtgttcgagagataattctgctcgctcactggttctcgcaccaggacgtagcaatctctcacaccacagcttccatcggtgttcgagagataattctgctcgctcactggttctcacaccaggacgtagcaatctctcacaccgcagcttccatcagtgttcgagagataattctgctcgctcactggttctcgcaccaggacgtagcaatctctcacaccgcagcttccatcggtgttcgagagataattctgctcactcactggttctcgcaccaggacgtagcaatctctcacaccgcagcttccatcggtgttcgagagataattctgctcgctcactggttctcgcaccagcacgtagcaatctctcacaccttaacttcaagtggttgagttacgactactatctggttctcgaccagccgtgtagcgatactcccactacttcgacttctagtggtcgagttacgactactatctggttctcgaccagcaatgtagcgtttctcccactactttcactttaagtggtcgagttacgactactgcctggtcctcgaccagcgatgtagcgtttctcccactatttccacttcaagtggtcgagttacaactactgcctggtcctcgaccagcgatgtagcgtttctcccactatttccacttcaagtggtcgagttacgactactgcctggtcctcaaccagcgatgtagcatttctcccactatttccacttctagtggtcgagttatgactactacttggtcctccaccagcggtgtagcgactctcctactacctctactccagcaaagttggtatcaggtacataatattgccaagtgttttacccagagatcccttacaacgacgacacctagcgttgaaacctgtcctactgttcctttacgccgtgctgacaaggcctccgaggaacataagtgatcttcggctggggacgcccatagccgataaggccttgtcggattctgtagagacgaaagaccatgtaagacctggtcgtgtaaaagttctccccgtgcggattaaccaagccgtgtaatcggaaactgagctttccaacttcatggctgggggctaggattagtgcttattcaaccaaggcaggtcaagggtccaagagccttctcctccgaaaacgattctccaacgacaaggctggggcctagggagagtgtataactcaataaactgactggtcgaagtcggtaaaagagaagacgctcatacacaaaacattggtcggtaaatttaattcattcttaatttaccatacatattataacatgtcaccctttgagcgttcgctcgggggctatttctatttgatattcttttctgagtattgatttcaggaaaatgctgctcgacattgttgaagactccatgtctctatggttctacaccaagatcgactaaggcgagtacgaccaatgttgacaaggctccgtcgtagactctacgccttctcgatcgctcgagaacggttgctggatctcgacaaggaatacggaatgaagaaatggtgtacccgccgagataaaatttcctgacttcaatccaaattctctattacggcaagacgggaggcttagtcgtacgctctgtactttctcggtcgacaccagagattggcttagacaaaccctttcggtgcccgcacgaggctgataaaagaagtctaacgttatccctaaactcaccgagaacggtcacgtgagctcgataacagttactccatggtcagcggtcgagaatatgaattcgttcatttgcattgaagtcgggggctattgtcagggttatgaataccacatacctaatagtagttgactaaatctcagcagggcccaccacataccatgtcttatacggaaactgacttcgagggagttccggataaggaaagacaaccaaagttctacatggaaacgataaggactactcggattgtatccatattggcttccctagttctacttggacaaggggacacctatgagtataaatacaagcccccctgggaggacagggggatgactgaccatgatatgagacgatcaacacgatcaacatgatcacacggtcaccacgatcgagatccacctcaatcagcaaccaccacaatatacggaacaacagaagccaatacaagctaacatacgccaagacacgccgctggatatcgacttcagggataggcatggctattcccctacggtgtctccggataccgtcaggagatacgaaagtgctatctctgatctcgctgggcacggattcgaggaggaagactaccttgttgtcgactacgagtcagaccttcagaccgacatgtcgacaacagttagataggctacccacatattgtactggtgtgattatggtgaataaaagcaactccggctccggccaacaggatgtagggttattaactgacaactcaggggcctgaacctgtataaaaatccttgtctccgtctcttttacctaagtctcgcgtatatcctagcaccaacgaaccccatactgtctaaataccgtagtcgagacatcaaatgtcgacacatatatattctaaaattaatttcttttctttgtgtatttatattttaaaatcaatatgtttatatgatacttgtgttagagttagatatcattgagtgattagagaactaccttaagtgctaatgatcatcacatttgatgatatgtcttttctcaatcatttatctataaaattattctcgatatgtttttgcaaatgcgatttgagtagagatcagtacgctacgtgggagaagcaattgactcacccgacaaactaaggatgagaattgaacaaagagtaagtatgctacatgggagcagcaaccgaatgagactcaaccattataatagacttgggggctagagttaagttggggcatgcatcgagcagtaggtgaccacaagaattggatgtttgccacttactttagatcaaggcaatcaacacattatttcagccatctgtcattactatttactgacttatttttcttttttttaagaattacacagtataacgtagacactcataacgcacacacaatcttatttgaaacactagaaattccaaaatcttgaaaaagaagttgaccaataaacctttccagaggaagcagttgaaggtcagattccctgagcatgggagaagcggtggaactgtgtaaacaataaggaaactcctatttggatgcatggaaaggtcagctttggcggggtgctttgcaaaatttcttgatttcaatcaaaagctgatactaaattttagacacttggttttacaatttgttttaggggttaattcgtaacttttgttgtgtaactctctctcatgacaacgtatgatactcaaattctgtaccctaatgatctgtatagatgccctcaattccgtctttctttggtatcatctctacaacttgttcaacaatggaactgtgatagtgtagagagaagcacactactcaaatttgtttttgggatggagagaccacaaggaggcaaaagtacttgtggaacctacatattatcagcaacaacaacaacaaaaacactaaaatggtttaaaccgaaaaataaaaatgtactcctaaaaagtagtgtaccggtgactaccatattacaacaggtaagaaagacgtcacaacagtaatcacacattctatttttatgtacccatagttcttggttctagcagaaactctcccgtgtcgtcctcccccacgggcgacacgggaggtggaaactgccggcgtcgcccgctcctcccccctcctccctctgccgcctcgccgccgcccgagcggccgccggcaaagccgcgcggctgcaaggacggcagcggcggggcttcaccctcgtcttcgtctccctctcccgtcgcggtggggggccgcgcgcgggacggcgaaaaccgcccagatccgggctgccgcggccggatctggcggggaggccgccggcggcgggtcagtgtgaggtggcggcggcagttggtggtggtggcggcggggattgaaggtggcggggtggcggcggtagttggtggcggctggcaccgaggaaggcgacgacggtggcgagggagatggcgacggtgacggggatggcatgcgtgctggcggcgtgctgcttctcttgctgggggcgtcggcggcggggttggagatggcggcagggatggaggtggcggcgaggctagcgacggaggccggatctggcggcgaggctggcatcggcggccggatccaggcgctggattttgccacggatctggcgcccacggcctcgcctgggcggctgggggcggtcgcggcagctagtgcggtcgagacggcagcggagagctcggcgacggtgttggggtggctgcgttggcggtgacggcggtttgcgacaattgctgctggcgtcggtggctggtgatagcggcatcggcgacggcggccgacttgcagcggccgtgattgagaagacggtggcaacgttgaaggatgcggcagtggaggcggggaaggagttgggtgtgaggtgacggcggcgacggtgaggtgatggtgaccgtgacggtggtgggaggaggcatggcggcctcggacggcttgccgagggcgtggtagatggctgcatcggccggcgcagcatcatttggaggaggggtcggagaccggctggacgcagagtggcatagccgatggtagcggaggccggctcggcgcgagaggcgtgggcggcggagatggaggctagcttggcacgagaggcgcagcctatggagggaggctggatcggcgcgagaggcgcatccggtggaggaggccggcttggcgcgagaggcgcgaccggcggtggaagaggcgacctcggtgcgtggtggagctgccggtgggtgtggcgcggtcttcggcgcacgaaggctggctggcgaggggcgtcggtgcaggggccccacatgtcggcagagtttgagtggtggtggagcatcggtgcatcagccgtagattcgtaggtggtgagcggcgggtgaaaacccagcccggcgttggccggaccgacaacgatggttaattctccctcctgagggcgttgtcgtgttgtctcacccctcaagggtgattgccgggcgaaagcccagtcttggctcctttgagccctgatggacggcggtggcggttttccgtcgcttctcttcttgaagacatcgttttggcaccctccttgctgtagggcgatctcgtctgtgttcttttgttggtctagcggcggccggtcacgcttagtgacggccggtctggtgctaaccttctcctggccgtagtgggtggtggtatatttttttcctttctcctggttatgaccctccagggttgtaatcttgtatttttttcctgctctatcaatagaacttcgcaccgtctcgtgcgagtcgttaaaaaaagttcttggttctgcacttctgcttaatggatgagtggacatataagcatgcttttctcaaacttttatatatgaatttcttagaatatatattttttttaaaaaatcataatagttaattcatacgtttgtacccttgaataattatcacaaatcatttttctactcggtcattcagtcattggcacaaaagaacacataagcggccaaaactgcaaccccaggacagagcatatttactacagtttcatgtttgctatgagctcaaactcaggacataaaagaacagtcaaactatgaaagaaaacaaatatttgctgaatcttggaaggttggcaatctgctacaagctatggcggatctgagagcacaattccaattaaaaactgagattgaacttccaacaaaaccacttcaggtccaagaataatctgctgctactaatggctaccagggacaccaattgcagtctatatcattcttgattgattcactatcatgcaaaaacacatcttccaaatggttcagcgttattttctcaagtaaaaaggctaaacaaatgagaaaacagagcacagctgcatatattagattcattcagttggtggagagaaaatgttaacacaagatggtaaaagaccctgaaggacacaactgctaaaatctaaggaataagaacattgccccattgttacgcttattcatatgcttatttgaatcgcttattagcaaataaacgatcatttgtgaataaaacttttacatatgtttagaggtgaagatttctggttttgcggttaacggtcataaaaaaaatctcgctgttaaattgagggacctccggtgaacttattccatatccgcgcctacgtggagtcaacaaatcccatgttgggcccagcccaggcccagtttgtttggaggcctggagcgagagagttcgagtcggatccctaccgtctcccacaaatccccaagacccccaactatagatggccatgtgggccgcccggcacggcacggcccaggcccggccgtgcctgggccgaggcttgtcgggccggcacggcccgaccgacgcaccgggccgtgccgtgccagcccacgtgccgcactcacagcccaggcacggcccaacacgcctcgggccatgccgggccggcccgaaggcacgatgggccatcgtgcttttcctcagaataagtctaaattttctccctcctattgggctgtgacattgtatagctaaaaaaagtctattttacctccctcttctttgtgatgtggtatataaatagctaaaataagtctatttaaggtccctattctttagacattgacatttatatgtctatttttagtccctatactttgtgtaccgggtctggcccgaacgtgccgggccagcccagcgtgctggtggggaggcccaggcacggcccgacagtcgggccgggccggcacgggcccgacccaagtcgggccgtgccgtgcttgggccgggccaaaaaggcgtgccgtgggccgggccttcgggcctcgggccttatggccaactatacccccaaccgataaagaggtatatatatatatatatatatatatatatatagagagagagagagagatcttctggcgattccagatggccggtgctgctgttccgcgcatcaccgagttcatggcggaggcggcgcttgaggagggtaccacgacggagaccgcggtggtggtggagcgcgcgagtaagctgggcggcggcggcggcaaggcggaagcggcgcctccgcttaaggagcgcgacgcaaacaagaagagggagaaggcgactggctctgctcaggttgtcaacgccgagtccgccgtcgccgtcgccgccgcgggtggagaaggcgaccagaagcgtaaggtgcccatgcctgagaatttcgtcgccatgatcctggcactgaagaggagccatggccgaccttcgagtacctggactccctctcgcttgagaagcgcagtgaggaattgaagagtgctgaacgccgctccaagctggacgacgacttggagaagctccagaaggatgtccgtgacggcatcgacaaggatggctactatctggtcgatgagagttacctcgctgagtcggccgcctgcaaggctcagatagacgaactatgggccaagatcgactgggatctctacaactttggggactgggactacgatgacccagaatacgttgtgtacctgtgatgatggtgatttctagctcaaatgacaatggtggacaaggactgaccggcctttggggaattcagttagcccttacctatctatctaagctatctctatcagttagttagtagtatcaaccagttaatatctatcatgtatctatttatctctctcagcaagtatcatgtttagttgatgacgtttgttaggtaatgcctatctatgttattcggcactctacctatggagactatgtgatatatatcttatggatgaattgcgtatggtagcaactctactattattaaattcttgtcgcattggctttcatgtggttctaatgcttggctgtggagctgtcagtcagggatgtgatatataatgctctctttctccttgtgtgtgtgatagtcagtttctttattcctctgtccaggtaactaaggctgtttgatgctaaaagactagcactactagttaattttgtttggtgatgaaaattgctactcgtgctactctttaaaattgcaggcctatgatttgtttgtgacaaactgatggtaccttttgattctgttatgtaaactctgtcttttgagtgtgtttctattaaatttgtttgcaactggggtgtttaatttgtttagttgttgtgatcttgtacaattttcgtgttcgagcttaagttatgcctctctatggcccatcttgcagcccttgtgtatatatttatttctatcaagtcagtatcagttatgtctacccttttaattgatgatgtttgttcggtaatgcctatcaatgttatactaccgaccctttgtataactattcttgaaaaatcttatgagctggtgtggttgtttatatataaattcgagaatttgccactcaatagtagtatcggaagattttccaccatatatctcactgatgtgtgtcccgattccacatgttatagagtatagacatataagaaactgtatttttttcttcattgtccaatgtgtccttcaattggatttgcttacagcaaattgcattgtgtgctggtcatttggtgcatctgcttttcttagttgcactgatactaaagaatgttttctgtccatgaccactcttcagctcttcctttttaaggaagaaagcaatttgataaaatggctgaatgaaatatgttttgttcgatgttacattatcagaataagccaaataactagatggtatgataattttcatagcaactgtttgaataactatatcttcagtgttgaagttatgtgttgccgtggggaatatttttcttgcatttggttttttgttctgttctaatccaactgtagctgaacttcttgacaatgtagcagacgaggtttgtagtaccttatggaaacttcatttgttttcatgcattcatattaatcttagagctgctgttgtgtctgatggaggaggaattggtcctacctaaaggggtaaggcgatggatcagtctaggattcgcaatcaagaaatcaaagataaccagtgtaagtctcatcttgttttcctagcaaaatttgaagacctttaccaatctgtgagggatttcaaatagaagcttattgagtactaaatttctatatttctttttgagaattgtgtattctgtaccttaatgagagtctactaaattaagaaagcaaacctgcagaaagatgacatgatgataatggataattttgttacctttgctatagtgttttaaattatttcccctgtattgtttatgatatgatactgaactgttttcattcgatatagggcatgacaacgagaattaaatgcagtccttttttgtactagcatgcattgacaaactatggtgtaagaaatacaaaagatattattgaggcaagtctgatggtaggctggcagcttgaacatgtgtaagatatatagttatatataattctctgaaatgaaagatgaattgatccctaatgagtaaatatattttggagatcttcaaatgtaaatctgtgtagtgtatactgttttataggctctgttccttacaaaatggaaatatcctttacttgtatcaccaactttgcagttatatatatgcaatttcgtctgggcattgtgtgtgcaattaatcttataaaactgtcatggagtgttttagttcaaatatttgtaacattttttcttttagtatgtaggtgccttatgctttaattttgtgtcaaaacacttcttaatcactgttcactgactgttagttgtttattttgcacttttctctacagcacagattgaaatggctttaagacgagcacaatgagacttcgtgctgatgcaatagtgttggcttgcgcaatttttttcattttaatcattgtttatcttttttctgaacaattcatggcaatttaaacttctgcagctatcagcaattatcacacagttcttaacagatgattatttttacagtttgcttgtaagctcaaggcttgcttcccttcctaccattttggaatccaattgataattgagaggcatatggtctagagtctagacaggacagtgttggtgccagcatgccaccatcgaggccaagttttttttttttgaattaatcaccggggggggggggggggattccccacctgaattatattgaaaagaggaagaggggtacatcaggaagcattacaacattagctagagcgaatagaggaagaaagaagacttttccagttggtcacaaccgacctatcttctctactgaggcgctcagcccacaatgtagcgtcctcaatacatttagccactaacctcgtccgggagttagggagcctccggaaaacaatgtcgtgtctatggttccaaagtccccagaaacaaagtaagaaaaaaacttggaaatgcttgacaggcaagtggcagggagcagcgaggtcagcgagatcatgaacattcaaaacaacagatatacgcaaagctctctagaattcttgagcgaattggcattgaagaaagatatgagtcacactttcatcagcacagttgcagacaatgcacccagctgttggaacaatgttcttcttgtgcagattagccttggtagggagccgatccttagctagtagccaggcgaagaattgaactctcagaggagcttgattgtcccagatgaagcgccggttcttgcacagagggatgcccaattgagtagaagaatagatacactttgtgtgaaggatctcgggagcatcacgcgacgtacgtaagagttattgaggtagaagttttgtagcatctctcgcaattgtgataattgggtttcagcagtggaggacagcccgggggggggggggagagattacgtaaatcgaggccaagcttcaaacaacataaggttaaggtatgaacctacaccatattttcagcttcagaagagatccaattatattatcttttctcttttggtggtccatctttgatttaaattgtcaagtggggcagccaagacgaaattaattagtttttatctcgattacatgtgtaaaccatggcaccatgtattcaccctttctatattgaacgcttgattgatctgaaagattggctagatttgttatgttggtttgttggtttcttgggactttgtagcaaaggagtggtgttatagtgctcatccatgggtggaccatggacgatgggcagcaagcctgagagtcaggtaaaggagttggcaggaagctcagagaaagactgtcgtcaagaggttacaggccatcatacccagcttgcttctttgcttagattatggtactataattgatttggcttccatatgtggccacatgatcgcacacaataggctcatcttctattcttttttaatactggtgcaagaaaccatataatttctctctctcttttttactccagtcatcgtagtgcctccattgttttagttcttgcaatatccaggtgaccaaaatttttccttcttttttaagacagttttcctgaaatttagtagagtttcagaaccactaacactgaactttgtatggaaacaaatgttaattatttttggagtagtatgatgttagaatttcttatagttttacgtttacctccaatcacatggttgcagaatcatggtatcagccatttcatcattgatattagaaaaatccatgtgtagtatcattgggtatttagaaagttcctccaatttttggctgtaaaaatgttttactatacataatatttgttgtcctctgcagttcagattgttttggcactacgtttcaaggatggattaaacatcccaagcatctcaatctgtggttgtacaatccttcagaccacataaccaccggttgtctaattttctggataatagcatgttggatggctattttgctgtgttggacggacaaacagattattcaaatgtgcattcagtaccgtgaatgtaacaattaggtacctgatcattccagaaaaagaatgtctatatagagcatctttttttgttgaacaattactccctccgtcctaaaaaaataaaccatggattttggtgtccaactttgactgtccgtcttatatgaaatttttttataattcgtatttttattgttgttagatgataaaacatgattaatattttatgcgtgacttgtctttttaatttttttcataattttttcaaataagacggacggtcaaatgttggacacggaaaccagggtttgtctttttttgggacggagggagtacgtatctatctgatcattccaggtacaaaaaatgcttcatcctcgggcagacaactgatgtgatctcgaattctaggcagcaggtgcacgctctatgcttctatcctagggccttgacctttgaataaaaggaatgcagatcctctgcctcaccttggcaccagaattgacttggcagcctttgtctccactatcaggtaaggagtagtatttcccctttatctactttgatcatcactatttcttctttagtttctccattaactttcagttcaaatatactacatgtcatcttccaatatcagacgtaattcattgagtccgaacaatgcatattaaatttcaaaattgaattcatactcgaatggccagcatttaactttgcttgtaatgaacataatggttcagtttgtcagctataaaaatagattgccgtaaaaataccagtggtcaattggagcattctgtcatatccattatcagttgtgcagctacgaaaatatgcgtgcagctgaccattgcagcctataaaagtaaagcggaggtgaatactttggtgatggcaatatgattatgcgtatgtgattcttaatttattttatatggtttattctctgaaataagagggagaaaatgctgatttatgacagtgtgacaatgtgaatgctaattttatgtgctatgaacaaattacggataccaagtccatatgctatagaatttcagagttatgatgctacctatacataggtttgttggactgcaagtggtcaattgcagcattctgtcatccattatcagttgtgcagctactaaaatatgtgtgcagctgaccattgcagcctataaaagtaaagcggaggggaatactatgggaaaactaaaatactctctcttgcagtccaaaccactcatgtacctatttctggtgaagtgagagaccaaagtttatttcactcaagtaaaccaagttctatcccacaaatgcatatacttaattatgtgctttcttctgattaagagatcctcaagctcattttactcaggtaaaccatgggccgggagtttaagcaaacacatctaagtcatgtgcctttttctggtggagctagagaacatcaaattcaagttagaccaagggcaatgtcctccagcagttcaaacaaacacttctactcatagtagttcaaacaaacacttctactcatagtagttcaaacaaacacttctactcatgtgagctattctggttgagttacagaacaactttctcaggcaaaccaagtatgaaatttttcctgatacatatgattatgattactgtttgcttatggaaaaataatttaatagtgtatgatttagtcggtatatatgagaaccgagaatttattttattttataatttatgtcggtattatggaattaagatggtttattgccttttccttagcatggttatagtgcctttagtttagcccaccaacttttgcatcctttaatgtccttcctgatcttgtgatgtcttttacttttctgtgcccaattttcagcttgccctgaggcggcaccggtgagttttgtgtgtcagcctcaggcattggttaaccgatgaaaacttttttttttttggtatttggatcgactatttctttctgcagcattatccaacatggagtgctcaattgcatcgatgcagatcctatagtttcacttatccttatgcttatctatacggcttattgaaaaaaaaattatgggtaaaacttttataaacaatattgtaaaataaaacttgatgaaaaaaaatacaaaatcaactttaaaattaagttttaaaatttaaattttgacttgtaaacataatcataagcggaataataaggctggaagtggctagaagagctggaattccaaaaataaatattatctacctgaattctgttggcaatttttttgaagaactgaaaaacactacatgaattctttaaggcattttggatgtcttatccaatatgtttcttacgcataatgtgatttcataagaaaatttttgttcatcatcttctttctttcttttttagaaactccatcattttcttttggcataaaaatttgagttacataaattttgatggtttatcttttttttgaagcgggcaaagcccactgacaaagatccactacatggtccagtaaccttttagcaaagatcgctcatcggcctattacatgatccaatagcgcgttagaaaatgactgagcctgacaacctcttctaaaaaaggaaaaagtacatcgaaggtcctcaacttgtcatcgagttaaaaaacatcccccaatcacaaaaccagatatagaacatcccttaacttacaaaattgttcactttaggtccttcggtggttttgaccccggttttatccgacgtgacggctaaaacagcgtgggacccatgtgggccccacatcagggtgtccacgtaagcacccctctctttcccctcttctctcccttcctcccatctctctctctctcactcacttttctgctctctagcagctgactggcgggtgggtagggcgccagtgacgcaggagaaggcgggagagcgaagaggacagggggagaaccagatgtatagaaattctgatcttttttaactactccgtatatataaaaaaagtatcatatattttcttagttttggatttagagtagccgctagtctgctatccattctgatcatcctggtaaaagaatcatccaatacatttcacatacaggttctcatggtcttctgtcaaacaaaaaaaaatcacatggtcgaattacaattcacacagtcatatttaagcaggataagctgtgtaatcgaggaaagagaaaaaaaaacaggtcgatcttgttcattatatagccatgatatgattttggcaaatcaatcaccttgactacattggtcaaacacagacaagaatgaaaattccatcacaaaccagcacaataatatgagaccaacaaatctctttattattataaataatattacttaatcgatatatatcacagtgatttgaaccagtatatataaatcatttgcagctttgtctaactcagctttccaacagtagactgtcaatcacaatcatcacagcgagcgatagcaattggggtcgtcgaagtcctcccagtcggcgaagacgatgtcgccccagtcgatcttggcccatccttccttgagctgagcctggatctcggcctctcctcgacctcgcggcggacctccgcctggaactcctcgaagctgtcgcccaactcgttgcaggtggcagccatctcctcacgcatcttgcggtgctccggcgagagcatctccccgtcgtctgggagagggaagggcctcttcttccatgccaggatgtagtccacgtactcctgcggcatgggcagcttcacagacggctgctgctgcttctcgtcaccgccgtctccgtccacggtggtcgccgccaccgccgcgtcgtcggcacagtccactccggtgacaacttcagctgctgcggtggcggcggcaggcgtgttctctgcctcgtcggaagctgccgccttcttcgtcgcagaagcgtccatattttgcgcgtttgtcggtgatcgatcgagcggaatgctgctgctaatcggcaacgacgacatcgtcttcgttttcttgttgcctcgttcctgagcccctctcgatatatatagtgccgctgcgttcggagtcgatcgatcgggagtgggagtacgacaacccggattggtgcacatccctttgattgatttattgagagggtggtggttttatctaggctttattatcctacttcagtaatatatgaggcttattcttgtgtattaattagtaccctggatcggttggtacagtatgacttttattagctagcgatgcctatctttgtgagttattagacccctatggagacacttctgttttatcactgagaatcctttctatgtggtgacttatcttctgatctaaagttgcttttttgttggcttttgattggtacatgtggcgccccttcgatctttagagaaaaaatcattaatttatacaagacaaaaaaatgcttacaaatcatttgtgatatttttttcacaagaaaaaaaaatacacaagtatgagtaactagacattcgtgatctagtggtggaaaaggtgattgacagggaaaaaaaaagtaccaaacccgtcacttatggcttgtttagttggcaaaaaaattttgcccctgcatatcacatcagatatacggacacatatttaatgtattaaatgtagtctaataacaaaataaattacagatttcatcagaaaactatgagacgaatttattaagcctaattaatctgtcattagcaaatatttactgtagcaccacattgtcaaatcatggtgcaattaggcttaaaagatttgtctcgcaatttcctgacgaactgtgtaattgtttttttttcatattaatacttcatatatgtatccaaacatttgatgtgacaacgcgaaaaaatttgtttgagaactaaacatgcccttactccatccgtcctaaaatataaggcacttccgatcaaactccaacgtgatgggtaagaacagagatgcatgctagctattagccaacctgccttctccagccagtaggcaagatactagcctattttacttcagtgcgaaatgtaaatcacaattcacaacagctaattgagttacacgctgcaggttgtagcatcagctaccaacacaaattgcaactgcgtactaatacatcaactgaccagagatatattgccctgactagcctgacattattgaaaagcaacaaaacacacatcgatactaacatgtacagctatgaatgatacacaacttaaattgtagaaacaagcagctaacagcaatactttgaatggttttcagaagctagtggtcgtaagagtggtcaccatcaccatgcaatctgtaatagtaaaggctccctttaaacttctaactttttggtcacatcaaatgctcacacatgcatgaagtattaaatatggacgaaaaaaaccaattgcacagttttcatataaattgcgagacgaatcttttgagcctaattataccatgatttgacaatgtggtgctacagtaaacatttgctaatgacggattaattaggcttaataaacatctgctttaatttgggtttagtctatgttattagtctacgtttaatattttaaatgtgtgtccgtatacgtaaaacaaattttggaaaggaactaaacacggcctaatacttattgccaagttttcatctcttggctgttcttgtctgctgttataagctgatgcagtgacagctcccctcctcattttctctttgctgcaacatgctaggatggaatttgtcaacaaaaagggtgcaaatattttcgaaaaaaaaaggggtgcaaatagcaataggcaacattatattgctaggaacaagcagtaattactgattaccttaggagctatatttagatctcgatttcaacttcaatttccactgttccaaaaaaaaacttcaatttccactatctcgctttcgatctatgcctattattcctctgttcctctcacctctcttcgatctccacgggcagcggctggcgggcacaggcgagcagtgcgcaggcgggcacaggcggcgggcgacgggcggcaggggggaggagctgtgcaggcggtgggcggcggaacggtgcacgggcgggcaccggcggcgggggaagcagcggcacgggcggcgccgctccactgccttctctatcctcctcgagctcatcctctctcgcccctgcccctgccaccgccgacagggagaacagctcactgccgctggcgagatcgaggacaaagtgagccattgctctatcaccgacttcctccctatccgctggccgtcctgcccagacaagagtgagagagagagaggaggaagggagagaaccggcggggcggagcggcggaaatccaccgacggcgcccccaactccctgcgccattatcatagcgcctcctccaccgagctccactctcgtccgcctttttttccacgactgattctgtcacgccccgaactagtcctgagcggaactagcccgtgacgctccaaattaacctgttaatcgataccagtcccaggaaacagtgctggtatcacaggaagacagaatatcatagcaacagaggtctctttattatagagtaggagtacggtcatgttgggctgcggacagatcccgagctcacaactacattacaaaagggaagcggaagccaagacttggaccaaacatcacaggcgcgacttgggaactaggccgaaaccctaaaactcatcgtagccggcttgctcctggaggaactcctcgtcaacgggttccgcttcatcttcttctacaacttgggggggaattatttatataaagcaagggtgagtacgggagtactcagcaagccatgggaaataagtgtttaatgcaggcttcaaggaaaggctgttgtttttacaattgattttatttgaactcctttctgaaacaactaagtgagtgcttctcaaacgacacggatgagacagtgcgtctcgtctggtcggagtaagtgcaatgtatcagtcttttgaattgatcaagattggcacccggccaacagctttcaaacggccacccgggcctggctgatcccatcagccgcagattttccaaatatcaaacctattccacaacagcaaatttcacaaggcagtagtcaagcaaaactacgctaggaatcacctcacatccgcccatgactgtgggcacggctgttcgaacagtttaataacctctgcagagggggttcactttacccacacgatattactaacccggatcatccagcccgtgcagaacagccacgactagagaccttaaggctttcatgacaaggcatttcgaaagccgacacaggttcaccatatgccaacaagaggggtcccagaccaacaccagattaggtcccagaccatactatgccaggaagcccaggggtcctccccgacaccaccccggcgaatccacatgtctcttggcatcatggctcccccgattagctagttactcagtcaggggtgtcccattccacccatgtggtcgtacttgtcttatgttcggatgaaattccaaggaaacggtccttaagtgcaagagcgggaaaccgtacacccggtacgttcctcggtccgcgattttggaaattcatttaggttcgcaagcaccgacccaggagtcgggttttccaagtgttttgtaaaacccaagttttacccaagatgtttctcagattttaagtttgaaggcgaccgtcgatactcgtgctgagtgcacggtttccgaggtgcaactaggtggttactagggaacatggtataacaattacaatggaagggtcaaatgcaacaaattaggtaggtccgccaatctgccttgcagacgggacaagcagattaagtacgatcctatcaatgcataatattttccaagcaacataattaagttcaaatataggctcaagatgttcaaaggtggcttgccttgctcgagatcttgagcttgatcgtcgaaatcctcgcactgcgggtcttcgggctccgaaactatacgcgaaatgggacaactcagcaaacggcgaaaataaagccctattattgacctctaagcgtgccattatatagatctcgagatttgaagaattttgaaagttgaatggagtcaaacggtcttacggttgggaagatattaaatttctaagattattgtatttttggtctaaaggaaaaggatttatttaaatcctttttgaaaaagaaaagaaaagaaaagaaggagggagggaaattagacttcccttgggcggctagggcgcggcccgagagaaaggggcggctcggccgagcttaatgggccggccggcccgagaaggcggcccaaggcgcgcgcgcgggcggggaggggagagagagagccggtgggctggatccatcccgcgtggtcccgggtgggacccgcttgtcggtgactcggttcaccgtgagcgaggtgcacgcggggcgtgctagggtttggggaggggaggcccggcgcatgcgcgcggtttgcggaggacgcggtgcggtgggcccacgcgcagcctcacggctcgcggtggaccgcgcgcgcgagggagggggaaacgaagggagcggctggccgggtcacccgatccggtcgcggccgaggtggcgccgacgtggcgcctacgtggctgccacgcgggccgtcggaaggtacaccataacgctggccggaacggacgacggacgacaccagcgagcggcggagcgaaccacggcgatacaggcgaaggcgagcacaccgggatgttgcacaggacgaggggagacgagccaacggctcggattcgccgaggaatgctcgacggtggcggattgcggtggcggcaaccggcgacgagagaagggggaaacggcgacggcgcgacgagagaccgattcgggagagctagagcatctacgcgactccgggagtccgttgctagcgtcggattgggcggagctaccccgagcgaggccggcgacgagcgggtgctacggagcacgggcggcgacggcggcgagcacacagcgggcggcggcaatggtcggggcggcgccagctagctacggggaggctactcgtgctactacccgagtataaggggaggagatggaacgaggagggagaacggagggaggcactaccgtgcgggggtgatggggcgcagtgacgagaggccgacggcacgggagtgatctctccggcctcgggccggggaagaggaagaagacgagcgcccggagtccccttccgcgtcctagcgcgcaccggctcctctggcacacgtgacggcggcggttggcgagagggacggcaatggcgcgggcgagaaacggggaagattgggaggggaaagaggaagggagggcgcctgggattaaagggcggcaatgtcggtttggaaaccgaccttgggcggtcaaggcgcgagctggcgctcggcgctcgcggccaaaacggcaacagaggcagatgacgccggcggggaagagaaaaggaaaaagggggggagagaaagggggcttgcctccttgctactttggggaaaaggaggagggagagggggcgatgcggtagagggaggaggagctcagcctccgtcccttggaggcatgcgcggggagaggcggggccgagtcgatgacgacggcgatgacggcggaccggtttggagtggagcggcgacacgggcggcaggcgcgggcaggcgctgacggcggcggcgactggctggtcggccaccacggcgcgcgcgcgcgggcggcgtggcgatttgggcggcaggcgcgggaacgacagcgagagcggagagggagggctcggcgcggctcacggtagagcggagagagagagagagagagagagagccggggagggagagggagatgggccgagagggattcggcccatcgaactcgagggaggcgaaatagacttttgcggagggatttggatttgggattgaacttgatgatagatcggggatttgaaatctgagatggcacggacactagacaacaagcaaagaaacaggtttcgcaatttagggtttttttagagatagttttcccgctaggcgccacgacggaacgggcgctacagattcgtccgccttcttgaggtcgtcgtccccggtgccgtggtcgacgctgaggaccttgtagtagtcagcccctatctccctctgagc

SEQ ID NO: 8733 - DNA, 9583 bp, Oryza sativa
ttggacatcgatgtctaacgacatgctttgatcaggacggaacagttaaaaccatccaggatgcatcatatgtacgccatgcattttcaatttaattaccaccacgcatgaataaatgattgtgactagccggctttgctacaagattaaacctaagcttgtttttttaataatgacctaagcttatatatgaaagctcctaatatctgatgtgacggtggccgtggaaagagaggcttcatgaatgattgcgtttaattttttttgtccacgaccgaaagtattgacgctgtgttgaacggtgtggatcatcacccatctctgatggagatggcacattggagatcatcagagagtgatcactagtcaagagctagcagcaggaacagaagaatacacacacgacattagtggtaccagccatctattttctatataaaagggggaagagaaggagtctcggagacgcgtgcatggatagatgagttcttagctaactgtaagacacgtagctttctccctgattttgacatgcatatgtgtagtttacgtggtttgttcacattttttggtcgtcatggttttttgtttgttgacgatgtcaaactgttctattaaccactagattggctttgagatcggcggtatggtctaaaggtttgctttgagattcgttattaattatatggtttattttctgggagctaagtaaatggaactgatcatggtggatagtgactgcatatacatgtttccttctacatgacacaacatgagatgattagtagccgatcacttcaaactttaccttccaagctttaacgaagaatacttagggagtgcatgcatcgagacaatatttgtgcatgtctacgggaagataatctagtctggattaacatgtgttatatattaacttattttgacccatagcaagttttcttaccctagctagtagctatctattttgacacatgtccttgatcgatcctagatgaatgaagcaccggtcaagatgtactacatacacacgcacatgcacaccaaaacaaaatgaaatgtttctaatcaataggaaaaaaaagttttccattggtcaacctctttagctctagtttgggtttgatttacaccctataatgtaatacccagtggttaattaaatccgttgcaaattatgtccatataactgttcaagcgagcatttcttttggggcgccactccatctatcaattcttttacacatgccatcctcatgattaaattaattaattgtagaattctcgcatgcatgcatgatttcctttcatgcatcgatcatcaaatcgcattggcccacacaccatgtgaaatgccaaatcactcaataggctcacaaccatccttggacatgatttgcatttttttatagtaaagacattttctaaattaaacaatatcaaataaattaaacctgaactaggattgatagactaaaattagactttccttacatctaattaaacaagttaaactattcatatccccacaatcaaaagattaaataccttcttggaacgggttcgtatcctctaccataatggtactaccattataaacactaacatgtggggtaatagaatagtgtgacccatgtaacagtgattttggaattttgcatatggatttttttttgctggattttaatcaattgatttaattaaaaaccctgcaaaattctaagaggtctaaacttaaactactcattcaagcattaactgtaattaaccatgcacatatagtaacagcttctagctgcgtcaattgcgtccctctccttctctcttttcagattccatttcaatatatatatatacactatggcacatgtgggaaataaggctggcaaactctcttgcaagtggcaagcccttattagcagggaagcaacagcagccaatccaaaggccctcgtcgcaaagagactggttccgttcagttcatcgccgtagaaaagcaacagcgaaagcgtcacccccttcttccccgtttgagtggctgccaatagacctccggttcgtgtcaatggcggaaacccccccctaaaggttgcaatcttcatgcatgcggtgatctgctggagctagcaccaccggcgccagccgcctgtcggtgtcacgcgcagctagcgaatagcgataacacatatataccgacggggttgtggctgtacttgttgatatatctttttctccgcagcaatgtgcggggtgttttaaaagtaacccttggcacgtcgcccgttgtggacggtcgttagaacggtttccccatcgtggcaatggtgttgtcactaggacatctctccaaggattgttcttaattggcgcgtgagcttttacttcgtgtagagaagtttagggtgctggctcgaaacggggtttgctgcacattgtgtgatgtgaaaggtggctttgttagggtgtggctgcgcatcgagggtgttgcctaactagaaaggttttgcttaggtttgcaattttttttaggctgaccaagataggtgtcgtggcttgttttagtggtagggttacttagtttagcacatgagaagattgataaccaactttaccctactcatttacatgcagcatgtacgtgtgtgtatgcatatagctgcatgtgcatatatatctaattttttgaatcaattaattagttattttgttgataccaaagttatcttaacttttaaaggaagctaaaatatatttaacctgacttgctgaatgtcgtgctttgcaacggatgaaagaaaatatactataatattatataaaataaataaatatatgttttccacaaaatatggtgttcctatccttttgctctacgaaatatttatcttaatttgattttacatgtaattatccatttagatttgattgtcttttaatattatgaagttggaatagtaatttgcaaaaattacaaataaagtaggtgaggtggcagattaacaaccaccacgactactttttttttaaatactaatatagattatccactaacaatgctttccaggtggtaataattagttcacgccctccctctaaataattaagcgtcccaactgggatttcaatagaaatttagtgagatcaacgatgtatcattggtgtttcattggtgtttctatctctttcaatgcgggttgattaggggacacatttatatatgtgagcgcgttgaggactgaacacaagttctctacttaacttggttatcaaataattagaaaaaagcttgagcgtgttgagaattgaacacaagattatattgaggtcaaaatcataaactcatcaccactacactatcaagttcatttcttctctactgtgtaattaaacttttgttatagtgtgccaataaaaaggaatagggttaaagctggccttctaccaaatattctcatatttgtttcatcgtataattgtttaacattgtgtaacgtactaaaatcaatagataattcggaatgatatatatgctgtctacctcaggttgatccaggaagataatcataattagacgaccacaacgtgagatatcttcaaaacctttggagacgcgtgagtacgcgttagacaaaatgaaaacttaattaccatgtgctcgtaaacgttagcatcacgaggactaagattcaattacgctcatgtactctccctttgaccatttcaacttaaaattgatgttttctctaacttagtacttaattaactagtaatttaatatcattaacatatactccctctatccaactgaataaggcgtgatcagatttaactcggtctccttaaattttttatatactataatgtttatagcaacaatataataatcatatgagagcaaattcaaatgttaatataataatattatttttatcaaataaaatttaatttataataaattattttttgttcaaatgcttaaagagctaaatcttattccgtgggatgaagggagtaatagtttatctaaataaagatcagttgaagtttctcactttatacataatgcatcatgtacgtaattaaaccgagctctgtgatgaaaattgtgcagtagaatttaattcctttaatttcatttggcctctcctttttggagttcgaggtaaatgtacgcaaggcaaaatcatccatggtacaagtagcagaggaacaaaaacggcaggcagtacagagtacactgtcaaattctaccctttttgggaatgaaaccccatcaaatttccatcgtggagaaaagggctctgtgcctctggtgcctgtcccttttgcctatcacaggataaaaaaggcaaggaccacacagcaactactagtgtaaggttggcatacaaagctgcaaattcaattgccccaatttactactactagcattgaagtatctaattaaaaccccacattaatgtgggtaaactctttgcgcacataaacgcaaattattctcgagaggaagaaccaacaaaataaacgttggaaaaacaaacccgcttaataaaaagaaccggttacgtaaaaaattcaaaaaggacgtacgtgcggagattggttatgtggaattagcgattgaagatgtgcgtcgtggttattccaatgcaacctttttggagttaatgttaatatctttacctgtcagttgattgaacttaacaaagattgactaggaaaaatatcaaataacctataatatgaaacggagaagtattttgcaatggatcacattatactagtgtatagtgttggggttggggaggagttgcatggtacacctagcctgagaaccaaatatgatggtgagacactgagtcagtacttctgtactgccttttgctccatccaaaatgttttggctcgagagaagtgtacacaatttacgagagtaacaccagctatcaaagtagtcctaaggccagtcacaatgggggtttcactggtgtgtcatgcacatttaataggggtaagactgaataaaaaatgattatttgcatgaaatggggatgagagagaaggaaagagtttcatcctggtgaaactcgtcagcgtcgtttccaagtcctcggtaacagagtgaaacccccgttgaggccgattcgtttcattcaccggatctcttgcgtccgcctccgccgtgcgacctccgcattctcccgcgccgcgccggattttgggtacaaatgatcccagcaacttgtatcaattaaatgctttgcttagtcttggaaacgtcaaagtgaaacccctccactgtggggattgtttcataaaagatttcatttgagagaagatggtataatattttgggtagccgtgcaatgacactagccattgtgactggcctaagtattcacttgcatcatgtatgagctaagcttcaccatcgctttcaactaacgaggggtaaagtggttagtttcatcggttaatcaaacaacattggagaagctgtaactctcgtagatatatttgttctattggcaaagcctgatacacactcaaatgagttgtgttgaacctctcttctctctgtaaaaaacaaacaatttctagattttaatttttctctcaaaatagttgttttttctctcttttacctatcctctatttgtaaaatgagaagttttatccctttaatactccttacctactcaaccaccaactacttttctattaatgattttggtcatttttcctcctactaaagttgtcttggaataagagttgcttttattttggaatatacacagggactacatgtgtctaggagaagctgatgacattgtccattactagtacagtagtacttaagcttttcctcttgttcattataaaatactttctaaaattattgaaaacgaaatattattttagcctttcttactagcatactttgtataaattctgaaaaaaaaggcttgaatatatgaaatatatagacaagcttggatttattctatatttcttgatggcttaaaaatgaagaaaaaaagaggggagaaatcttcatccagtctcttatgggtgactgctaccgattcaataagagtttggcctaggaaccattgtttaagtcggtgttaatcatatctttttcattggaatatatcgcgtaaggttcctattgcatgattaaaaatacatcttcccactgccacaattgataatgtaaatattccattatggcttgacgaactgttaattgtgactattaatactatgcatatgttgtatgttgtcgtgtagctctttgaacttctatttaacgccttctatccctttgcgacttttcaatcgcaagactgggatagagggttttccttttgctcccatgtaaccctccttcgtaggtaatgttattcattcctatcttctataccacttattttcataagtatttctcatggaattcaatctccccctctgatctcctttcattttctttgctttcaatactctggaaaatctcttttaatatcccatggaaagtctcatctagaccaatgttgtatatttaaatttgtgtcactagcatgttgtttgtgcgttacatgagattttaattaaagaaaattatcattaatcagttattaccatcttttctgtatatatcatttcttaattgctgcatatatttgttactgacatgtgaatcctttgaccttacaatatactttttcctccccacagaaagtaaagagttgttaggggtggttgacatgtgtgagccctctagccccacctatcttttatgttttatgctctcaaaaaagtagggagttggtggtgccaccaccacttcctccttttcagagagtatagatatgaaaaacatggtctagtatgtatgatattttgccatgttggagatcgatcgatctataagatgatttaagatagttttaagcttcttactcatatttatatttttcttctactaaagtttgacaatttacatttaaccataatatcatagcatagccatctcgatgttttcattgaaacatttttagacacacacatgccgtttccttcccaatcaaaataaaattctaccaaagtattttgttgatacttatgcagggaaaaacaaaacatcaattgttagatcaaacatatgtttcgattcattgatgtaagatatccagccacaaaaatatcaattaattcaccagctttcattctcttgtaaaaaaatattaactctttgatgggagatatgaagttgaacagtaaaaactgcaataaataaatgcaaaccttatgcatataaattctaacatttaatttaacaaatacctaccaattatatatatccctaacattaatacataaacaccatgtatatgtgtttaatgttagagatacaggtggtgatgtgtaattttgtctataactattaatgttagggatacgtctagtttgtattttgtttgatagcatctttaaccgtacattcatgagatgcaggtaaattaaatgtttgagttatatcttgtttgtatttttaagatatgtagatttttagtgttggagatacaattgttatatatttaaattcattcatgactagagatacgattaaccagatatattcatccatagagattagtgggtatatttggttgatcacatctgcagccatcaaagaatttaaagatataacagttatatcaccaacattaaaagcctacatcttcttaagcatatctttaaagatacacaatccagcaaaaaaaaaaatacaaacaagacgtatctccaacatttaatttacctacatcttttaaacgtatcgttaaagatatcctctgacaaaattacataccagacgtgtatctccaacattaatagttgcacacgaaatccaaaaatatacacatcacccccctcccctacatctccaacattaatagatgaatttccctcacatctcccatgtgtgcatgcatctttttttgttgtttgctggttgtatggttttttggtattaggctaaaactgtggttaaatcagtggtataaaaaggggtagagggagggtggcctccatcagtcaccacaaccccccccccccctctctctctctctctcctctcctccatatttttctttctcatctcatcacacttggagtttgccaatagaatacaaaaacagcaggtgaggagagaggagagaaaaaaaaacagagctttctctctctccctccctctctctctctcttcttccaatctgcggcgcgaggcggaggtggtggtggtggtggtgggccccgccggcgagatgggcccgtaggcgccggtgtgggcggcatcctgtcctcgccgaccacccgcccccgccggtgcggcctcgccggcaagaagtctttgtttttcttttctttttttttttcatctttgaaggtgcgtcgccgactacctccttgtgcttcaatctcggttcgaatcgaatggaagattttgtttttcgtgagaaatttcggggcttgagatgaacacatgggcgctcgagccaccccggtgcttgtggggagcagacagatttttctttcttttttttttgggttgttgttgttgggtctatttgatgcagggattaggttgtgtagatcttgtttctgaaacgcttgcagtttttttttgcggtttttttttctgtattggttctgatcgttttgtgtgctgtcgttgcagattggatccttaatttaggggcgaaaagaggggagtttgcaagaggaatcatccctattgggttgtttcttgctgctgggtaagatccaatccagcctctaggttaggtttgtttgctgttggtgaggagattgaagggttggctggtcatgttgggggaccagcgcaggaaattcctgctagagtcagcgagctcatcatctgaagaggttgtttcaagaagccggaaccttgcggttgagagctcggcggtggcggtgacggcggcgggggtgaggaagggagaagaggtggaggaggaggagctcttgaaccgtagaagcaagaagaataaggttgccagtgattcggggaattccggtaccggagtttgggactcagaaatgcaggatgctgatcagaatggtgaagccaacacaagcgagctcataggcgcgatcgggcgggagctggccattacatgcctgctccataccccccggtcttattatggtatgatagcatgcctcaaccggtccttctgctcccttatgaggtccgggcagctgtatagattgcggcgggaggctcgcattgttgagcacatgatctactgctcctgcaatgtgcttgagtgggatggctttgatccgtgccgccagcgctggttcaacatcccttccatgcctcccatagagtgcttcacgcttgctgataaggagtcccttgctgtgggaaccaatatccttgttttcgggaagaaggtggaggcccatgttgtgctgaggtatagcctcctaagtaactcttggacaacaggagatatgatgaactcgcccaggtgcttgtttggctcgg

SEQ ID NO: 8734 - DNA, 675 bp, Oryza sativa
cccaacgtattctgggtcatcgtagtcccagtccccaaagttgtagagatcccagtcgatcttggcccatagttcgtctatctgagcctcgcaggcggccgactcagcgaggtaactctcatcgaccagatagtagccatccttgtcgatgccgtcacggacatccttctggagcttctccaagtcgtcgtccagcttggagcggcgttcagcactcttcaattcctcactgcgcttctcaggcgagagggagtccaggtactcgaaggtcggccatggctccctcttcagtgccaggatcatggcgacgaaattctcaggcatgggcaccttacgcttctggtcgccttctccacccgcggcggcgacggcgacggcggactcggcgttgacaacctgagcagagccagtcgccttctccctcttcttgtttgcgtcgcgctccttaagcggaggcgccgcttccgccttgccgccgccgccgcccagcttactcgcgcgctccaccaccaccgcggtctccgtcgtggtaccctcctcaagcgccgcctccgccatgaactcggtgatgcgcggaacagcagcaccggccatctggaatcgccagaagatctctctctctctctctctctctctctctctatatatatatatatatatatatatatatatata

SEQ ID NO: 8735 - DNA, 11384 bp, Oryza sativa
agggggggaggcgaagggaggagcggaggagcttggaggagaggagctccatgggtggcgccgccatggatggagctcctcgcgcgcgagaggttgggttgggggaagaggggtttgggtggaggagggagtggccacaccacacaaaaataaaagcccaaatgggagggagggaaggggagtgtatgggtgagagaaataaagagattgatggagttttttaatagttttttcttttgaaaaagttttatcaaaaacaatttttgggcgatttttttagaggagggaaagacttaacagtctcattattttgcttatgcttatacttataagctaaaatttaggtgagagaggaagagatcatggatggagttttagcagtttatgaaaaaaaaagaaaaagttttatcaaaaacaaaattttgggtgggtttttctgttgggaggggaggtgagagaagggttatttttttttcaccttagaaaagaacctttttactttcttttatgttgattttattcacatatgccacttttgttttgtagtgggaagtcatattcttatttgtggtagataggagaaaattggagaaatggtttatattttttgcggtttgtttcgtgtctgaatattatatgacgcatagaaaagttctccaaaccaattgatctttttttacgtgggctggacacccaacgtgtaattgttacttatcgatttttttttctcccattttattgttcgagcacttgtgctattgaaataacgtacgacaagagggatttctccacgtaattttgtacatgctagttaaactggatgggttatacaactcatagcttctatttcttatatatatgcaattatgcatacaagtgttgatatcaatcaataatgttataatttggtccaaccacaccctaatggtatggaaatggttttttattaatatggtaatttctatgtcatcggacagaacgtgatgtcatgtttttaagctatctttatctttacaatataatacagagtaataaaatagattgtacatctattccctgtttctatttttcatggatcaatgttatttctaagctatttgtgatgaagttcttaatatcatacaaaagaatagtagcacgattttttaaaggataagttggtgttacatttaatcttaaaagggcattgtagatatacacatatctgtatgctttggtcccaatagagatgatttgatgtttaacacaagttaaagtaacgctttgcatcatgtcgatgtctatgtgtatgtttcagtgctaatcaaataaaaactttgttatcctaaaaggaagctgaagaaaaatatctcaataaaaccaccatatcaagttgaattccactcctaccttctaaactcattgtcaacatttcatcgtgtcaaaacctaaaaccacataaaccactgtacgcaagccaacacactaccacaaatctccgaccaatttttctaccgattttcatttgatcacgacactactctctagaacaaaaaatgagccgttttttcttgcctcaaaagaaagaaaaactaattttccaatcatgaacaaaaaattggacgtggaagtgtggaaccataaggaaaattttcttgtggcctaggctcaacgggaggaagacgacgacgccaattgccatcgtcagttcgtcaccaaccaagccgttgctggaccgagcgtgtggccctccacggaatcgtgcgagctcacgcggccacacacgtgtcacgcggggataaagcacgcagctttgccatccattgctacaggctacagcccttgctccctgaaatgttcagaaaaccatgagcttacccgcacaaagagagagagagagagagccagtggtggagtcaggaatttaaacctgtgagaaagagccagtggttaagaaatactgttcccagtaataaacctgaaaaaaggaaggagatattaagttttgatttgtggtgtggcaatgaaaagttgaaaacaccagggcaaaagcacaaacattttcattgcctgagaacatgcatagacaggattgaggacaaatcagagagactatatgggctcaaaaggaaaaaaaatgatgcaaaaggaccgagttgtaaggaggtatgggtatatctgcaaggaaaaactggacgcagggaccagaacgtgaattctaaaatgatgatcatttgtgggtatatccgcaaaggtagagactgagggtgcaattgacaaggaaatgtataaaaaggaccgagttgtaagagttggaatagcggaaggggcgtatctgcaagaaaaactatgggctccagggacctggttggaaatctcaaaaaatttggaccatttctcgatttgtgcgtgtcatccttgcgcaggggccatgctaatcttctctgtatcgttccaattttatcggatgtctccgaagagacaacacaagcggcagcgcgcggggttataaggtgggttcttcattgttcggtaggcgaggtggtactaaacctgtctcccctcaacgctcccgcgacccaccgatccccatccaacggcccccgcagcgcccagcggcatcccgcgcggtagtacacgctcgtcggccgtatcctccgttacggcccaaacaagcagagagcacactaggcttctctcgcctgcggcctcgtagctcaagtctgagccccatcatccatcgtgaccattcatgaataaaaccggtttgtatatgtgctcctttttttttttgtccggcttagttcgttcttgcataacaactgaggttctaagtggcacgaaaaagggataaaacaattaacacatgatgaattaattattaactattataaacttgaaaaatatgttcatttgaatttttaaagaaaattataccgtttaacaagtgtcctaatgaaaaacaagcaagttaagtttaggattgaagtaaactgtaaactatatgtctgaccgcttgcagaactactgattgaccagcttgattgcgtccaaaatcaaatggtagagcgagagccgaaggcaagcccagctggtttaattagcaatcgcctatataatcagctagcgcaacaactgttagttagttggttgttgatgttgtgcttcaagaaatcaattaattaattagtctgttcttattgcttagtgtactacacactcttagctggagccctagccatgggaagaaattaattaaatccccagataaacacatgaccacgaaactgcattgctgtactaaagctctgaactagctagcaacgcgtcttagatatattccaccaagcaaaagccacatcatgctgtgctgtgccgtgccaaattaaaaccacatcgtggccttcaagtttctgctagcttcgtccttcgttgctaatcccagccagttaatcaattaattcgtcagatagatagatatatatacgcgttcatcagcgtacgttcttatagctagaactcatcctgctgtgcaaaacctgcatcactagctagctagctagctctgaatcctctagttgtctgatctcgatcgatcgatcgacaactatctcgtccacatcaagaaagcaaagttttcttgagctacgaatcaatcgatcgatcgatcgccatgggcaacagaaacgaggtgagtgagaaaatctgaattgatcatgcaatttcagagccaaattgaggtagtagcttagctacatgtgtgtgtggttgcattccagcagcaggaggaggagcaccggcgggcgagggtgccggcgttcggcgagtgggacaagatgaaggccgccggcgtgctgccggactactccctcgacttctccaagatccgcgccgtccgcatgcagcgcaaggagggtgggcccctcaccacctggtcctccaccgccgccggcggcgtagaggtcggcggcgagacggagcggcgctcatcgtcggccgccggcgtcgtcgtcgacggccgtgatcgccgccgccgccgccaccgccaccgccgacacagcagcgacggcggcgccgacctccgccggccgctccggcacgaccgtgctgcagctcccaaggtcagctaattaattaaactgctaattttcatgcgttttggtgttcttctgatggtttactaaaaagtgaagattccaaggtctgtgttactactaccatgttaatcattttaagctgcacggttataaccatatgaacttatccgcgattaagtgaaattaataagcatgattcgttcaacacactggtcaatttgttttctcaacacaaacgtacactgtaaatgtcaacatgctgcccgttagttaaaaattcagaatgttcttggggcaaactgacgtatgttaatcccgcgtttaagatatttttatgtatatttgttttttgaggaaatgtttatgtatatattttactctgctgaaactgctgcaaattgattaaatgcgacatgctgcgcacttcatcgctccttttaatatttctgtctgaatgttctttgggacatctgattgaacaatgtactatacttaaaaaattcagaacacacaagtcgtcgcgccagattgtcatgcttaatttgttgaactattatttgtttaattttgattctgaccattgtttagttttgatcctagcaggagaggagcaagctgggctacctgttctgttgcattgctggatgaagggcattggcagaaaaaaaaaattcaaatgcaagaaggcaattcaagaaaaaacttagtgctcatacatgtttaatttctccctcgtatttctgccatctctcaccgatcgatctgttggtgatttggtggatgttggtgttccatatataacagctcgttgcatctgtaatgttaggctgtctaggaattctttgctgtaaaaaaagaaaataaattcttggttaattttgattttgcctgggatgaaagccattgatttgtagcctgtacattgcacatgttgtaaatagtgaagtcgagagttattttcgcaatttttaaaattaaaatggtttcttccgatctctttgataccacaggcgggctaaaaattagtagtcgtttggattctgaagaattcatcggtgcagtgaacaacaagcatactgatcttataggattcgtaaaggaaaaggtgaaatgatttcagaagagacgaacaaaatgaaacggaaagttaaaaaaatgtcaaattaggggtaataccagggacgatattgaataatgtaggtagccaaaagctatctgtaatggaggaaaaacgagagactgcaaagtggcaaaaggacccacctgtagaaaaggggaataggcaagggcgtgatgagaagatcccgggggcatatatgtaaggaaaaccatggtcgtcagggactaactcgtgaattcacaaaattgaccatttgtgggtctgtctgcaaagggagagattgagggtgcaactgaaaagaaaacgtggaaaaaggaccgaattgtaagattcgtaataggcggaggggcatatctgcaacgaaaatacttgtaactcagggacctggatggaaatctcaaaaaaatttggaccatttctcgatttgtgcgtgtcatccttgcgcaggggccatgctaatcttctctgtatcgttccaattttatcggatgtctccgaagagacaacacaagcgacagcgcgcgggtttataagttggtcgcgttcgagttagctgggcaatgtggtactaaactgttcctcccgcctctcgcgctcacactcgccctgtgggccgctcaccgtgcacgtacttgggcctcccgctcccccgcatgcatccagcccatcacagcgaagagaatcgggcttttcttctccccatctccctacacaaccaccaaatacagccaggccgttggttcatgatccggcggcagatcgacatctacctcttcacggtctcacgatgcaagcgcatcatcgaaacgtgtaaagcacccataataatactgataaattattcgcagtttcacacccagattactccataaaaatgatcaataacacatgaattatgatttatgcttgcttataattacatagtagatgacaaggcttactctgagtaactctctttttttttttggtttcatttgctgaattaatctgtgctactacagatgaagaagctagagaacattttaggccgacagcatatatattgatgcattacatgagtaggctacggatgaggtcgggcacatctgcgccgttgatggcgagatcggacggctggaggaggaggagctcggcgagcctctcgctgagggcgtccgcctcccggtgaagcctccggatgtagcggcacgcctcctgcagcacctcggcacttgacgcctgctttgattaatcaatcaaattttagcgaggaatatatattaatccctacattataatgggatatataaattgtacttgcagatggggaaagggaaaaaccaataaaatgatgtgattataaacatgcgcatattacacgtcatgcgtgtgtgtttacaataacaatttagtgggatcagtgagacatggaattgtggtctccagctctttcagcggaatggtaacacggggatatgctagtggggctggcgataagcattgtgtgcgtgtgcattttccgtacaactgacgaagggaaaaaaaaatataaacacatatatctacatgtggattatcacgtcctaaaaattcaatatccactagccacgtaatgattaacctagtagctcaagcgagtgagttagtgacaggcacaattaatgacggatataaacccaaaagggaggatattatatattaattgccaatgcaatgcatgcatgtatatgcatgcttggtttgtaactgatcctttcgcaattccgaccttatggatcatcgattgcatcgtctagctatggagtaattaaactagggatggagatcgaactcatgttaatattttcccttttctaacgtaaaatattcccgcaatcccaaatagataaaccagtacatataatatgataatatattctaatctacgaatcaaaaccggtttaatttgatcgagatcgatcaaagatcaccgtcttaccttggcattggcctcgccgccgcgggtggggaggacggcctgcagcttcgagatgagctccgccatctgctcatccgtcggcggcggcgccgccgccaatctcgacgatgtacggctccgccggctcgacgacattgctaatcgagagagagagagagcttgagcttgtgagcctagctaggcaaagctacagtcaaaggagaggatcgatcgatgagcagtactagtacatgggcagtccagtccatatataagaagagcacgtacgttgtgcatgcgtacacgttgcgttggggacaagctcacatacggtgatagagacatgcatggggacatgcatgcatgttggtagctagcaacaataaataataatattagccatgtcagtctcacacggttaaagtgttagtcaggacatgtttagtataactccagcttctaaatttagcttcaggagttgggtctagagtagaattgtggagcggcctaaatcagctccacctctctagttcattttgtaagagcgctccacccagctccggggctgaaactgtttggctgaactccggctccagaagaggtggagctggagctatgccaaacagtctcttatagtatagtttaaggataaagatatcttgtggttgtagcccgttgtaattaaaatgatcgatatccgttatcatgtctttttttttcttttctaatatttgtatgatgtgtaaattcagctatatttgcagacgtccaaaatagccttggattaattgtaccattttagttcaacggtatgagatcaataaagtttcttttatcaaaaaaggtgttagtctctaagagattgagctagccatgttacatgcctaactgggagctgctacaataagtacacgtagctagccagtgcatatatgcatatacatgtgtgtcgttatgtacataaagttgtgagaagtgaagaaagcaatgccagcttcagcttcagttggcactgtactgatccagtggaccagtggacggacaactggtgcacttatgatgttggatcgatcaatcggcaattgtgtggggccaaaggcagaatgtgtcataagttctttaatttatttttaattatttccccaagtttaacaaaataattaattctcagttgaatgatatatgaagatactccatttttttcccatatggaaaatggcatgtttaaacgatgtcatttgatttgcatgtatatataggtatatatgatgctcatgcaaagaacaaaaggccagtttggttagtttgttcttgcatggatgatcatatatatatcttatttgctctcgacgatcctttcacgtgctgccatgcataaataaatagtttatcagatattagggcactcaacaccaacaagatgtcgatcgggtaagagtggaagatcatatgaaaataatcaaaagtatgaactgcattgtaacaccctccaatatgcagttaagatcgagctgacacgctgcattatgcatgtgctgatcagatcatccggagatttgatctgtgattgcgtatcatggtcacagaattaagcatttttgctttgtcaggtggactcacacgctcacacacaaactttaaccaacagattaaattaaatttcagcttgttggtcaagacagcccggagatgggccctcccaaaaaaatagtaactgagaaaatcacatggtatcagtacgaagttttagaggattttattgccgattaaaaatttaaaataacctcgtctatatattcttattcatgtaagttgagtattgccctctctcgtaaattaggattgacatacattatttttctattacaggaagaacgcatattcgtaaccgcactaacgcctccacgaatgcaccccttaacaatatatgctcaaagagaagagatagaaacctctctagccttactagaaatcccattgtgaaacgggatggacctgtggcaactcattctcgctaaaaatattatggtttgtgagactgcatcccataacatagtactttaggcatcacgatttaaaactctggcggtggagctatacatacaccacaactctactcgaatctggtgcttccactaatatgtgaatcttttttttattgctcaaaaaccgcatcatgtatgcactcaccaaatttacacatctatgaatcatgaaagtgtctcttaacacatgcttaaagaaatgaaaactagtgacaattccctagcctcttactgattaaaatcctattgaaagtgtacatctaggctagtcataacccaaccttactaaaattatattaaaaccgcacctgcatgtatgtagtatttctaataaccggtggtggagctatgtaccacgacgatgcttccactgacacgtgaaatttcaagattagttagacgcggaattatctcttccttatattctgcaggtgcttccactgacatgtgaaatttcaagatgaatgagacgcgaagttatcccttcctcataatttgcatgactctatcctatgactcctgtcacatcctcaaacatggctaacttcaaagggattaaccattcacatgcatagcataacttgttggctacatgcatgcatgaaagcatgaagcaccataattggacagcgcatatgaacaaatcaagaaaagaaaaccatcaatccattgtattgcgaccattcaacagggatggaggaagtgaattaattcccaaagttgattgattgattgggccgtctttccaaacctgtgggtaggttgcaaccatattcttgatttactttttctgaagattatgttagataaataaacatgcatgtgccagacgtccaaggttatccatttttaatttccttttaacttctatatgtagtttctttatggagaaggttatgctccaattgtatatgttgacttcattccttacatcaaattggatgcttgatcgtgaaggttatttggttgggagaggagggtgcatctgcatttttaatatatgtccttgaattagcatatgtgttttgtgccatttaattaacataaacatatatgtttttcctccgcaaacacactacattacacatggcttttcctcggtgtcagagacaatattgctacagtatttaattcccaaaagggttttgattaagtggttgttaatttggtcgacagaccaaggatgcacaaaatgcataatcttgtcaaactttctgtggggtacgtatgtgcatgctcgttacccacgtaaaaactcatttttatagtttatcttttacttgctagtacaaaatttgaaacaagaaattaagtagaattaggataggcaaaaagaaaaaactcgtttgtctgtccacttgcatccctacttttctaccactcttatcttaagatatgattagcgaaatgatggcacatattgtattagctaggaaaaaatgtcactttttttagtgaatgactttagggtaaagataaaagagaaaatacttttataggtgtggttgtgaagtacaaatgagttgtctggttaaacttgtttaacatgaagtgtggcaaggaaaggcaatgttttgccattaccaattatactctgatagacctaagcgccatttaggataaacacatctaaaggcccctttgaatcgcaggattgagaaaacgtaggaataggaaaacgtaggattttgatagaaatgtaagtgtaaacagaggataccaaaacgcaggaaaaacacaggaatgaccgtttgattgaaccacaggaaaaacacaagaattggatgagagagatagactcaaaggaaagttagcaagaggttgaagctcttgctaaatttcctccaaaatctctataggattgtccattccataggaatttcaaaggattggataggattcaatcctttgtttcaaagggcttcataggaaattttcctataggattgaaatcctctaaaattcctatgtttttcccccaaataaaaggggccctaagtgtatacgacatcgctagctagttaatcactaggcacttgaaaataacttgttagagcatcattaagagtatcccaataatcaattcccaaaacaatgttttttggatctcataaactgaatataggaagtgagaaaacctatctctccaacagaaagcttcattgatttcctataatgaaaagtaggccatccctttaactaccaat

SEQ ID NO: 8736 - DNA, 12496 bp, Oryza sativa
aaaagtcttttagaagattgaattcctccaaaatttctccgagaaccgaagggagatgggggtttgttccgtcacctctttaatttgctttatccttacgtacacgatactcgttaactatgtgcatcgatgatacagaggccagacctaacgaacaatgggcggaactaagattccatggtttcgttggatatatatatttaatggtggagaaataaatcagaatcatgtctggtcctccatgataattgctgcctgacatgggacgacatgcctcaacttgggggcttggttttcagctgctagctgctagcaaacgatgtactctctctgtccaaaaaaaactaacttacgtgagaatataatttcacctaagataataaattggataaaaggttgtccagattcgtcacctagattgttttttaagacggggaaagtaatattagtagtactccctccataaatgcttatattttaggacgaagtattatcccgcaaatgcatcagtagtataaactctcacaaagtcacatggatgggatggtgattgtgacaagtacagttatcagtgcaggcaagtgaagatatatatacaggaagaaatgggattaagacaagaatcaatgtatgtagatgctgttatattagtagttaatttcatgtcaggaatggtttctgcaatgtgcccacatgttgtgaaaatacttggaggatatctctgatgaatcaactgtgtcaatcagcaattgtatcatatatatgctctccaagtttccttcgttttgaaatttgaaggatttgtctagttggcgatttgtgatatgtaagaatcacaaattcagagtgtattcaggccaacagacaatctaaaaggcacatgatcaaattttgagatgttaggtgcagaaatggagatggtaatatacaatattttcgtaaaataagatactagtacaatgtattttttgtaaaagcaatgacaaattcagtatgatgtgtagttgtgtacagatccaagtgtgctggaaagattaccagaaaaaaagaagagagaattatccacacttctattgaactgttacagcattttgctaggataaatgcacacaacatacaaattccattccaggggttccctcgccatgctttcaatattcaggcctcagcaatcaagtcagggagaagcttgaacctgttctgctgcataacagagaaaactgaatacacatggacaggcaagtatgtgcaaagaatgaagaaattcaactacaaatttaactatgcattctttctctttctgtaaggactgaaattttatgattttatccttgtagccaattgatcagcagatcaagtcaattttatgattttatccttgtagcccttactacttgccaatgaagtactgtgctaaaaggtccgcgatagagtttttttgggaatacgcaagcggcgcatctttgtattaagaggaataaagtttataaacaacggatccgaaaactgaaaaaaagaaggggacaggttacaggacacagaatggagctaaaggcctaatctccgactagattttgcgaccggggaaccaagctaggaagaggcaattctggcaccgctgcatttactaagtgccatagttccgcctcggcagccataaccttcgccacttcgacccaaggcttctgttgttggttgaagaccctgttattcctctccttccatattgatggagaatgaagacttattgatggaagaaataagagatcaagaaataactactttcatttgcattatctgctaacaacgtcgaatctaacagttgagagaagccattatcattcagtaaagactgagttatattacttatatagttctagcgagattaatctctacagggttgatgagaatagagaaccaacagcctgctatccgatggtgactcccggattatcattaaaacaagacagtactgtactaacacctattagtctataacaagcattagcatggcactaactttgttgaaggtagcagaagtaattaatcaatgaggatactagctcacaagctcagtggtgagatcaatcattaaggaaatactacagagatacaagatgaaactacatgttcacttatatgttatatttttggcggacagccgaaagattggccgacaaaatttcattaagatttagggaagattattacatggttttgtcatgacattaaatgtcgagttgatggtggttaaatgaaatttagacaagctaattgtttaagcgctaccgaagcttttacatgaacaagatcacttttgattaaccaaaattaaagaaagatatgctctcctgtctaaaaattggcaaactgataatcttctgacaaacaggacaaaactgaaggcaagaaagaatcaatattatttggatatcattttcattctaagtttctaactaacaagttgccattttgtaaatcatattctaataaaaatcataaacaagaaaatcacctaacataactccagcatcatgcaaagcactttcttctctgcaaaaacaaacataagttaacttagttgatcacatgagctatttctttggaatctgcattgaagtcatagcgtaagaagttttccccttaacatttctagcataagattctcacccatctctcaacttctgatgctgattcagaaagtctcctcctaagaatggacttttctgcttcacagctctctaaatcaacatctgcataagataacaaaatgtccagaaatgtgaacacttcaaatccgaattacaaacatctacatataaaactctgtttatgccggctctacacatatgcactataaaatatatggataaaatatactgcatatggatgtgttgatataaaaatatagagaaacattggaaaatgtaacatagaacaggtcaaaaaatatatatatcagaggccttaatcaggacatgcgtaataaacatggcatgataaaagcgctagacaacttgcaagtacggtatcagaaatccgaatatggtaagacattttggtgattgggcagagatcagaataattgaactaagaatatggcatgaattaatactacttcattattacgtaaaggtcagaactttagatgctaacattatagtttcttatcacatgacagggttgctttatcagcgtggtacacacctatctaatctctatacatacccaatgccaacaatattcaaatttccacctgcctgttccactactagagcaaattcaacatttgaatggtacaaactaaaagcttgaaatctaaaaacatatactatttattaaaaataaattctaaaacgttgtaaagatgatctcatctcaaggacatgcattctaaggaaacacataacactgtatgtcaaacattatgtgttacataatgctaaattgcatttggtttgcattataagattttagaagcaccaaaagagataaataggagataaaacaagaaacgtttaattcttttcaattccttaccataatagtatgttgacagaatgctgatacgctcaataggctgaaaataaccaaaaaaaaaatgttaatgtttcatttcatcatttgtcatgtatgtaatacactttgacacgaagttcaagaatataatagaagtgataagattgcgtaagggttcaagtatttctaaagccatgcgtgttcagtgagcctgcttggacaaaacacacactaatgaggcaaaaaaaaaaggaatatctatctgaccaaaaacttgaatacattattttaactacaaaccttttacagaggatttgcagcagagaaatcattatgtgatttaaggaaaaactaaaggatgttttatgcctacataaaagaaaatgctgtacattgcaggtggacgtatacataccattacaaatatgccttctctacgagttggaagttgctcaagttttcttaatgtatcatcaccttttgtgagccttccaaatacagcatactgaaattattatgaatcaatgtttaatcatttaagcacctggtatttaatcatgaaccactgaagaaattgttgaacacctgtccatcaaggtgtggtgcatctccaagaaggatggaaaaggaagaaccaccactgtttggatcagagtgccttggagaagggggggaaaaggtgataggtgatgttatatcattgcaggcatatgaaaataagtgatttcataaaaaaatcaagataaacgccaaggaaattagttcatgatattttctaggactactttgcccaataactatcgcattcattttgatttagacaaatagacaaattaactatggaatatataaaggatcttcttcaatacctatccttttatcaacctggtaatcattgataaacttttgagggattacagaaggtactacatgctcatgttgttttggctataaccagaaggtagcaaaagtgatctgttaaaacatcaacaatgtattcacaaattgacaaaggaaataccttcccatggacagaatccccctgacatgcttgacagtactaaattcaccaacaaccgatttctctgcttcctcttgctgctcatcattcatgggggcagttctaccacccacaacagaagcaacttgtgcaacaaaacccttgtcaacctgaacccagtcatcgaccctttacataatgaaactgacaaagtcgtttagcaaaaatgaaaggttagcactaagaggtaattacccggaaaaagtgatttgtgttgtagcacccaagcctcacaagtttgtaaatgtgttcaactgtcttaggagcaacatgaggaaagaagccaaactcaatgtcaccatgagttgtctgcagatcaaattgcctaatcagaaataagaacagatactaccaactttggatgctatagaaccaattttgcctagtgtgtattagctgcaccaggacattagccaaggcatttcataacaaattgaaaaataaaatgatgtgatattataacaccaatacgagatatagaatctgaaatggaagaacatatccaaaatattaagatatcctgttattttaaatcctgattaacgagataattagcttcagccctgtcaccggcttaaataataaagatgcatacttcctcttcctcgtaagtgttcttgttcatttttaggaaatcagaagtttgtagcaacgaatgccacatgagactggttgcctgatcggcgtcctggcattctcccaattgcacactaggtggcatacatctaaattttaacctaatcctagtaaaatctcgcaataagcataggaacggacagttcaacactgcctgcgcatgaggattgacaccttgtaccccttgttttgcaacatctaattgcaacacaactcttaaatttccaacacagcactaaaccgattctccaacagtcggacgaatctggcgaacagcaagagcaacggcgtcggaattcagcgtagatcttcactcacaactcacaattccgaaatctttgatgagcctacgaatctgaccgtgccaaaatccgacttttggccccgttttctccatgaaccccggtaaaaaccgctcctttcctccctgatttagaacagcaactcgggaaaatgagggagatcgtggcgaacctggaagacgacgcgggcggatccgaggtttgggtccgaggcgtagaagctggtggcgccgtcggtggaggcggccgccgcgatgaggaggaccacggccgccgccgccgccgcggcgtggcggagcaaagccgccatttttttcttcccagttcccacctcctctctctctctcctctggtttagctgcaattgtgtatactgcagaactgaggagagacacaaagacaagtgattttttttaaaaaaaaatggttatccacaatttcacaatttttggcaatctttttacatctcagttccctttcttcccatcacaacccaaacctccaggacagccgccaataggtagggagaatagtgttggctgacggggaaaagctcgacggcggaggccgctggccgacgtggctcccaacaatctggagcgcgtgcgcggtgcggcctggtcctacctgtaatggcaatgtcatctttacctacgcgcatgagggctggggcttccgccttgtcaccttgggcaagctcctatcccggcccccaagctcaaagccacccccgccgagctgctcaaaaaccgatgtgttcagatatccctgagctctgcctctccttcatggaggagcactggtggctctaccgcatcgtctttaaggtcaattccatcttcgcgccgccttccactatcaagcttctcgacagctgcaagccttctccccgcccatcgctagttgtcgtcgtcagggttctacctaccgccgctgcccaacggccgctgcccttctccctatcggtcgccagccaccgcacacctcttccgtgactcaacatccaatgtcctcttcatgcgcacggacgctcatggagccagtggtgctcgggatcgtgctcaggcatcacaatgtactccatctcctgtctcttggagatcttctcgccaatcccaatggtgtggctgacacgcgaccctgaccgagagagggaagagcgcgtgcgctacgtggatccggtctgcggcggcgtgcggaggaagagatgcgacatgagccattggatctcatgatcgtacgatttagtattgcgtgtatatgtcagggttggagtcaccgtcaccactatgcttttttttaattatattagtaagtatatattattccttccgtcccattttaagtacagttgtggttttttttccaacgtttgaccgtctgtattatttaatttttttatgattagtatttttattattttagatgataaaacatgaatacttattttcttaagtttttcataaaattttcaaataaaacagatggtcaaacgttgaacacttcaacgtaaactcacaaaataggatggaggaagtatgtgctaatttaccgttctgatttacttgtcgagggaaaaggttcccaacacccttagcttcaaactcacccgagttcttctccctccatccaagctcaagctaattagccaaacattgaattcaacatgaactcgggttccaataacaagttggaaaactgtcctaaaattccaactgatgtttttgcaaggcattcttccatgggcccttggagcccaacgggccgagccggcccaaatccttctctcttaaagccgaacctgatctcgtcactcattgaaactagcagctcttcaccgtcagcaacaacagcatatcattcattatttttgtcttatttttctcctctttttttgcagtgaaattaaagcttctcgatttcgtcttctttttggccatctctcctttggccttttggcaacctaggtagcctctcgatcgatcgtcatggcgtagaaatcatttccatgtgttgtacacggtgcatcatttgtctgcactcgcggtagagtacacacgtacatacgtatacatgtattttatgtttgtatgtatgtattgtgtatacctccttttggtttttggtcaaaattaaatgatttgtttgtacgtccttgcacaaaaaataaagccattcacgtacctgacatgcatattcttcctagtatgatgatgtgtgtacgtgtatatatgctttaactttggagaagaaatatttgtaacgaattttagttttaaaaaaactatgggtttgtttagtttggaggtaatttttaccctactaaaatttggttacttagtaagtcttgacactatcaaatttgattgtagcatataatttgaactagtatgaacaaacattggtagcaaaccaaatatttgtttgattttagataatggaatagaatatccccgtctttgctcaacgacagcaagcatatcattttgcttaatattcgtttgatactactgaagttgccgaaattttattcatgcagaaattggctccaaaaccaaacatgccttacatatcttgcggattttcaagcgtaacttggcgtgcagataatttttataattaagttcaattagatttgatatacactcttgcttgtgtgttctctacaagtacattttattttgtaatataataactatatacataattaatcatcatcgttcagcgtcaaataagttgattctttgtgtgcctttctgtatgtttttatcagcctcatctttttattatgcttatacttattagctaaaatttaaatttttaatctaaaatttaaagttgattttagggtttttcatcgtagtttattttttagcatttgtttttagatcgttaagaaaatgaatataaaaattttattcacaaattatttttcatttttcatttacagatatgttgttttgctttttttttctccaatatgccaaacaatgggactatatacagatatgtaagcgggccgacccacaaatctacttatttgtcaataagtggtaatccgcgggttttcacgtcatagtctggcttgccgcacctagagatataagtgggtcgatccataaactcatttatagatcaaattagtaggtaacccacgggctatccactaattttgcctataagcagcttagcctgcttacagcctgtatatttttattgattgattttgcatgtatatatgaatgcatggtatatgatgcatgagcacaaatgtatatggttgcaatgcatggtcagataatctatgtcatgtagcatgatgatgtacacgtatgtacttttggggctaccctctgtggtccacggtatgacgaatgcagaagtccagaaaacgaaaaatggacgcttaaattagtacgttacacaagtatataccaaaaaatgcatgtttgcattgtgtgaaggaatttcagacttttttcagggtgaaatgatatatcaatatatgtgttcagtcatatgcctggtcccaaaattggaaaactaaatattttaccatgcctagctaggcttcttcacttgttaatttgtttgtttgtgcaagtgcactccaatcatcagcagtgcatgccttcataattaatttacagtctagattgcatgcattgctagctactttctggtttcagattgatatgtaaagctgcattatataatcctgttatgtgaatacatcatctgtggtgtgcatgtttacatttggggccacttcatataaagtccatgatgatgtgaccaaatggaacactccaaataggggaaaagggtggttataggctatacggccagcaattttggaaggaaataaatgtaaaccataattgtttaacaaaggcctcttagaggaaaacacttttgctacatcctcacacatgtcgacgttgaaagaacatcctaaattttcattaaatgtccaagaacttcgatgtgacaacgcgcataagaaaaggaaaaggggaaaggtaatctagttcctccgcgtcgtcgatcaaatttttcgtgagtacatgatgcagtgtaaacctatagccctttataaatggacaaattattccttctctcaccctctctcaccatatgaattgagcatccataataatgcaacaaaaaagctactgaccaactgtttttggaatttcttggacactggagggataggatcaatttggccactttttccccagaggcatttgtgcccttgcttgtgtgggcccccagctgcttgcacaccttgcatcatgcatcctttcaccatttgaaacccatgagcattttggcatgctttgaggtgttcttggtctctaagcaatctccctttttttttcctctttacttgccttgccaaactacaaggcctactcttcttctctcttagttacatggaaaagacaggccagggggtgcctaggctattaggtgtgtgccttgtgcactctatggtccttagttgtcatgaccccaagaatgggctcaaaagactttagggagaaaaaaggtgccatggagtgtagtactagctacttgtacgttgtttttagtgggatcaagcctctttaattttatttttttccgaaatggagtggcagcatgctgcgtgtatcaacaaatttgaaagcaaaaataatgtccttatttgtgaaacttaattttcacttaagagtagtacatacgtaagacatgttcaagatatatataggaataataaaattaaaaatcttgtaaatataatggcacacaacgttatcttaaaaaaaatgctccaacacttgaataagaaagagaaaaaaaatatgtttaaaacttatctagaaaagcaaagaaagggtgagtcagatcaaatgcgggtataactcacgaaattgtaaaaatctgtgtgtgtgtgtgtgtgtgagagagagagaggcagatacaaagagagagatatagatttggaactatccatgaaaattttcatgatctcacctcattttcgatttccaccaaaccatatataggggaaaataaccaaaagagaatgaggaaacatttctccattttcttttactgaaagtattataggggaggctctcatcgtcaaatttattaaaagatgttatatgtgtgtgcatgtattctagtgacggttagttaaaaaaaattatgtacaaagattacaacaatattcctccatttcgaatattaaagaaaatattttgtttggattaatacatgcaattctcccttttcttttctcatttttcctttgatccaaactggttctaatgaagtattacttaataatatttttaggagagtactagctacttaatattagccattttttaggaattgtttttttaaaaaaataccttatgaatcacttgaagtttgacatttcaccctataaatcattttgttgcaaatatttaccccatacttgttgttgttattgtttttgttgttgtcagtccacacatgtttaactcaatcaacatgttttttttaccaaaactaaacatttataggagtacacttttcttggagattccactaatagaattgttgctgagagcttaaacattatcgtaccgagttttgctatatgtataaaaagtttaatgaaacatgaagaataagtctaatgcaagcacttggataaaattgattcggctaacttaacctgtggttactctacatgagcgataaaatgtctgattcggttaaataggtgcgcaattgggtggtttttataataaaaccgaggaggtgggggtggatatttgtaacaaaaataacttaattatggaatgaaatattaaattttaaatgatttatgggtggttttccttttattttaggaaatattagcgtggttaatatgcgtagacatatttggtcaataaccagcagtgaatttgtgttcatgaattgaaaggcaagctgggtaagacactcagctcgtgtcatcatcattaccagtcaaagtgacttaagactgcacttacgtgcgtactctttaactgcggcacacctaattaattcgcattaaccagtcaaagaaaattgagaatatctctttaagtggttgattagctaatattttttttaccctgctgtcaagtgtgcatatatatatgcacgctgacacgcagtcaaaacataccaacaattaaaatgttgtatatttgcctctgtcaatactcaagctagtcactgtcattaaccggtcaaaagtgaattaagagtgacactcacgcactagttaatgctcctatagcccgccaagccgccggcaagatattaatataatgttgaacttttttcataattgtcggtctttccaaggctgacacttgtcatgatctatcatgatgctcagtaagaatggattattggcacaaaattattttctaattatttatgccgcacttcggaaagtgcattttttcaaaaaaaaaaaagtcaacatctgcatttttctagactttgttttaagctatatgttagatttatctttttttaacggaaagatttcattaaaaaattaaattacaaccgatctctgcaactatttgttagatttatgatatattatatttaattctttcatatataaaaggaagataattcatcgaccttctgccttcatccacatttctctagtattataaaaattgaagatattttttgtcggtacttcgataagttatccgtgtttgagtcagtttttaagttcgttcgtttttgaaatacagttccgtatttgagtcggtttctaagttcgttcgcttttgaaaatacagaaggagttgtacaagaaatctgtttaaaaaaacccgcatgctagcttgagacaattggacactcaattgcagctcatgatttatatatatatatatatatatatatatatatatatatatatatatatatatatata

SEQ ID NO: 8737 - DNA, 5068 bp, Oryza sativa
tgcagctgctgtgctgaattctgcattggcatccactacagctgcgctgaagccgaacccagcagctgcatcatccataaatccggctgctgttgttgcccgcagtagtccggtggctgcacctgcaatgaagccattggcacctcggagtccagcagctgctgcagcagcggtggtgccatctccggtgaagattgctgctggaataagcggcggtgcaggattgcttgggccatacaagccaccgtcctcgccaatgttggcttcctccattggacaaagggatcagtgctgagcctgtgaacctcgcttctgggtgttcaacatggtaccaaatcggtttgcttgcccaagccctatggcttgagtcatttttgtgctgatgatagtggaatgctgcatacatagcttagttcaacttaggaattttgacctcttaaaccctagattgaaccattgacatggtgggatatcttcctttccaaaaatgatgcctttttgtaataatcatactagtaggtggtagctacattgggtcagttacatggttggatattttcgtaatgcttaacgatgctatagccaacttaggaaaaaatattcatgtggtccatatttgcttagattttagctattcttggtattcaacactgttttacacttccctggctaatatgttgaagtaataagaatgtgtttttcatgtgagacctaaattggttaattttccaaatcatcttttgttgatacaagaatagattacttgtttttttttccagatacacctgtcttgtttagccaagtaactctacactactgttaatacatatcctcaagcttagctgaagttctgaattctgaccagatcaagctagcaaagtagagtagtagagtacggagtacctttaattctgtcatagtgcagatcattaaaaactttcttgcacatcttgattaacctccaaaactacagctttggttagaacttgaatatgggtgttgatatctgattttggatggcagtaagatgacatttgttaggatgtgtttgcccatgttatgggaatgaaaaacaaaatgcattaggcactgtggcctggaacatcagatatatagcaaagatctagtttcaagtcttatattaatcagattggaatcatgatgaaccttctactgagataattcactattcagcttagtgttggttgtatttatagttggtttaccttatgctcaatgacacttgaatttgctgcttgatgtgatttatgtccgagaaccattccagaccacagatttatgcaagcttgactgaatcctgtatttggatactgatgtgcaggtatggaccaatggagtatgggagcagcaaatctacgtcacactcagaggcttaagttgttgcatttatgcctcaaaccctctaggatgcttgtcagtagatgcctctgtctttggctctttgctaacctgaaccatagatgcaaatacagttcatgaagcatccatgtgatcctctgatcctctcttcaactttcggaattttgtacagtgttccgtactatcttgacgaaacacattctaaggaggttatgttcttattcattagattttagcagttctgttcttcagggttacttgtaaccattttgtgttaacatgttctccgctccaactgaatctaacctactttgtgcagctgtcttggtttctcatttgtttagctattgctggatgttatcttgagaaaacacaccctaaatcaatgaacatgcttttttaaaatgttaataagcaatcaagagatgatatagactgcagttagtgttcaattcccaagtagccatctgagtagaggatctaacaggagatcatccttggacctgaactattttttcccgttggaaattcaatcccagtttattggcttgtattcacctgacctgttagcactccaaatatgttttgggatatttgggcatttgcatttgccgtgctcttattgcgatgtatagctacaccttgccatgaaagggtacaaattttagctcctttttcagggaaaaaaggaaaatctttgttgtgccaatcttccttgccatgtaacaggagtaatcgttaattcacagggttttctgtgtttctgattttcggttgtatatgacaatatgtagctgcacggtagttcatcattgaaaacttctccaacagcataaatagggcttcctgtagttcattcatgtgattcttaggatagacaaaaacagagcattttgatctgcttcctttatcttcagtataaccaatcagtataggttttacaccatgatataattgcccagctgcagtaactttttacaatgtgtggttcctccgtatgggtgaaagctggaagaacatgaattggtattgctacttgatacaaaataaagcatgcctccatcagaaactgcctgcattatgtacaaggtcatgtatcatttcctgctttagttacagcatttggtcctcctatgatgctactgctaggattacttcctttctgatgtatgtacaccagttgctagtgatatatggagtataatagcattacagcaggccatgcgcctgccttgtcactggtgtcgcaaatgaggtgtatggcaccgtggatgataccatgaatcaggattctcacttccacctcttcgcgtttttcagcgatttcgatttttgcttgctttgctggaatgcctgcatcttctgcttctttctggcaattttctctgcctgtattacagttagaaaaaagaactgtcagttatagaagctaaacccaattaattgtagttcgcatccaaattcacatcgtgaaaagacagtagagatattcacctttgacatttttgacttggcctttactttgggggctttctcctcgagctcttcctcacgtgcaagttccctctctctggcctcaagattcctttcaaggtaatactgcaaacacaaagaagaaaataacatcatttctgggtgttccagtatttttcagtgttccggcaccctaatatgaaaaattcagactcccctctgttttttgtgatgcctctggccctctgtaggatttatatcttgatttctaccattagtattgctgaagttactgggataattatgatctatatcttggtggcctgaatctatatcttttactgagcactagtttggcacgtgatgaggtaagagtttttatataagatgaagcatttaattcggattatgtggagaaaactatagattatgttgctgcactatgggaaactattataatcaagaagagttaaccatatttcactcgaatacagcaaatacaggttgcaaagtaatattgagtaacttatatcacaggataactcacattgtaatctccttgatagtcctgaatagtctgatctttcacttcaataactctgttaacaatttgctttacgaaataccggtcatgagaaactgttataacagtgcctgtgtattctgaaattgcctcctgccatgcacacacaagcatttactgtaagtacatgctaaacaaggaactgatggatcataagaaaaaagttttgctatgcaggagaactgcattacaatttttttaacatacgagaattgcatctaacctcaagcatttctttcgatggaatatcaaggtgatttgttggttcatccaatatcaataaagtagatggagtcaccaagaacttgcagaaggcaagcctcgcctggggaaataacagataaattgtgagtaaatatacagtaacactacatcatacaaataaaagaaattcactggcaaacgtatattaccttctctccaccacttaagaattgaacctttctatccaacatatcatccctaaaattgcaacgaccaaggagacctttgatatcatcaattttccaatcctctgctgcttctgctacagtatccagcacagttttctccaaatcaagtgcttcagcctggtaaagatcatgtacatgaatctagtcaggaaaaaaatatttttttactactgaaataatgaaaggttgatgatgcgctgcaattaatcaataggcttacaaccacttgacctgatagcttaatcaaacagtgaaaatcaaatatatactactgtacagtattactgtcatgatgaaaccatagtgaaagaaaggatatccatttcagggatttggtgtacctgattttgctcgaaataattaggcaatacattatgctccccaagaagtacttcgcctccttgtgtcttctccatccccaaaataagcttaagtaaagtgcttttcccacatccattggggccaattatggctatcttttcacctctctcaactattagatttgcattattgaacaatttctggagatgataccaaaggaggaattaagagcattaatacaaatagttggggtacggttaatcaaaaagaaattgactctgaaacagtttccaatagaatgaacctaacctcttccccaaatccaaattcgagattccttattgtcaatacagttctaccgctttgcccacgctctggaaatctgatcttcaactgcttcctttggaaaggcttctcaatcaatccttccttttcaagcttttccaatttctagtgtttgaaattagacaaaagttattagtaagtaatgacagatggctgaaataagagatagattgtattgatctgaagcatgccgcaatcatgcaattgtagtggttaccttctgctcactcgatgcacgccctgcgttaactccagccccaagtctgtttatcagttcctttgtctgctcaatctccttctgctgcttctcccatgcggcatattgagtctccacccaaatcgccttcgccaaaacgtattccgaatagtttcccttgtacgttttggacacgccgaattcagtttccactatcttggtacacaactgatccaggaaagccctgtcatgagaaatgatgaccatcggcacttcctgcgtcttgaggtaactctccagccactcaatggtgtccaa

SEQ ID NO: 8738 - DNA, 17123 bp, Oryza sativa
cgccgccgccccttcccctgtcctcctcccctctctacaaatacccctcccctctctccattcttccccaccccatctcacccttcctcccctctcccctctccactgcgccgccgttcccgtgccgccgcgccgccgttcccgcgccgccgtgccgtcactcctgtgccaccgtgccgccgctgctgtgccaccgtacgccaccgtcgccaccgccgtcgtcgccactgccaccgtcggtgagccgccctccttccccccctctcgcgtccaccgccgccaccgctcgggtaggagggagagccgagagagagagaaagagagaaggagccgagagagagagaggaaaagagagccgagagggagaggaagagagaaaagaaagaaaaagaaaagaagagaaaagaaaaaaagggagaaaaagaaaaaggaaaaataaatagaaagatttggaagaaaattagggaggttaatagtttaggaaatttaaaataattagaatttaattacagaataatcatggtcctagaattgcaaaatttaattattcttggtaatttctaaaagaaatcagttcacagtagtaatttagatataattaacaattagatgaagttttatagactattatagatcatttctggataatctttataagtaatcgattcacggtagaaattcggatttaatcgctaggaattttagacgtatattatatttaatcgtttagtcatagactaaattaaaacgtataatattataagataattttaggattacgtcagatatttagctcgtaatagaaatttctagcctattatatggatataatgctcgggaagagtaaattaaaaacttatgacaacaaaataattatacccgcaaaatagtttaaatcgaaattgggtttgccgtagttcgcagatagtaaagttaataaaaaggaatcgactttcgcattcgactttcatttggatttatttggatttttatttgaattctaaccgaattcaaatcaaattttgcacgtaactatagagcccgagggagttgcggatccaagcgaaggccaagacccgcaagactttgagcaaggcaagtcatcactattccttgaacatgttgatcccaattgcgaaattgttttatttacaaataaaattgcatgcaataatgaacatcccacttgtgattatgccatgccttgattattgtttacccttaaatctttgtaaccatgtttacgtatgagtcccgagtcaactatgacaattgcttagaaatgctattctagaatcatgcatactcatatttatcaaatgctatatgcttgggcaattacctttgggaaggtaattgagatgcggcatgtggagatatgagcgccacattgccatgatgttgatgacatgatttgtgaaaggagaaataaaattaaacaactgttttcgactggggcggacggaggatttgggtggtatctggaaaaggctagtaccgtccccggtcaattaaggaccgagccatggagttaagcatgaaacgacccccgtacagccgcacttcttgtatgggtatagacctagcggattagatagccgagtggaggcagtatccctgcatagatggttcacccttgagtgaggcaggtgcgctacggtgggacagccgttgaggtagggccgagaggcgtgccctacatcggtgtcgccattggtaggactgccatgagtgtgtgtgagagagaacttaacttgaaccataatttaatatgtgtgagacttctctttcccgggagcgccagaactcctctcactgctagaaacatggacgcctagagtgcatgaggattgaagttcatggagcgggtactgccaatgcgaggttatcgaaaagctttgccgtgacgcgtctcatgtgttgggacgaggctcatgtgttgggcagtcgcggagtgtgggtaaagtgtatatccactgcagtgtgagtaaaccaaatctattcgaatagccgtgctcgcggttattgagcaccgggacatgtattacacttggctagactctaaattcttaacttgtgggggatgggatactgcatgatgaattttatgctgatggagtcacatcccgaaaggagggaaggtggacatcctcagaaaaccgtgacgattcaatgacgggaagctatccttgggatcacaatggatggtggacagaaccgtcattgtttaatatgaacactggtattaaaacttgatcagtctatgctaggtcttaggcttgtgaaaagaattacaaaacttgctttgcgcaaaagaaccatagccatcctttgaattcctctgtcatgtgcaccattgctgtggtggcttgctaagtacggttggtactcacccttgcaaatataaaattaatcagaagcgggagatgaagcctcggaggatccctatgcctactaccaggagggagatgaagatgatggcgctcagtaggtcttagtacggtcgttgcctgtggcaatggcatgccgctacctgaattccgctgccttatctatttctgcttttggatgtattccggaccgcacagtccgatgatttaagactgtgcctgcgggcttatgatgtaataattcgtactagactctcgtgtatgtgcacttgatatttcagctatgagtttgtgtgtaccagactacttgatccagggaaatggtactgtttacacgattgattcctgttataaaaacgggggtccacagtctggaattccaaggactcctaaaatttttggtctacagactgtaccccaatttaccaacctacttcccggatttgttttgtctgggtcttctcccttccataagaaggatctgcggtaacgatctattctgctgattacccatttgggagcttgaagggcagttagatgaaaggtcggcaatgcactcaacactgattgcacaagaattcttctcccttctgacatgaagtagcgttctttccagccagggagacgcgatccaatcttttcaattagaggcaagaaatccactttcctaagctttcgaaaatgtaaaggtaagcctaggtagcggcaggggaaggatttcaaagttccagggaaaggagtaatgacatgtgtcaagtcggtggtgtcgcaacggataggatagatttcagtcttgttcaggtttgtgtggaggcctaaagcttgggcaaataaattaagaacccttttaactgcatcaatctcaatagggtcgggcttgacaaacaaagcgacgtcatcagcgtatagagagcatcgaaacctgctaaaacgccctccaattggagtgagcagggaggcctcttccgcaacttgaaagagtttgtgcaggggctccatagcgagatttcatagtgcacatttgacatactgagagttcctgtgtgtgccccaatgcttctgtacattcttcaggacagtgaattccaatgcacatgaataatacttgatgagtcatgttatcatcctcgaacgacatgttcaccaagcatatgccatacatgctcgtttcgtcttattagaaaaactagtacagatatgcaaaatacaagtcatgcttaatttacattttaattaataaaacaagtcacgataaaataaatgatgcttatggttttggttagaaaattttccttttaccactaatagcaaccatattctcattttcaccatccaaaactttgcactcctcttttatcattttttcattggggtgttgtttacacccaaatttggcacctagggataaaatagggaaaattgccaaagtttggaagtctgccggttttcctctatgagggctggtctgaccgctgtgtataggccggtcagaccggcggtgtgtggccggtctgaccggcagactccgagtccgggtctgttttcgtcgggtcgggtttccttgctcgggaaggcatgtttcgggtttcctttggattctatcccgagttgaacatggaggagggcctgtagagggcaagaccaacccctatataagggggtaaggccaagaccaacccctatataagggggtaaggccagttcattgtaacaaccaatctacaatcaatcaatcgaatcgtttttcatattgcttttagttttctcttattttgtccatctttatcgatttgcgccgtaaatcgtccgccgccgctgcgagagtgtgacacctctttgtaggtttgtcctgaaaaccttccgttttgcccacgagacaggtagttatctagaataggctccgctagccggtttagttatcaaaacccatattggtttagcttttgctagattgaggtggttggtgactctaggatcaccgcaaggcgtttaggtgctgcgatcgtgcttgtcaacttgtcacaaaaagttgccaacatgtgcattttaattttattgcaatgaaatcaatggcagttaacctctgatttgaatactaaaagaccattatgtcctttagatgttcctaaacaaaacaacacttaaaattctagcaaacaccataaaatatcagaaaaataaaccgtggatacttaaatatattaaacattcagaaaaatttaggcaggggaattaagtagttttatttttttcgataaaatgcaccatgggttctgaataatttggttcttaaaatgttcctcaaaataagtatatttgggaattatctggttttatttgttggaaaaatgcaccacggcctagaataatttggttcttaaaagttccacaacataagaataacatggaaattatgtacatgcccataaataatcttgaagaatattgggagcttacgattcttatatgcatggatttggaaatatttttcatctaaatatttcatttaagctactgtagaaaccttttgaaatttgcagtaagttttcaaggagtggcaaaagagtgtaaaatcttgatggtgagaaagggagaatattgtttcaaggaatgacaaaaataattttttcctatttttctaataaaatgaatggtcgaatgcatgtccaaaagttaaagcatcatatttttaaaaacagaggtagtctatatggttttagtcaataaacacatatattattccaattcacctcttcaatgcatagagtagagccatagagtacaacacaagtactagtggttcaatacttggggatgctcaattattattcggtcagagatcatatattagcaatgagcatggttgcatctcaccatttgcttctatcgttcctaggtatcagtttcatcatgctcagagactaactatttctcgcgccggtggatgtgctctctccttcatgtaaccccacaatatccaaaattgggctcgtggatacaaacagaaatgctgcgagacaaacactggacaagaaaatatctgtgtcttatgaacaatcacgaccaatttcacaaaataggagagcaactggagcaaagcacagcgaacagttacgtccatgctgtcgggtgaggaggcaatcatcttctcattgtgattggagtgtggtctacatcatttgatggctcaaaaacagcatacacttgattcaacaccttcttaagagtttgcttggaccttcttcctttgtacgtacttttaggcttatcatcattgaatttgtctctattgtcttatttcttggctctcccaagcttgggtcagtacgaatggatgtgatcaagctctctatactcaaagcaatgaactcaacctctgctttttctaaacctgacattgttcatagctcgagacaacttgttaatagccaaagccaagtcctcctccttgaattgctcaagttgatcatccgacatgatattaatagtagaaagagtagtagaatttgatggagtactaatatccaaagaagtcgaaggagaaaccaaaacactagatttagaattaactttacaagaaagaatattcaagtccagtgtccaaacccaccacctggtcaagtgaagcccagtctgttgcgtggaaccaccctgacgacacttttgcagagaggaccctatcttatatcgcagccattaatattgatcataacgttttgtactagagaggaccatgttttgatggaaatttagcagaaaaagacttactgtggatcgtaaaggactagggatgggaagcctagttcaattggaaatgttttgctctggagagaaaaacacgatgttgtttgcctgttgcattatcaaccagtgattgattggaaattggaaatgtttttgattttgttcaggagtatttggtctttaagtaagactgctttttctaatgacaaatcgattaactctaatccattttaaatatttttgttctatttaacgagtatatatcttaatggtgcacagtctagcactaccaatccacagtagtgctcatagcccaaattggtacacttgttttgtttggaaatttcgaaatgagacatgtagaactgtagagtacaagtactgagtggtgcaatacttgcagttgcaggtgcttaattacaacatagaatccttttggtcagagatcgtaaatgcatctatcatatatgaaaaattgatcatggtttatgcatctcactatttgcttctatcattcctaggttgatcacttccatataattcttggtgacaaactattatttgctccgatggatgtaaaaaacctgtaggcatcataagcattgggaggtcaatctgtgcgatgggtcactctgagggatgcctgccacaccaaaattgggcccatgtttacggttgagcaaaaatgctctcaaacagacactgtacaagcaatggcagaatcagcgaggaaaatcagcaaagattcaacaggatggaagagcacctggtgcaaagtgggatccacaactatatcatcaacctaggcttcttgatttagatcagcttggtgctctctaagaaactattagagtttgtgtcaaatatgtgtatgtagtcggttatagtttaggacttggagttgtactaggtataggattatagtaagagtcagactctatcctaggatctctcataaatagagaggcatgcctgctgtaaccgcatggcgacttagcatagcgagagggagcggctgccggcggcgaccggccgtgagtcgttgtaactctaatacactgtgtatgctggatcggggagaagcgcccgtaatcagtgccccggagatgtaggcctcggctgcactccgttatcaaatatcgtgcctcggtgtcgtcttcatgtttagatctcctatggtgtttcttccgcgttttgtttctaatgtgatttcggggccggttttataacagaaacttcctaatcatctgaagaaactttgatcagtgatctgctgtctatcatatataaaaagggatttatctcagtgaaaaaaattagtgtaaatttccctcagggaacaattttatatgacttttacaacacattattttagtcagtaagcttatgtcttcttttacaccgcaatttacagggaagaactatagagatagagtacaaaaagatgcagtggttcaatatttgcagcttctccattgctggtttgaatctttttagtaactcaattcttaggtttccatgtctaacgtttgactgttcatcttatttaaaaaaaatatgaaaaaaatttaaaaagataagtcatgcataaagtattattcatgttttatcatctaacaataatgaaaatactaatcataaaaaaatttcatataagacggacggtcaaacggtctttttgggatagagggagtacattctaaaccctgtggaagagaacatatatgagctatagtgagcatttttgtatatgttaacatagttttaagacattcagtaaagggacctatattgacattcagcttttttttatctttaaaatctgatggatgtaagaacctctgtagcaagtcacatttctagtaatggaaatggagtcatccttgcccttgctctaaaaaaaaaaagaggtgatcaagacacctaattacttgacatgcttccgtgaccgactatctgcgtcgtcagaaaagtgctatatcatgcaatttaatgtaacttgtaattgatgcagagaactatctcctatgacttccatgagagagagttccagacttccaatcaattagcttacgctttatgttccaattttttgtgaattctataatgaaattggggattcaacaactgattgatctacccctaaaatataaagggacccaaatataaatgtgtacaaaagagatgcaaaaatactaaactacccctaatatcttaacacccccactcaaatacaatgtgtatacaatcatattgcatttggagtgtaaactaaacatgagaacacaaactaaatattagcctatctccaaagtcttgatgatgtcgtcgaagtgtgccaattcttggatgataaagaagaaaagatgtatccccttctcaatgaagcgcaccttggagccttcacaaactgtttttcggccctcggtaccttgaagccttcacgaaccgttcttcggctcttcattgattcgaagatgttgttgatgatgatgatgacaatggaccttcacaaactgttcttcggaccttcacggattgatgatgatgccaactttgatgggaagctagtgatgtgatgaaccaactccgatggggagttggtgatgatgatgcgatgatgatgaggaccagctccgacagtgagctagagaagtgatagaataccatgacctcgatgaattgaaaatatgtaatggacttggatggaatgtagatgactaactaccaaaagacgctagcaaatgacataggatgtgatattagcagcagaatagatgctatagcactacaacactgtggcagatggcagcgacaagcaagcacaataactgaatgtctatgtgatggagcacaagctcgaagacatgaaaacaaatcatcaattttgacagattctgcaactaaaattaagtggtaatcaatggagctaacatagcaggagattagtactaaacgaactactcaagacgtacaaaaggttgtgacattgccacgaagaagttggcgactgtgattggaatgcagcagctgagcagcagattagcaacaaagagctatcggtgatgacggattgcacaaaaggggaaaggggaacaggaccaagataggaaaaattaaatgatccatagatgggtttctagctttctgctgctttgctcacgaaggactctcccgaagcctcatgcggctgggcgacaagcagacaaccccaacggccacgctgctgaggatgacgaccagcgtagttggggacgacgaaccgcgtgacggagaacgtccatgtggacaaccaacgacaagcttaccccagcaatggagatgagcagcgacgacctcggtgcaaggacgcccggccaaaactgcagccgttgcggacgacggcggcggcttgccgccgatggctaggacaagtcccgtgacctgaagaacggtggggacgagcggcgtggataagcgacgcgacgggcgtggcagcgagagtggatggtggagaagcgggcacggcgccgcgacggacggcggctgcgaccggcgaacgggaacgcggtgacggcgatgagccgcgcgcgggcttgctgctaggagacgaagatgacgactgactgctgctgctggatgaagacgccgagcgatggtggacgaggatgaatgacgacaacgatggctcgccggcgatttggcagctagggtttggggagaggctctgatatcatgtgaattctagaatgaaattggggattcaacaactcattgatctacccctaaaggggaaatataaatgtgtacaaaagagatgcgaaaatactaaactacccctaatatcttaactttttttttcttctcacactccatacacaaagatagtcatttctagttgatgcagagactaggggatatacttccattggctaaaaacgaattatacttagtttgcaacctagatattaaaggccagctagagccataacctagtccataaattggccatggcccaattatgccctttttggagcagatcaccttgaaacagcactcaggtgtactaccaaattataaatcttgagcaattagcagcactataaaaaggtgaacctacacttctcgatcaaaaggatcagacgaacactttgctccctcgaggcctcgattcttcagcattacagtttccaatgccaaggtatcatcctactttgtcctgtccatataattgaattggtcatggctcaattgtgcccatattattagttttgcacgtatctgctctcgagcacacaatgaaaggataaggaagagctatgaaggatcatcaatgaagctcttcacagatgaaccacatgtacatcaccaattcaccaatatattctatctgaaaccgtaggcttgggatgcatcagaaactactccatcagtttgaaagcaagggaaggtattcttggctcgttctgtcccagaagccaagctttggatgggagaagagcctgcatgaaaagttctgcaagatggaccaaatggaaaaactgtctgccagagtgatcgtatgtaaatagaatcgcttcaggtcatagtcgggtaacgcgcatcttcgatatcttctgtaccttgtcaccttgcgcatttctcacatttgggatcattgagtgtccattgtatgtatcgatcgatattccagtgatcttcagtacgcctgcgacaaagctaatcacagccatcattaggatgttcttctcgcaccattggacgtctagagagttcggggctgtgcttatctcttaattggcagggcacttacagggtttacaatttcgaaatggttttttttttgctagggcgtccgatatttcgggaattttggtattttttgccaaaattatttgaatatttgacaaattttgaatgaattttaataaactttgaccaaattcacaaaaaaatgggggaaaaacggatgttcagtaaacaatttaatttgcataatgaacaaatgcatgtagttaagtgcaaattgcagaacacaaccagctgctattacatacatcatcaattcttgatatccactccccacaaaaaaaaaattcttgatatccacaattaaagatggccatgcttatcattaattgttggtgcaatacatagaccaaatgatatactcccattatctaaaaataaatcacacttcatttgcacccttgtccattgtccataaatcaacaatggccagattgtgtccttcgtagtactagtagtagacaatttttacttcttggataattaaggacgattatatgactaaggaatcattgttgagctgtatgtgcctcaccaattcatcacaagtctgtctgaaatcgtaggcttgggaggccctgggaactcctgcatgagccagatcagtagtttgaggaattcttggctcctcctgtcctgactgaaccgactaccacgcacaagaatctacaagaaaatttccagaaaacaccatggatgcaaacagtggtttgtatgatgtgcaaaattaacccctgaaggcttcatcactcgatttctggatgactaggtagccatcggctcctgcccatttcagggatcaagagttcctgtgcgtccaatgtgcatgttagttggtcaggaaagcaagtgtccaatcctgttacagttgttcagtacatgtgatacactgataacatttttttaagataatgatacaccgataacatatgcttgtaaaagtgcaaaacacaacttggtgtagttacttacatcatgaacatgcaatttgtcaattaaaaccagatttgacattcaggaatgcaagtgtccaatcaagtaacaattaaccagatggatcaatcatggcatgcatataatgcaagccacagggctactaacacattacacatgtcaatcacacgaataggtgaaacaaatgtaatttattttcacaaaaaatgaaacatgcaaggaattaataatagctaataagacacacatataactttgtccaatattgtgtccctggctactagttgtatgtttacgctctggtgcacgcaatgggagtatgacgaagatcttctcatgaaaacgaccatagatgaaactcttcacacagataaactgcagccaattcatcggtcaaaatcgtagtcttggaaggcaccgggaactactgcttgggcctgaacaatgcatctggcattcttgcttccttctgtcctgtttagttctggatcaacgggataagaaccagaaggtctccagttgatgcactggatgtggaaacaggttgccacagtgggtgtggcgaaagcttctgcggttctgccccagttccgtgccaacctgcatatccaattctgcagttctcatcgtgcaaatttcacacattgagagttcctgccaatgctcctgtacgttcttcagggcagtgatccagttttgatgcacgtgatgagccgtgccatcttctctaatgacatgttcaccaagtatgcccaacgctctcatttcgtcttatgcaaaagcactagtatagatattaaaatacaagtcatgcttaattgacattctaattaatgataaaacaagtcacaataaaataaatgatggttatggttttgtatagtaatttttccttttgcattgccaataattgcaaccgtattcaccatccaaaatttgcatgcacttctctcttttaccacttttctgttaagttaggtgcattgttgttttgctattgtcatcaaagcagtggcagttgacctttaacatgaatactaaaagatcattatgccctttagatgttcctaagcaaagcgacacttaaaattttagcaaataccataaaatatctgaaaaaaataaactgcagatacttaaatatattaaacattcagaaaaaaaataggcaggggaattatgattaatagtttgttctttgattatcattttgcccacgcggtttggtctttaatcaagtttgcttcgaatattagtttacctaatagtacaactcatatgtttgggcattggataagaagacaaccgcacaatttgagatctttggtcttattaaggacaactaccactatttggtctatttggctttgcagaaatgatgtggtttttcaaaggaaaaacatatcttctcctttacaggttattttttttattacacattggctctgctcatgggctatccttcagaaggtcaatttgcggggtactatcattgcggcttgtcaacaattggagctagtggccatggagttttctaccccggcacatgggtggcgttctaggctacggttagagggctcctgaagttctttttgttccttctattttggatgatgagtttatcttttgtttcttttttgttggctgtgtgcactctttgcgtgcaaaagccggaggtgctctcagaataattgtatcacttgatgaaatttactgagatcaataatgcttccattatcttaaaaaaagaagaggacaagtactgagtggtgcaatacttgcagttgcaggtgtttaattacaacattgaatctttttggttagagattgtaaatgcatcgatcatatatgaacaattgatcatagtttatgcattctcactattggcttctatcattcctaggttgatcactttcatataatgcttggagacaaactatttttttgctctgatggatgtaaaaaccctgtaggcatggtaagcattgggaggtcagtctgtgcaactggatttttcatattttggtccttttaaaaaacttatttcgcaaatagacccctagaaaaacttatcccaaaaatagtccttttgggggcgccagagtggacggtgccagcctctctggcgccgtccccctgccgacgtggcggggcgatgctgaggtggctagggagtgcgccagagtggctggcgcctccccccccccccggaaatttttttatttttgttttatttgtttgatatttttttcacgcttagggacacacaagaaccaaccatagaaaaattgaactcaaatggacgtaatatgtgacctgtagaatttttcctctcctctcctctctctccgaactagtgcaaaggagagatgtgcaacttttttatttttatttaatttttttatatttttttcacacttaggaactcacaggaatcaaccatgtaaaaaataaactcaaacggacgaaatatgtggcatgtggaattttccaaagttctaccgaaaaacttctctcctcgaaaacacaatcttgcaagtggaatttggaggttttaatatttctgaacccggcagagcgggggagaattggatataactttttctgtagatgtccgtgcatatattatttgcctgattccaagtccgtatgagaaagttacgcctattttaatagatgacatattttgttcgtttgagtttattttttatacggttggttcctatgttctcctaagtgtgaaaaaaatatcaaaaaaatgaaataaaaataaaaaaaattgcatctctatatactgtttaacttatatatgtcatttcatgtggttatattttgaattatattaagtaatttcatatagtggtagagtgcattatgtttaacatgctgatcaaagggttttactaaaggaattatggtctaattttagtgaaggtgcaaagtagactaagtggtatgctagctattttcagacttagctaagtggtagttcgagtttaaattttttttgtggttggttgtatcgtgatcctaagtgtgaaaaaacatccgaaaaaataaaataaaaatgacaccgttgcaactccatatagagaaacaggaatggaggcggcggcgctagcatggctggcgccctcctcctgccacgtcggttcgcgtgcgccacagtggcagaaggacggcgccagcctctctggcgccgtcccgttggatgacggcgccagccactctggcgccaaaaaaggaccatttctgggataagttttttcaggggtctagttgtgaaataagtttttcaaaaggaccaaaatgtgaaaaatccaggtctgtgcaactggtcactctgagagatacctgtgacaccaaaattgggcgtgtggttcggattgagcagaaatgctctcaaacagatactgtacaagcaatctcagaatcagtaaggaaaatcagcaatgattcaactggatggaaaagcatctggcccaaagcgggatgcatgattaaattatcttggtgctctctaagaatttctaatcatctgaagaacttcgatcagtgatctgttgtctatcacatacaaaaagggatatcccagtgcaaaaaattagtgtaaatttccctcaaagagcaattttatgacttgtacaagacattattttagtcagtaagcttatgtcttcttttacactgcaatttacaaggaagagctatagagacagagtactgaaagatgcagtggttcaatatttgcagcttctcaattactggtttgaatcttttaagtattggattctaaatcctgcggaagagaacatatatgagctatattgagcatttttgtgtatgtcagcatactgttaagacattcagtataggggcctatgctgtcatgatcaatgggccttgtaagggacattgtgtgtgttgggccagctattgggccatctctataagaaccgagccaacagcacgggtgtgttataaaccctgtgtggttggtgaagtggggtatcgaagaagagaaatgataacaaactactaccaacctctctgctcctgaattctccttcttcctcctctgttcttccatgtttcctgtgacgattccccaaatctagagccacgaaccctaggatcgtcacattttggtatctttcgatctggcgcgcaagaaatcccagcccaccttgacggagaggatgtcgattgctgaaggagaagttgtcaatctgaaccagaaggtggtggatctcagcacgaacctcgaccgcatcctgggatcgctaaagggtgtggaggcttggattccaagcgtcgacgctggaatgcaaggcctccggcggtcggtggaaggaatcaaggcgcgggtcatcaagctggaggcccagtcgtcgacggcgacgcctccgccaaatgggcaccgcgtggacaacaagtaccagggtgaagcgactgcggcagagtctgcccaggagcgaaccctggtcaagagtaagatccaaatccctcaatctgcagttaatttcgaagttggggagagttcagagtgggggattgggaattctcaatttggaacacaggggcctagattacctaaaactgaattccctaagtttgatggagataaccctaagttgtggaagaaaaaatctgaaaaatactttgacatgtatcaagttccttatgcaacttgggcctcctttgctacccttcacttcgtaggaaatgctgctctgtggttacaaacttatgaggaattacatgctgtagaaagttggtcggagttgtgtgtagcagttaatgggaagtttggtagggataggtatcaacaattcttagagaaacttgataacttgaaacaagagggaactatagaggagtattacagtaggttcgaggagttgatgcataaggtactggtgtataataggggttatgatgagaccttctttgtgactaagttccttgggggtttaaaaactgagattaaggcagcaattaagctgcacaggcctggtactgttgatgctgcgttgtctcttgctaaaacgcaggaagagctattgatggaggtgaatttgaaggcatatcacaagaccactataaaggagtcgttcaagaataatttcaaggtgccaagtctagctaagggcatccttggccctccacctgatgagatcaagaaaactgaagaaaggcctaaatgggaagaacaatatgactcattgaatgcagctagaagagcta

SEQ ID NO: 8739 - DNA, 987 bp, Oryza sativa
tcctccaccaccaccaccaccacccaagaagagcagtccgccgccgacgacctctcctccctcctctccacctccacctccgacgagccctcctcctcgaagaagaagcggtcgaatagcagcagcggcgcgtcgagcatcccgacgggggtgcggctggagggcatcgccaagtcctacaagggggtgaccgtgctcagggacgtttcttgggaggtgcagcgcggcgagaaggtcggactcgtcggcgtcaacggcgccggcaagacgacccagctccgcatcatcgccggcctcgaggaccccgacgccggcgccgtcgtcaaggccaaggacaacatgaggatcgccttcctcagccaggagttcgaggtgtgcgcgtcgcgcaccgtcagggaggagttcctcgccgcgttcgaggaggagatggaggtgaggtcccgcctggagaaggtgcaggccgcgctggagggcgccaccgaggacatggacctcatggggcgcctcctcgacgagctcgacctgctgcagcggcggtcgcaggacgtcgacctcgggatggtcgaggtcaagatccagaagctcatgcccgagctcgggttcgctcccgaggacgccgaccgcctcgtcgcctccttcagtggtgggtggcagatgaggatgtccctcggcaagattcttcttcaggtacagataaaaaagaaaatttgagctctacatgtagcaatcaatggttgtcatattgtgatggagagaaaaatgagtggtattatggccaattggtgatgaatttggtctggattgttgaatttgaattgtagtttttagtgtctgtgtgcatttccaatgctgaaattgattgtgtgcaggatcccgatttgctgccgctcgattagcccaccaatcacgttgatttggacaccattgagtggctggagagttacctcaagacgcaggaagtgccgatggtcctcatttctcatgaca

SEQ ID NO: 8740 - DNA, 5574 bp, Oryza sativa
atgcaaatatgttgttaaggtattcctagaaacataggtgaaactcaacccaatgtatgacacaatcagaagatccaatataaaaatttctaggaggatattatgggaattaaaggcacctctctaaaaatcaagatatttatatggttccttgaaaagaaagtgatcttagcaaatcctatcttcgtatagagttggtacctactaagaagcatttactcctataaaacaagacatgcaagaagccacatcatcaacaatttaagccattggatcgcattagtatagagttataagccgttggatcaagaagctagctactcatccatctaaattaatcattgattactcattcattcacctccttttagctcataatcacgcgtgacattgttatccattctgcacatccaaatcctcaaagatgataataatattttttttgttctaaatacaactccaattattacataagatgtgagctttattttgttataaacaattagataacatacaataattaggtatcattaatccaaactcatttttgaaacatgcttgagatgaaacagagaagtgctacactacctaattgtgacgatatccagattgtgcatgaaaataactttcatacatcataacaatacacaatgatgtttcaaaaaataaaacatgaattgtattgtaataacagaagctatatatgaagccacattatcatctattttgtatatacaaagagttacatctaatcatttaaaacattgattttattcgatgataaaactaacaaatcccgtggcaaggcgcggggtgccaactagtaataacaaaaactcatttaaaacattgattttattcgatgataaaactaacaaatcccgtggcaaggcgcggggtgacaactagtaataacaaaaactcgacctgtgggggtaagacagcccccccttacggtagtccatgtcccaacgagccttacagtagtccatgtcccaacgacggcgtgggacaaacgaggagatttttttaaccacagcccccgccttacggtagtccatgtcccaacgatccttacggtagtccatgtcccaacgacggtgtgggacaaacgaggagatttttttaaccacaacctaaattttgttccaagggggaattaaacacagaacctgagaagtgctactatagccacctaaccaactcagctagaggctccttgcatcttaacaaataataatcaaggtatttagcatccagcatgtcttatgaaagacataggttgctactgatacattacacacatgacaataaataggttcatatatacctttagcacgtggatgcagggcatagctggaatgaaatggagggcgtgccactcgcttaatttactatattttaaatcgagtttaactgatgcggttctctaagtttttatttaaaagggtacacatatagtgaaaataagtaatgtatagttaaaaaatttcttaatcgggttcctacttcctaggcacccctctcatatactctagttccacccttgcttggatgccattgaaacactgctagctaaaacataacttcgtccacaaattcatcgttgccctaagagtttgcagacttgtagtcatagactctggtgtgcaaactacagagaatacatgaagaatatttcctgaatgtcctttctattacctatctgtctcaagcaataggctttggaggtttcaggaaaccactgcatctgagctagagagatcaaagagtaatctggatttccttgcctgcaggtgttctcgatggcttccttgcctagtgatgccacctgcagcttgatgcaaagacggccattcacagtcagagccacgctatgccgtgcctcaagcaaccaattcaggtggtgtttacatccagggacttaactttagtccctgtctttagacactaatttagagtattaaatatagactacttacaaaactaattacataaataaaagctaattcacgagacaaattttttaagcctaattaatctataattagagaatgtttactgtagcatcacataggctaatcatggattaattaggctcattagattcgtctcgcaaattagtccaagatcatggatgagttttattaatagtctacgtttaatatttataattaattttcaaacatccgatgtgatagggacttaaaagttttagtcccatctaaacaggcctctatattttttctgttaagtgtagctgatcagtacaatggaattaaacgatgccagttgagagaaccaaaaactcttaatttgttccatagagttggtattcatgtttgtttatagctcactgcgggcagaaatcgcccgtcatttacgagatcttcaccaaggactgtcttgatctctcccttaacatcctgattctacaatgtaatgatgataattaagcttcagaacatctattgtctgcatagagaaggagtgctacatcctgcaatttaatgcaactattttcagaggactatttcacacacggctctcacactagacatgattcagactttcagtcaacaaggttaattatgccttgtcctgattttttcatgtcacactccagtatgcagagtagagatgtagagtcagccaagtacaagcggtccatggtccaatagttttatgtgttaatttgctagaatgaatcttttttgtttgtttatgatcataaaggcagcgagagatatatatacatagaacagatgtgtatctcacagtttacttcttttgttctaggttttaatttctccattctcacaaaccaaacatccggttctcttatattttttggactcatgctggatgttggtttgggaagcattgggagattggtgcgtgctgtcacggctcgactgatgccaacacttggcgacgacttctcctgctgataatgcttatgtcggaggcagtactgtattaagggaatgtcagttaatcagattagctgcattgagatgaagatcaggaacttaagaacacttgttctctgtatcatatacatctgtagtgcttcaactactttcatctaaatatatatgctgttactcattttgccttgtggtgcttaaccatcctgatatatagacagctagctcacaagccacttaatttggttctctgaagaacataaaattggtactaactggtaactgacgaagcactgaatctttctttcgccgattgtgcatgcagataacacgacataattttgggtaagatcatagtacaagtacttgcatagcacagtgaaatgttgagacttaacgccattaagttctctcaaatcaaaattaggaaaccactaatacttccctcacagtcacagacaattaaaaacactagctagctggaaaatggggaaaaggagagagtctgattggcaaagaatggaggcaggctgatggcccatgaagtcatttctctttgttttttcaatacattttccttttctttccaactttgtagtacaaccactacatggaaattcttttttttttacaaaaacatgacaataggttctataatatcttactgcctccattggaatataggctccaataattgtggtttatttatcttgtgttggtgtctattagtttgtgttggagttttgttaaatttggattgtgtcttgtgaactctgtggtgtgtgatcgcagttgagcaattttgtgtaataagtgattgtagctcttttgagcaaaggctaaatttatttacattatctatggaatatagaaggcacggtgttgaacatccaactttggctatcactttttcctaaagtatattatcattggcagtgagatcaaatatgaaagtacatttgaggcaaaattcaaatatacaacttttaacttttatgtcactagatttatatattgttaagccaattgctagttaaaatatttataatgaattgcatgcagtttgggtcaccttttattaccaacactttggaccatcctttattacctagtccaaagtgaaaatattgagtagattatggtttaaaatgaaattttggtaataaatggtggaccaaattgtggttcactctgagactttaatcttgaaattgcgtacaagtattatattttctagtggaaggagtagtattataggatttgtttttgccatttccaattttcttagttcaaatttgaattggatcgaaataattcggatttgctagcggaatatattcctaaaacagcctggaatcacggttttctgttgaaaccggtcggtttttactggaattaatggtgatccgtgactgtttatgcaaaccattgttcgtagttctgctgacacattgcacacatcctctcaagaaagaaaaatgacacattacacacatgacagtcagtgcataggttcatatgtacctccacatatgccacaatctaagtaatgaagaaaataatattggaacagagctagctataacataacgtggtcgagatattgatctttcccctagagctgtagctatgaagtctggtgcatgtgcagactacaaagaacgaagaagatagtaatactttctgaatgtcttgcctatcacccaattgtctgaagcaacaggctttggaggtatcaggaactactgcatctgagctagagtgatcacagagcattctttcctctccttcagttgtcgctgttcttaactctcatgcttctctcacatggccagaagaacgtacctacgtcttttggagctctgctcatccatagccatggagctgtgtttgagggctagcaaagcaataagcaactcagatggagttgtttagaacatagttcagattgctgactggatgtgggtatcctgaatccctcccgaaattgtttccaatcggttgaaaacttggatccattggattaaatttgttgaaatctgttatgaatttcgttcaaaattcgaaatttaattagtgagatatcaacacctcatatggacttgcatttaaaaactgagatagtacgaacgctagtatatatagtgttgattcagatggatatagcttaatgtgagagaagcatgagagaatctcttgtggatgatctctatgtctctctatttgtttgttactcatatatagaaaatggcctcaaataacttgggtgcactttatttctcctataaattgttatcacattttcttctactttcaataattaaaataaaatttctcgtctaagtttttctaatgatcaatcatggcatctttaatccgagccacagagctgccgacacattacacatgccaacaaatagtttcatccctctagaacatgtacatcttaggtggggtttgaatctcatgaaaatgaagataaagatgaagattaagtgttttacgtaaaacgaggtggtaataacatgtgattaatttagtatcttcacaagaaaatcatgtacataattaatgacaactacttaagagtctaagagcaagtttaatagtatagccaaccattagctccaactcacctatagtt

SEQ ID NO: 8741 - DNA, 12274 bp, Oryza sativa
ctttgaggatttggatgtgcagaatggataacaatgtcacgcgtgattatgagctaaaaggaggtgaatgaatgagtaatcaatgattaatttagatggatgagtagctagcttcttgatccaacggcttataactctatactaatgcgatccaatggcttaaattgttgatgatgtggcttcttgcatgtcttgttttataggagtaaatgcttcttagtaggtaccaactctatacgaagataggatttgctaagatcactttcttttcaaggaaccatataaatatcttgatttttagagaggtgcctttaattcccataatatcctcctagaaatttttatattggatcttctgattgtgtcatacattgggttgagtttcacctatgtttctaggaataccttaacaacatatttgcattatactacctttgttttctaatatatgatgttattaattttttgacaaacgtttgaccattcgtcttattcaatttttttgtgcaactataaaaaatataagtcatgttaaagacatttgacgataaatcaagtcacaataaaataaataataattgcattaatcttttgaataaaacgaatgattaaatgtatataaaaaagttagcaacgtcacatattaaaaaacagagagagtacttcctccgtttcacaatgtaagactttctggcattgcccacattcatttagatgttaatgaatttagacatatgtatgtgtttaaattcattaatatctatatgtatgtgggcaatgctacaaagtcttacattgtgaaacggagggaatattctgtaaaggaatttaaattcaagacatgtggtaaggcctcgttgtgtgtggcgatgctggatagtcaaaattccttatccatcccaagccaagattgaacatagctatgtagcatgcattttacgagcgatgtttttggtcaggataattttatcatccttgagaatgtatctcccaatacaatattttatagtataaaatttggtacctttagatatgaagtacctctaagtacctcgaggtactttctaatcgtaaaatttctcttttggtcaatgatgcttgctctatcacactatcatgaccaacagagtatactaaatgttcttgcagcaaaggcatggtttcctctcattatgctggctctacagtttgcaaagaagttggtatctctatgcggacatgagatatttatataggaataaagtgattctactcagtaactgggagctacaaatttatgtttccctttaatacaagagccacaagacttcattgtgcaaatcatgaataatacacttgttgaagagagtgcactattcacatttgctagatgtttacagaagtttgcatgcatggaactaatagcatggacttagtaaggtattgacaattcaagtcttgaagatggaatgatttcaaatcaaacacaaccttttttaaaaagaaaaaaagcaatgcgctggcctaaccattcttaattagtactgtttttgagaattctttgtttgaaaaaatagaaaaaaaagcacaaaaaaaaggagatataatggcataactctcctgtgagttcttgaaataaacacaagaagtaattcagaaaaaactggcctccagaaccctaatgaactctaccatatctatcctcctatctctgttcatgtcatatttggcaatcatttgctcacactcatcaacccctacaccttctcttaatcctagattcctaaggactctatacaaatccaatgcatcaatgtacccatcattatcctcatcaaacaccaaaaatgcctgctttacttcgtccaagctcggttcatcgtcatcgaacaactctgacatgcagttagaaccaatctccttgtaaaccatagtttttccgtgatcaaaatcaggccccatctttgtcatcacagactcaacatcttcatgtgtcatctctatcccatcatctttatgcttacttagattctttgatatctttctgtcggcgagaaccggtgtcgaggtcaccttggtgacggcataattgcagtgttggcaagaactagggaggatcatctgaaccttcgagatgaaccaggtaaacatggtgaagaggatgaggaggcaaaccggttcttgggactccagttccaggaggaagtgcatggccggtgacttctccattgttgcctagttggcttcttgaactgaactcttgtttgttgcttcttcactttcttggtggttttggtgagaggaaaaatccatgtaggaaggttatataggaaaccttgttgatgtatgttgttttgtagcgtatggcttcaacagaatcaatctgaaataactatgcaagtgacgagatgtttcccagttagaacatttgtatggaaggaagactagaggacggctgcaagatggctgctttgtctgacagattcaagagtctactctggttggtcttgccttgcctccgtttggttcttgcaattttcttttacaaaattggaacttgcctggaaaggaggggagtcagagagtttgattctctctttcaattacaaacagtagtctacttgatgatgctctatgttatgatgcagtagttttcagaaactattggctccttaactgtgtacatgttggggaacagactgaaaatggtcagtggttaaatattcaaggttaatgtctgaatatctgacgaatattgaatgaaagaaataaattattcaaaagttgttgaatgaaatccacccaaaaggaaattgtatgaactgggtactaattcttgggccgggctgtaccggtccgaactgggtatttcaagttggaatgcacaaacttatcagatcaactctgactggagatgggttgtcagtggaggccattttgggtacttagggtgaaaacggtctgaaatttacatggactcatcatgggccaggcaaggctagcaatccatttcttttaggtcatgtagtatatgttaatctgaacttttattaagtcccaagtaggagaatcagtctctgaaaatttttcaggtagaataagcatggaggttgcaccgaaatttcagggaagcctataaatgctgtcggaaagaagaacaagactcaagaccttataagcattttcaatagagactcaagacttgagaggaagtgtagaaggatgcaaactaactcattcgtatctttggtttaaatgcttcttcctttaatttaatgtcaaccgtactactgtagatcgactggaagttcatacttatcaattttgattctggtttgataaagacttgttctttgctaaaatgttaggaattaataccatgcacatgtgcatctgttttttattgaatcatatgtgtctaattatcaaagaagccatatgtttcttgaagaacttgagaaggtaaaacctgccctgccaatgactgaacaagtcaagatcctataagctgacaaagtaaaatttgagtttttaccgtcatcttccgtttcattttttcttccctcttaaatttccgcgatgcatttgcgcatatatttcgtgtggtgtcatccagtatgcacctcttgtttacatgtcaatcacaatctttctcaatcagctcatccttttcaaagaaatgtcaagttcattgcatggacattgcctgaacaaaaaacgagaaagaattcatcggtgctttgcgataccaacgtgacatagtgcctgattgcctgtgactcaccgaggttcaggaattcagtgataacctatataccagtggcacagcacttatttcaagcctctcatatttttcacaaaaaaaaaattgtctacatgcaagtgtaatctaatgcttgctgtaacttttttcaccacaaacaaattttgatgtttggaagtctttcggacagctgtaaagtttctattggcgggaactaacttagatgagtagttaactactgtttacttcatcagataagatatattagcaatttagcatagtagaggctaacaaactatctaaccaaagtgccgaatccactatcatgcttaaagtgactagctttagtttacctgaagtttgaagcccacattgtctgcatcaggataagaaaagccggtacggttggtgaccatgctgctgatgcacagtcatctcaagcagcaaaaactgccagcatcatctgcactatgtcaccacccaatttgcaagcaattgtgtggcacatcctccttttaggtggtcttgatccattcctgctttatttctaaccttgtcatttctttgccaatttatatgtgcccttgattcctcgtttgctcatctgctcttttttcgatatgtatctatcttgttgtatcttcttttctcatgacgagcgattcggttttttgcggctttcgatctatgctaccctagatacctgccaagaaagggcacatacaggttgattgattagccaatactgaattcattacaagagcttttagcctctcattgcctatgaaaatgctcacctacttttgtagatataaaaataaacccatcatatgagctaatgaagcacttcaagaaaaagtcaatttttatagcagattagagattgggctacagctagcctaaacacatgattgtggaggatgtttcagagtcctctatgactccatgctccatgacaaatgagctataaaatagctcaattctgaagctccatatgaccccctcatggatgcagaagaatagtagaaaagtacttcaagatggagagagttcctgcagttcatctggcagtggtgctcctggccttctgctgcctcatccatgcatcatcaagtgctgaaactccactcccacctggtaatcttctcggttcctcgcctccgtatcttcttcgtggcatattgttttttcagaaattcatagtaaaacataatgagatctgaacattctgactgaatattgatgtttgagtcacaaccagccctcaaggtgatgcagcgttttgaagcaactccagtctctagcagaggagatgatcaggtgatccgggtccagctctcttttccatctcataactttgattaaatcaagttttttttttgaaaaaaaaagagagagatcagcttacactttttttagaacctatatattcagataagtaataactgttcatgttcaccatgttttcaagtagtactagtagctacttttcagaacatgttctgtttagctgcaattgcaaaactgtctgctcaatctcaaccatgatccataaggctgccgccgtcatcgccggagaaccggaggccggcgaggtcaacggcaggatggaactggagctcaccgattacccgggctccggcgccaacgatcggcactcgccatgggggcaggagaggagaaactgagcagcagcagcaaaaaatcttcagagaaaacttcatccatggtcactttcttcagagagaaaattcagactttgtacctgtaccatatcatgtatacttaattatctctactattttctacacaactgttacagtgtttctacaccctgtgtaacatgaaagagaggatttgggagttaattaacgactgataatcagtcgccggcaccataatattataacaattaattataacatttctagtaagttttttagtcaaagttgttatttgtttaattaactttctaggcgtgtttgttctactgtaatttttctgttctagtaatatctgaatctttgctttgatcgattcaattatatgttgcgtgtggtgaaggataaaagtattaatgcaatctgatgttctcatctagaacatttttgccagttcgttgatttcggtttgatttattggagacgactaggctgaagatttcgtgttaggcagcgtggagtgacctgtcacaaagctgaggctgacgaatggcgttacgatttccttctgatttgtgatctacactcttgattaactataagtagttgagaaatacaaggacctgatttttctttttttttaaaaaaaacatttgcttcaggtaaaatgcatctatttcaaatctaaattgtttagaatttttttttactttgaaaatagagtgcgtgtcacctaaacgatctcgtactttcatttctggtgatagaagtggaggagacttctctttttttaaaaaaaaaaatctcactaaatgatttacttacattacacgctagtgacatgaaacctttgtaaatcactaaatcttatgaaatccgataaaacctaaataatacctcgagaagcatcaccgatcattaaaaataactccctctataccataacatttaacgttggttagtttattttttaaccatcaccaacaaaaagaaccaaagaagtagtacaaggttaattttgacttcacgatattggatcaaacctagtgcaatgcaaaagcgaaggttctcgtcggtaaccctacagctttggctaatcagctaaattggccttttcaattcagcataatcagccataaaaaggtgtccacaaagatcaaatacactaccaatagctggtacttattcagcacaataagctaactgatgggcttgtgctaaatatcagcctcagccacagcaaaccgatgaggtccgaaaacatttaccagcataacataaattacttctcactcgaaatttagtcgaaaaagagaggaaattaaaatacaactcgagatttagtcgaaaagacaggaaattaaaaatacagtatacatttgattcgcttcgatccagcgtgtcacgcggaatccgcccgttgcctttgccggctgcgaaaaccacgagcgggtgtaacgccgtcaacccgagaccccgagaccatcgatcccgcgccgtccgatcctgatcgcgcggctcccgtgccgcacgacggcagacggccgccgtgctgtggccgttgcaccgcgtcggcttccgatttattgataataataatccagatttaatttaatattttattgtttaccacacagctgctcctcctcgggcttgactcgtctcgtctcgactccacgaacgaacgaaacacgccttcttccccaacgaccaaaccaaagtttgggtgaagaaaaaaaaatatcgccgcgtttttatcccccacgagacgagtcgagacgaccaaaagcctaactaatcgggggcaagacgaggaggagagcggattctcgtcggcttcggcgaccggaagaggagaggagaccgaccccgcgccgtgttccgccgccgccgccgccgccgacgacgacgacggcaagtaggtgcgtgcgatccccttccccttctctttgcgcggagcccgtcgccgagcggcgcggcggtggggagtccgttgatgtgtgtggtgccgcccgatttgggggtgatgtgatgtggtgtggtggctgctcttctacggtggaatcggggagagattcgcgttgttatggcgctgattcggtagggattgggtgggttgttcgtatgatccgcgctcagaaggggaattttgctgtggagagttgggggggggggggttggttgtagctagggtttcggtcggggacgggctctagtctctagagagttttagagtagtccaatacagtaaacggagtggtttttatttttcaggaattttcgctttactgcccgattcgaactatgcccatttttagccatcctcttgtgcgagtttaccccgtattgaccaatggcgttgtttgccttgttggtttcttgcaggaatttgattctcctggggaattaacttgttaggagaaaaggaatttgggatgggcgaccatgtggtggtgaatgtggaaggcttgggaaacgatggaggggctgtggagaagccatctgaggccgtgaacagctcagtggtggctgctgcgtcgctttctacgactgttgatacggtcgaggagggcggtggagaggaggagccgctcatccaggcggcggagtgccgtatatgccaggaggaggatagcatcaagaacctcgagaagccttgtgcttgcagtggcagcctcaaggtccagctcctcctcttttgatgttatttccatcttggatatggttcttatgttcctgaaattattgtaggcagcttgttgttcatgcagtgcatgtagttactggggctaagaataggctagttggggtagtgcttttcctagtttccattttggcttcattatggtttttcaattctattttcatgttggataagttgatggttttcttgcacataaattgatctaccatgttagataaagttgatttatcacattagattccctgataggttatactacctccatttcaggttataagactttctagtattgcctacattcatataaatgttaatgaatctaggcacacatatatgtctagattcattaacatatatatatatatatatatatatatatatatatatatatatatatatgaatgtgggcaatgctagaaagtcttataacctgaaacggaggaagtagttgtttaattgccttgtatatgtatgttcaggatagtatcactgccatatcatatgatggggataaaattgttcacccctatggcagcatagtttactgggatgctatctatctacctgtagaggatgctaacctttaaacatgctgtgtacaaaaaaattggtttatccaataactatgcagtatcgggcatggcatgtatgtacctttaagcatgctcgtgtgactgtgtcctcactttctcctgaatctagctgcaaatggcaagttggattgttctcatatactttttaatgaagaaccaacctttgatctcatagggaagtgatgtggatatggatattgcatatcatctgtttgtcacaatcccttgtggagaacactttgcaaagacaagttgagtcagcactccgttaaacaaagcagctatgaattccattttacaatctttatgggataagacataccagtgttttgtgcaatggtttttgaagcaatagttgggtcaccacattgctactttatggtatgatgctaccttggacactaaatttcaacagcaatacagtgcatgggccggtcttacgtcatattaattgccaatggcaatacgtaatgcaaacccacactcaagcaagcaaccaccaatagtaaggctgtgttcgggaggtggaattccacctccccgcaagaaaaacatggtggtttattaatgtttaattaattaagtattagctaaaaataacttgaaaaatggattaatatgatttttaaagcaacttccgtatataatttttttgtaaaaaatgtaccgtttattagtttgaaaagcatgcacgtggaaaatgagagaggtgagttgggaaagtgaagaaaagaactcagcctaaatatattggttttgagtttgatccaacaacgaaaaatgcatttttatctcttaatattctattgggagcatatcaagggctactcaaaccatctgtccccaactatctccatgacttatcacagtaatactttattgatctcttctgtaccgtctgctggtactgttaagtcttgagttatgtcttgttatttcatttcattacatttcttccatatttctgatagaagctcatgagatgattaaagatccttaataatcttataatccattaacccagtccattttgtgtgaaaaactggatattaaataagcaaatttatgagattcgttactactttatctgctttgtttcttttagcttggaatttgcttttaagtcatagctattctttggatataatgtgtgtttgacatgaacttagaggctgcttctgtgtagtcaactaacttataatgtgtgttgtccttggcttgtataccatatgagaaagtacttgtatgttttatctatgtaattattttgtattctggaattgacaattttactttcttcatgtacagtatgctcatagagcttgtgtgcaacgctggtgcaatgagaaaggagacattacatgtgaaatctgtcatgaggtcagtaagatttcttctctactactccattactacgcattgctttctagttcttatctagaggctaagatagcacctattttgatatgtgtgcatccaaattgcagtatatttgtttcttcttaggacttcatttgtcaaatgttctgatctgaccttgacctgatgatttgacttgttctttctgcaatctcacgtcctcaccaatacaatattgctgttgcgatagctgaattcctctttaatgccatatgcacctttttcttgatgtgtgctgcttgctcttcttctttcacataggcctcactccatacaggatcatggcttttgtgtgacaaccttgaactcatttagtgttgtctatctgccattacaccgttaccatttgaagttgcttggggagcgagagctaaagcagctcatttttattttaatcaatattagttgatttgaagtaatctgagtgacggggacaggtcgtgataaattgggtagatttgagtttttccatgggtgcttagttgtggccttccaatttagtattagttcgatcttttcctttcctttcatgagcttaaaaccagcatttagttttaggagaatgtaggggagaccgggagagccctactatgctggtacattgcatgcttttgtgattgattaactgtttatgtttcaaatatgtttatactcgtagaatacctgtagcttctttcagtcttctgtagattttccaatgtgtttccgttcctgtgtattaatttcgttgaggcttgtattttcttctgcagcaatataagcatggatacacagctccacctcgtgttgaaccagacgataccatcatagatatcgggtaagttatttctgtacttattttgcttaaatttaccagtttgtccatttgattatattgtgttcaagtgcctttgaaatttgaaaatttagaacatttctaagtcaatactgttggcttgcagtggtgattgggcacgtgacccaagaattattgctgtagcggctgcacaacgtcgtcttcttgaaactgagtatgatgaatatgctggtactgatgctagtggtgctgcattctgccgttctgctgcacttatagtaagtactaaacaacaattcaaggtcctgttgtgcttaataagctaagctaattcatagattgctacttccagagtccagacaatttgtccagtcaccagtatagcctatcgccctatcgatctgttttataattgaagaaccatgcttagagataccttgcatttctctcatagttctgtttaatgaatggaagtataatatttttagttggtttacaaataggcaatcaagctagcctccttctctagtcaatcctttgtatgacttctctagccaaatggcttgtctcgaatttctggaattctcaagattgaacattctaaaatccttggtgcttttccagctaatggccttgttgctattgaggcatgctttgtctatctcagacaatgaaggagatgatgatgcttctaccatgttctcggttagtcttgtgttccttccccactttttttatcttattggttctttctgagctcaatgttgacttaaaaatctttttttacatgacttaaaatctattaatgttcttcaatgtccaacagctctttctacttcgagctgctggatttctgctgccatgctatatcatggcttggatattcagtattttgcatcgccggcgacaaagacaggtacttctaattctgtatggatctcattgattgtcaataaaatcattattgggctattcttatggaggaatgaaatgattggtggaccatctgatcctaactttgacacattaaccacttggttggtttaacgaatgggatgggttgttgtgtcactcttatcatgtttagcagaaaaacgaaaaatgacaccacctcaccagaatcacgtgatgatccctatccaacttgatgtagtattatggaatggaagttttaggccccgtttggtagggctccaaactccaaactccaactcctaactctaaactcccactccagtgagagctggctccagtgggagctccaaacactttttcactccagtgtttggctagtattcagctccagatctgaaaaaaaaatttaaaaaagaaaaaaacaaatgcccaaaccctaactgc

SEQ ID NO: 8742 - DNA, 21473 bp, Oryza sativa
ttgcgaaattgcgcccctagtaagtactagtagtctatttttaccctctagaacacaacggaagcatgatgaagatcattgatgaaggatcagtgataaagctcttcacagacaaactggacgtcaccaattcaccaatctgcccgaactctgaaaccgtaagcttggaaggcgttaggaactactgcatgggcctgatcagttcatcagcacattcgtgccttcttctatcctccatcagtccatctatccaattgaagggagaagaacctacaagaaaatctccggacgatcgatagtcctgcgcgccaatccgcatctctgattctttaggctgagttcgggagcctcctgatacggcgcataattaataaagtattagttaaaaggactttaaaaatagattaacataatattttagacagtggttgcgcttatacgtggtgagtttgttcttctccaatgacacattcacaaacgacgctgagatggagtagatgtggcatagaaggcgcggcggatgaattgtctgctcctagacaccaccgaattgaagtggatgctgttagttgagagatgttgttctttggccacatttctagttaaccttttcttcaactaggaaggattaatcacgcgggcatgcatcgtagattgtgtttgagaaacttatataggagaaatattaaccgaaacatataaaatatcatttggcttgtctggattatttgagaacatttagaaaaaaaacccttggtaattggtatattttatctaattaaaggcactcgatttggtaattggtatattttatctaattaaaggcactcgatttttgatccagtggctaagactattcatatttcactcgatatgggcatatgtatcttacattgttagtttaattataaagagagatcaattagataaaaatcaaatgtgtagcttataaaaaaacactatagttgtttcaatattgattgtttatcttatagtttagtagctaccaaaataaagaagaggatggcggtgtttttttgcatgtgagagggaggaggagatggagggactttatttttctaaataatttaagtgaaaaccgattataatatgtttctttttttctcaaaatttcttttattgcttttataacttttaagacatgacacatgttgacttaatgttttgcaaaaaatatatttaattgacgaaaataatgaatccatcgagttaatatgaattgttttctaatttttaagacgtaacacattattagttgaaagtactctgggatgtttaatcaatttttatcatgtaaacttatttatgacataatgcatatagtcaactttttttaaaaaaaaatttcattcttatttggtttccatgaaaaaaattggagtctacttcaagtgatgtattttaatttatggtaaaatatggataatgatgaacttgaattatttatttagttacaaataaaacaacaattgaaacaaactaaaaatcatatactccctccgtcctagaagataagaagtttctagggttggatacgattattaagaaagtaggtagaagtgagtggtggagagttgtgattggatgagtagttgaggtaggtgggaaaagtgaatggtggatagttgtgattggttggaaaaagaatattggtggagaagttgttatattttgggacaaatcccaagggctaaaagttattatattttgggacggagggagtacaacttttaaaattatagtcgttaagctatctgattattgatttttttatatgatgtgtatgtgtggggatgttcatgtgaacacatatattatgtgtgaagggttggaagtgggccttttcgctttttatactgttaagatatcagttgaaaataataaggacaccgtgtttaacttaaaataatcaatggttaggttttgtacaagttaaattatagtcaacgggtgcattaaattctaatttatgattttaatcataaatagcataattacacaaatataacgtataatttggtctgatagaaaaaaatttcataaagaaaaaaaggaagaggggacatctccttttcaaaaagagaaaaaaatcaatcttatcctgcggcttggagtggtgggcctattaattttagtaaaaattaaaaggctagttatttcttttttctcatcttttctaagattttatctaatttattaaagcgccacgtagtatcataggagtatttatatgagcgtcatgtggtggcttagaagtgtttataggaagtttaatggacttttattatataatagatagatagattgattgattgatattgtcgatataattcagcgacacatgtttgtagaattatttaaggtgacatagtatatgttgtcaacttttttatattttaaaaatatttcattgttatatttggctgccatgtaaaaaaatagcccatagaacaacatagatcttgaattatttatttaattataaataaaacaacaacaaaaataagccatgtaactattgaaattggaagattaggaaaaggtagagaatatgagaggagggagtacgtaacgtacgtactaattggaggagggtaacataccagcgaggaggggaggttgggaccggtaccgtgaagagggggattttatttatttttattactaaggccctgtttgattcatcttaagattattataatctagcttattaggagtaagctgaaataaacaagtagattattatagcagattattgtaatctataagccagattattataatctaataagctgctctaaaagagcttttttcagattatcgagtggctaaagacccactactcctacatacttgagaaaaattacccacctatgccatcaaccgaacagatagctgggggcattatagactttagcctttcaaacccaataatccatgcctccaataatccagacaaacaaacaactcacagcttattctatatcagcttattataatccagcttatagcaatctggtttaataatctagattataataatcataagctgaaacaaacagggcctaaatctaatggttgaaaatattggacccaccaatttaaagaaaaatcaacggttgtattttagagtgccacttgacggcttatgagcgtttgtaggagtgacacatggcggtttaggagcgtgtatgaactaattggaggagggtaacataccagcgaggagggaggtggggaccggtaccgtgaagagggggattttatttatttttattactaaatctaatggttgaaaatattggacccactaatttaaagaaaaatcaacggttgtattttagagtgccacttggcggcttatgagcgtttgtaagagtgacacatggtggtttaggagcgtttgtaggaagtttaatggacttttagtatataatagaagatagatagatatatagtagcagatttttttttaataatggattaaaccaatctctgcacccaaggcaaatgtacacaacatatagtactagatagaaaatgaactaaatatatagtactagatagaaaatgaactagtaaacgggtttttatatgctgctagcgggtttgccgacatacatacattagccgtcataggttacaggagcaagacacaaatgatgttcgcggcgcctctggaaaaggtaaccacaggtaattctaatctatcactaggaagttcatcccgttttcattggacactgaaaattcagtctgcgcctgcgtgcatctattaactggcagtatattatatatttatgtcatattttattagacatctttggtgccttctaatctactccttctagatatagagtaatgtctacatttattgtactatgatgtgttatatcctagtacgtacgaggttagtttttttttttttggacggatggagtatactgattctaccgtgcgatcctgatgaatgttcaacaaacaatattgcatcatggtgcatataaagtgcaaaacacgatctcatgtagtttgcgaacatcatgaacatgaaatttatcaaatctcaagtttggcaaattttgtctgccttgaataaaactattatagatatctagtgcacctgtttgcaccggctcgtgcgactgtcgttccttcttactctctccgtccaaaaaaaacttaacttctaggctttgaactttgtcccacaaaaaaccaacttctaccatctacctaccgtcagcacgtaaaagaataagttttattccttcaatagtttttacctacctatcatcattactacttttttcaataatgaggagcattttgatcattttcactctccaataattttgcattgggatgcttgggactgagggagtagctttttagctagaggcgttattgttggagggtctttatcgcggttcaagtgttgctacagttgagtatgtagatgacaattgtttgtggctgtagctcgccgcggaatgatattaatttgctgtcgtcatggctttttctttttttttcccaccttaataaatataggttatgttcatcctatgcagaggagaggattggtcttagattaagtgtattactatcttgttgtaatagtctgggatataaaattcctttatcgtaaaaaaacatttgcaccgttgcgcagattaataagatccttttcacaaaagagctatgaaaataaaaatgttgtacataccataagcttgccaaatgaaaaaaagaaacagctcaagcaaggagggggctatgttttctaagagattatgcaaaccaactcctggaagacttactgtaaagtatttgccatactgcccatatgggtggtttcaaacaaaaaaggcaaaggacaactgttcttagtttggtttgttgtaaaaaagtaagaaagtaaaaaaaaacttcaagtgctttctgaatccttattgtgaatgagcttcatggaaccaattgcgtgttgccacgttaacattgagcgaactcatgttgactgctgagcaaatctggtaattgcatatctcagctaggtcatgcaagatgaacccaaacaatcgttcttccatataagaaaaaaatagtcttatacaatgagagcatattgaaactcttcctattcaggattaaagaaacataccaaagtacattaaaagcttgaagggtacgtggaaaataaaccattgcatcagaaatagtgcccattgaaacattaaagaatctagcttttcagaagttcaggcatatatagcataggtgtaaagtcaaacaaataaatagtaatttgacaaaagaaagatacttgagatgggaatttatcttacaacataaacagatatccacagggaattgcatgagctagtgtaaatcctaatggcctaagctgaagacctggacaaaccaatcacaacagggagcaaagatcacctgatcaacattagtcaatcccgatataaaaataaattagtgttgaactgacgtcggaaaactaacatggtttttttcctcaacaaacttgctggagtaattaggaaggatcaatcgaacaaaccaacgtaatgcagataatcgtcattttgacaaacggtcagcagctatatataaaatcaagttgttgggggtcaaaacatcggcaaggtaattcagcatcaccgaggatgagaaacatagattagtagttgtatgcacttactgctttactgaatcaaagggctggttagcacgctgcttgagcacgaaatcctcctacatgaacaccatgtaatccaaacttgagatgaatgcaaagaaatactgggaaaaacgtagggaaatcatcaaatatgctccctgacaaacttgtgtccggcaacaatgacgacgccagtggccaggaatcggaagggatggagaagtgaatagattgaactacaggatgagtgagatatcattttctaaaaaaaaggatgggtgagatataagcctttattgggtcgtcggtttctggtgatcgatgatcatggtttctggtgagggaggcgaagaggatgcttttcatgacttaatgtcagccatcaagacttctcgttggttggcgtcggcatttgccgcttttcatgatacgtacgtcgaggaagcgagcagcctggaggagtcactagtaaaaaaaacctcatatagatcagcactataggtgccgaaatagctaaaaccggcacctataatgcttttccctcctccatggactcaaaacacgtaaaaccaacacctttaagcaactataggtgccggttctcaagaagaaccgacacctatagtataggtgccggttttttttaaaaaacaacacctttaatataatataagtgtcggttttctaaaaagaaaccagcacctatccaaattgagccgatccaggccgacgcatcggcctcatcctatattagtctcgtccttatcagcctcatcgatctcttagtctctctctcgcctctctcgatctctctggtctctctcgttctctctcgcccctctctctctctcgcctctttgtgtagcgcacggcggcggtcgggcggcgtcccggcggaggcgtcagtggcggcggtgccctcccctccaccggatccggcggggggagacggcgggagacgggaggcagcggcgccctcccctccgcttgatccggtgggagggaaggcggcgggcgacggcgagcgcccttcgctccgctggattcggcgggaggggaggcggcgtgcgatggtgggcggaaccaaggagagggaacgcatgcagctgttgagccgggtggggaaggtgacacagaatcgtcggggagatggcgcggatgagatgggcccgcccggaggaatgcccgtcgcctgcatgcacgcgggagagttaacgttttggcctatcgggtttttctgtgaatagcgtccaggatgttccactgaggggacacgcaggaccatcgatatttgatcaaacggatatggatcaacctgatgtaggcacacggaggaccatccagatacgattgaatgggtgtgatcaacttgatgacgtggagcaaccacagtgcaggaaattagtaagtggggataatttgtatagatatataggatttcaggcgaacatggggtgatgagccacaacctatacatggcctctaaggccaaataaacgtacatatcttaattagtgctagctcttgaatatggagaaattatgtgattaattaagaccttctaattatctgacaatgagtactatatcatgcaatttaatgcaactattttaaacacaagacatagcttcaggctttcagccaacgaggttttaccttatccctgttttatttttgtcatttcagctcagtacacagattagagatgtagaatcagccaagtacaagtggtccaatacttttatgtgttcatttgttagaattaatgaatcttttttggtatcataaaggcagcgagagatatatatgagaacagatgacatgtatatatatatctcacagtttgcttcttttgttctaggttttagtttcgccattaattctcacaaaccaacatgtgtttcttttatttttttggactcatgcagtcatgctggatgtaggtttgggaagcattgggagattggtacgtgccatcttggctcgagtgatgccaccactccgcgacgactactcctgtagatagtgctgaaatcggagggattgattgtacgattgcacaccaataagtaagccaaccagagggggtaattcgttgtagtactccaaaaccaaaacttatagatgaattaaaagattcccttgaatcgatgaagatcggtctgaccggagttgatgcaggtctgaccacctagaagccaccagtctaactggtgtagtagctccggtttgatcgtcaatcaccggtctaaccgccgttcactcgccgaaacctaagtaaacacaaatcgaaattctcccaaagtagattgaactttattgtttctattcgtgtttataaaatgcaacaacaacaatacggctgtcatttttttttctaaagtaaaatatcattggcagtgcgaacaaatatgaaagtacatctgaagcaaaattcaacgatactatttttatatcactaaattttatattgttaagctaattgctagttaaaattatttgaaatgaattgcatgctgtttgggtcaccttttattaccaacactttggaccaccatttattacctagtgcaaagtgaaaatactgtgcaaattattgtggtctaaagtaaaaaattggtgataaaattttgtaataaatggtgaaccaaattgtagttcactctgaaatttatagactttgactcttgaaattgcgtgggcaccttgtattttctagtggaaggagtagtattatagttctttttttttgaaatttccccaaaatttctttattatttcaaatttgaattggatcgaaataatttcgatttgctagcggaatatattcctagaaaggccaggtatcacggctcaccgtggaaaccggtcggtatttaccgaaatggtgatccttgactatttatgaaaactattatttgcagttctactgacacattacacatggcctctcaaaaaaggaggacatattacacacatgacaatcgatgcataggttcatatgtaccttcacatatgccatggtcttatagtactgaacaaaatagtatttgaacacagatagctataacataacgtggtctagaaattacaaaagatgaacaaagattatctcaatatcttgtctatcacaaatttctttgaagcaacaggtttgggaggtatcaggaactagtgcatctgagctagagagatcagagaacattcttgccctccaattcttgcggttcttggcactctgctcacactggaaacaactgtcaccgcgcattcatgatcactgacgtgaaagaggaaaggattgcacggctaagtgagaagatccaccgatgaaaagacttgcgtgttttcgactcatccatcggcattggagctacaaagagtaagcttgatggcaaacgtagcaacagccaggacataattaatttagatggagttgttcagaacatggttcagaacttcagattgcccacttgacattggtaccatggatccctcccaaaatggtttattatcaatttaattttctcctcatttggttgaaatttgttggaaactcattcaaagttcaaaatcgagtgagatatcaacatcacgtatggacttaaatttcaaaaactgatattgtgaacctggtatagagttgactcaatggatatagtcaatgtgagagaagcatgaaataattctctcttggatagtctctatatctctctatttgtgctatgtatgtagtagtattttctcaataaataactgtaaaatcaatcataagcaacactttaaaatatcctatatatattgttatcacaatttttttgctattaccaattgaagtaaaacttctcgtccataggttaattttttctgatggatctatcatggcatgactaatgcgagccacagagctactaaccaataatttcatccctctggcacatgcacatgccacttatagataaaaaagaagaacatataattaatttgcaaaaaagatatcttgtacattagtgcatatacatttaataactggttgctaacatacataacttggtccataaattggccttgcaaaattgcacccattgttgacttaaaccgggagacgtttatccaactgggagaaggccttgctacgtctcaaaagctagctaaagaggtgagcgacttcctccacttttaacctgattcaattcttcataaactattaatgtaggactattcccgacaccactaataagtactagctagtagttgtatttttaccgtctagaacacacaatggaagcatgatgaagatcattggtgaaggatctatcagggataaagctcttgacagatattctttcaaaaaaaaaaagctcttcacagataaactgcacgcatcaccaattcactaatgtttccgaactctgaaacagtaggattggaaggcgctgggaactgctgcatggacctcatcagttcatcagggcatccttggcttcttctgtcccccaaatttccagttgaagggcgaagaacctacaagaaaatctctggacgatagcttcaggtcccgtcctgccaatctgcatgcatctctgattctttaccagaacgcgtatgttttgaccatccaaagttcctatgcatttgatgtgtttttgaggacagtcatgaatatgaacatgcatgtaaagtgcaaagcatgtcctaatgtagtaacatcatgaacacatgaaatttagcaaatcaggttgtcaatttttggctgccttgaataaaattattatatctagtgcaccgctacaatgatggcgtgtgcacctgttgttccctgtttttggagggccgttatcgtggttcgtattgctatagtgtggatgaaaatcacttgtggttgtagctcgctatggcataatatttttatatttttaattagattaattttatcatcttgatgtattgtctgagatataaaactttctttatcttaaaaaaatatacactgttctgcaggtttaataagctacttttcaaaaagagctatgcagatccagtgatcaactggtattaacaatttgtaaccacaataatgtacatagcttaattagtgctcttgaatattgagaaatgatgtgactaattaagataccttcttactttatatatatgacaaggagtgctatatcgtgaaattgaatgcaactattttcagacaatttcatgatatggtttgtacgcaaggcgtagcttcagactttcggtcaatgaggttatgccttatcccaattttcattttacactctagcatacaaagtagagatgctgaatcagcctagtacaagtggtccaatacttttatgtgctcatttgctagaatgaatctttttggttggtgatcataaacatagagagaggccaatatatatgagcacgcatgtgtatccactgtttgcttatttgttctatgtttcaatttctccaccatcagaaaccaacacatctggttcttctatcttttggactcatgacgtatgtaggtctaggatgcattgggagattggtatgtgcagtttaggatgtcgactgatgccgacactccgtgacaactactcccattgatagtggaagtcagaggcacaattttaaggaattctatcagataataggatcaactgcattgaagcagaactcaagaacatgcttactctttaattggatcatatatatcttttgtagatagtgtatgctgtggttgtaactattctattttttttttggccttgtggtccttgactttcactcactcactagctgtatcggttgataaagaacacaaaatagtagctaaccaaagatgcaccgtatcactccttggccattgcgcatgcacatgtagacaactagaccttttaggtaagatcaatacaagtacttttatagtactctgaagtcactacaaccaactctagatctgtttcctttatccacaaggtcttaacacctgagaacctacttatccgacattggtcgtgcaattgatatgttccctttgctaaaatctttcgaagacatgaataatctttttagggactgcgcctactctagaagagtctgggatttggtttcataaaaaaaaatccatctaccacgctgaggcagactcctctataaagaactcgatattcaaactaatctcgtcaagaccatcacagcaagcaaaaagaagtcttggagctctactcgcttcctggtgcaacatctagctagagaggaatagaaggactttccatggtgcaaattgcgatgagatggaaatagtcggccacattttagaggacttagaccaatgagctttagcttttaaacctccgtaaaagcggtgttattttccccatgtaacctctcaaaagttgtaacctcctctattctcccttttcccagaaccttttgtacttctgaacttttacttctcaatatatccggcagagctcctgccgtcgtcaatttcaaaagaaaaaaaaatattgagcactaaatccctttaggtccaccgaatcaaaattaggaaatacaaagctgccgcaaaagctggatagaggcaaataatttctattttgaatggtagaagtagaggattcataattgataaacggagatgtgaactgtgttagctcaaaaacatatccctaagatatagtaacgaaacatagatgatcatcttacaggtgaaaatcatctagaacttaatgtctttagtgctctactttctacccaatgtgacataagtgtcgcatgcatgcctaaatcatcctgcacctgcatagtgtcctgaaacaccaatcaggtttgtagatattatgaatcttaagcaattctcatcactataaaaacgtgaacctacatttcttcaaagaatcagatgaacacctactctcttgattctttaatagaacaatacaatttctaatggtaaggtaataatatatcctagtttgtctgatccataaattggctgcggctcaatggctcccctagtattagctctgtacacgtttacgcacacgttgtaaggataaggaagatcatttgatgaaggatcaacgatgaagttcttcgcagatgaactatcaccaattccctgatccgtcttaaaccataggcttgggaggcaccaggaaatactccatctgcttgacaaatagctcgtgtttttcttggctcattctatcatggtagttactctccatcggagaagaacctgcacgaaaatcttcagatgatccaccgagtgcgaaaactgattgccatagtgttcatggcaaccgctcatttggcgaaattgtatctgtgattcttcacctgtgcatttcacgcatgtggtgaatttcaatgtgcttacgtttttatgttgttccaatatttttcttctcacactccatacacaaagatgaacatttctagttgctgcagagatatacttccattggctaaaaacaaattatacttagtttgcacccctagacatgcattcaaggtcatttctagttgatgcagagactaggggatatacttccatttgctaaaaataaattatatttagttgcaccctagacattcaagtccagctagagccataacttggtccataaattgcccatagcccaattctgccccttgtatttattgtgcctttacgttttggagcagggagccctgaaacaacactcaggtatagcaccatttttttacaaatcggtccttttggaaaacttatttcagaactagaccctgctaaaatacttcaaccataaataggccacgctggcgcggaggttagatggatcagcaccagggacgttggcgctgaccccatgctaatgcggcggctgagccgattccctcaccagcgtggcagggctcaacgccaattactctaatgctgagctcttggacttagccactcgcgacggggccgccaaacatagctcctgtgttgagtggtgtcacaccctgaagttctcctcctaagcctaaaattgaatttataaatcaccctaagaaaatgccggtgcaaatcaagagaaaaccttaataaattaatgcaaataataataggaattggcatgtggaatttttcttgagttctacatgtcgaaatacgctaacaagatttttagtggaattttcagagctctcaaaataattttaaccaattaaaattgagcacatgcaattttaatcccaggaaaaatcctttttccttctttttcctttttctttcttttcttttctctttttcctttgaatgggccgccggcccattcctcctttttctccccctcctcccgctgggccggccgaaggccaaggcccagctaggccgcgcgggccggtcggccgcctcctctcacccgggtcgccgacaggtggggcccacctatcggacccgtctcccacctcgcgccgcgccgccgcgcccacgcctccgcctcctccgggccacatcggccacgcccgcgcatgcgccgcaccttccgcgcccactcccctctctctcccacccgcgcctgcgcccgagatggccgggattcgattttcgaatcccgcctctctctcctcccccactccccgcgttggccggcggaatcctgcccctaccggccacatccgggattcccctcccctatttaagctccgccgtcgccccctctctctttttccccatttcgccgaactccctcgtgccccccatcgctcccgcgccgtgcaaccacccgccgccgccgcttccgttactccggtcgccgctagccgccgctagggtcgccgccgcaccgcgccgtcgctgccgtcgggttcgcgaggccaaactccacctcgtccgccccttccccgtcgggattcgtcgccggaattcgcatcccctcgcgctccggtgagttctacctctaccgccgccttcggccatggatgccggccgccgtggttcatctccctctctctaatctctctctcctccttccttagggcaccccgaagcccgtccgccggttgccgtcgtcctcccgtggctcgccgtcgccgttcgccgtcgtcttcctccgcgccggccactctcggtgaggcatccctctctcctctattcccctccctctccttcctagccgccgcttagcgccgccgccttcacgtcgcctttgcgccgccgcctccgccgccggttgccgtcgccggcaacgcgtgcgcgcgcgccgtcgccatcgccgtggccggtcggccggccttgagccgagccgagccgggtcgccgccgcccgtccgatcagccccgggggcgatctgggccgtcggtcccgtggaccggcggtggaccacccgcgtggtcccggtccacggtggaccgcccccccttgagccgctgccgagtggggcccgcgtgccggcgccccttttccctctctcccgagccgctgaccggtgggccccgcatgtcggcgccgcgccccccttgatgacgtcagctctgggaattattgcgcaataaattatttaaggactttctgttatagtaataaacatagtgaatcttctaaaattcataactaattcatccgagctccgtttaagcccattcaagtctcagtaaatcaagaaaaatgcgtagaatccattaaaaatggttttgttctctgtttcagtagtcttatagcctgtttgtattgtttgctttgtatgtcgcctagattccggttcttccgacgctccggtgtacttcgagatagtcgccgaggttcttccagcagcagagcaaggcaagtcatgcctgtcacttgaacatgttgatcctatattgcaaatgctctattgtttttcttcaaatactgcatcgttttataatgttactatgggatgtttacctattgttacagccatgctattttggtaccctgctcctttgttagctcgggttataacatgaatagacgttggactaggagttgcttagccatgcttagttcaactagcacacaatgggaaaatctcatttaaaatatagactgtaggttcatatgataatgttggtttagtaccaccgctttggtgttggttaattaaaatgaatcacatagagggctatggatgcatggttttgcttgttgcacccatagcaattaaggaccgattcgcgggaaaccctggaagaatttatcgtgcttaccacaagccagcgtgggcaacggctgggcttgtagtgtagcttttctctagctgacgcatccaggcaagggtgggcgtgatggagtttggataggtcctgcgacggcctatgcggcttccggattcacgtaggcacgagaggggactgcccgtcgcccgctggggacgggggtgaaacctgaggtgtggtgtgcttggctagagggggttatgcgaagggtcctgtcacggcctctttccggtatgtcgtggtggcatgtcggcgcacggaaacgtgtcgtggggctgtgtcttgtgggtacagttgtacacctctgatcagagtaaaactattcgaatagccgtgcccgcggttatgggcggtcaaccagattcaccgtgattagtctcaccctagtttagtcttttgaaattggatagtataggtggatggttgggcctgtcgcaacgtggtatagcgttggacagtggatgattaatattgattaattattacgactgttttcttctttaaaacttctatttataaatgctcgctttatgcaaatgaaccactctagctctcctttgataattccctgcatcatacccctattccggtatgacttgctgagtacagtgggtagtactcagtcttgctctattttccccaaccccagagttcgagtgtgtgtcagatggaggtttctccgaggagtaggcttcgtccgtgccgtcgaggatgcctgtggagtggtgttcccgttgcagttctagtcaaggcttaggtcctgttgtctttcgtttttccactgcttttatgtaagacttttatgatgtttgtaagacgtggatctgaatgtcaacattgtcgtttgtgtaccccggccggtcctggacggggattttaatgcacattctgcttggaattctatttgggaatttctgggcgtgacaagtggctcggaggcgatgggtgttaagccactaatctccatgccaattactctgacgctaagccctaggagttagccgctcatgaccgggccgcccaacacaactcctgtgttaaggcagcccggaggcgctgagcccgcaaacctccacgccagcgtaattggtgctcaccctaaagacctcggcgcaagctaacttggcactgagatttgggacttagcagctcgcccgcccaacacagctcctgtgttggactttgtcttgagggttcagcgccaatacacgtgttgctgaggggaatcggctcggccgccatgtggacaggggggttagcgccatcgtgcttggcgctgaccaacgcggttggcgctgagcccacgacctatttatggttataatttgcaaggtctagtttgaaaataagttttccaaaagggtctatttgtaaaaaaagagggtatagagcactataaaaaagtgaacctacacttctcaaaaggatccgatgaacactacattctctcgattcttcagcattacaatttccaatatatgctaaggtatcatcctagtttgccttgtccataattaaattgggcatggctcaattgtgcccatagtattagttttaaacgtttatgctctagagcacataatgaaaggataaggaagatctatgaagaatcaccacatgtacatcacaattcgccaatatatatattctatctgaaatcgtaggcttggggtgcgttggaaactactccatcagtttgaagagagaaaaggggtattcttggctcgttctgtcctggaagcctgctttggatgggagaagagcctgcatggaaatttccccgagatggatcgactgcaaaaactggctgccatactgatcatatggacatagaatcgcttcaggtcatggtcgagtaatatgcatcttcgatatgttatgtaccttgtcaaccttgtgcatttcttgcatttgggatcatcgaatgtccaatatatgcatcgattgatcttccaatgatattcggtacgcttccgataaagttaatcacagccatcattaggatgttcgtctcgccccattggacatccagagagttcggggctgtgatcatctcttaattggcagaacacttacagggtttacaatttcgaaatggggatttttgctggggcctccgaaattaccgaagtttcgggaattttggtacttttttttgctgaaattatatgaaaatttgacaaattttgaatgaatttgaataaactttgaccaaattcataaaaaattggaaaaaaaacgaatgttcagtaaacaatttaatttgcatcatgaacaaatgcatgtattaaagtggaaattgcagaccacaacctgctgctgttacatggatcatcaattcttgatatccacaattaaagatggccatgcttatcattaattgttggtaaaatacatagaccaaatgatatacttccattatctaaaaataaatcacacttcattaatttgcaccctagacataaaggtcagagagatacaaccttgtccataaatcaacaatggtcagattgtgtccctcgtagtactagtagtagataatttttacttcttggataattaaggaagattataggactaaggaatcattgttgagctgtatgtgcatcaccaattcatcacaagtctgtctgaaatcgtaggcttgggaggccctgggaactcctgcatgagccacagcagtagtatgaagaattcttggctcctcctgtcctgactgaacctcctgccacgcacaagaatctacaagaaaatttccagaaaacaccatggatgcaaacaatggtttgtataatgtgcaacattaaccccctgaaggcttcatcagtcgatttccagatgactaggtagccatcggctcctgcctatttcagggtgacagttgttcctgtgcatccaatgtgcatgcatgtcctgcgacagttgttctgtatatgtgatacactgctacatatgcgtttacgagtgcaaagcacaacttggtgtagttacttacatcatgaacatgcaatttggaaaaacagggtttgacaatttggctgccttgttgaacttagttttctagggctctcgttcctcttactccctccgtctcaaacatactttgatcattaatttatttcatattatgctatcaaacaactataaaattaatatcacacaaaagtatttaaaatacaaatcaagtgatataaaatatataatacttagcatagatattgctagtataattattagtcaaaatttactttcctagaaacaagggcaccctgtaatttgggggcggatggagtaaataacaattaacctgatgggtcaatcatagcatgcatataatgctagccacagagctactaacacattattacacgtgccaatcacacgaataggtgaaagaaaaacatataatttattttcacaaaaaagaaacatatacataattaatagcagctaaggcacatatataacttggtccataaattggcctttgcccaattgtgtccctgactagtagttgtacgtttatgctctagagcacacaatgcaaatacaatgaagatcttctcaggaaggaccatagatgaaactcttcacagataaactgcacccaattcatcagtcaaattaaaattaatcgtagtcttgaaaggcaccggggactgctgcatgggcctgaaaaatgcatctaggtattcttgcttccttctgtcctgtctagttccagaccaaagggagaagaaccagaaaatctccagatgaagaacctgatttagaaactagttgccaaagtgcggatggcgaaagcttctgccccagttctgcgccaacctgcatctccgattctgcagatttctttttctttttttttttgaggtgaacgacggcaagagctctgccggaatttcattagagtagagaaaaacagttcagagaatacaggggaagacatcgaaggaaaagaagggagaaaccggaaaaaaacaaagggaatccgaaaaagaaaagacaattaggggggttggaaagcagtgtgtctgagatcaaattcctcctttactattctcgcaacgcgatcctctgtgtaagagatgttttgaaaaattcttctgtttctttccaaccaaacgttccaccaagtggcgagaagagatcctttaaccctgaatttgaaaggtttggggtgtagttgattgagatcagcccaccaagctgcgttgtcatctgcaggctgtgcccccgagatgttttgccattggcacaccataagccaaacttttctgaagaaggggcaaacatttaagagatggttagtgtcttcaaacgcctctccacacaggctacaaatccaattgcaaggccagtgccggcgcaaaagattttgggccgtgagagttttttggtgaaggattagccatccaaagaagcgcatctttggttcagctgggcacctccaaatggaatgaaaatgaatcgaagagaaggacccttggaattgaaataaataagcactgtttgcagagtaggatcccgattcattcaggttccaaatgatgctgtcattggtttgcggcagaagctgaacattttgcagcaatatcccaagctagacaagatcgttgatttcttcaattgtagtcatttgccgaaaggaaaggagccaagaattgtttgtcaattccgttttaaccgatctctgtttgcgcttagctaggttgaaacacaagggtgcaatgtcttttggacatgcattttgcagccacttatcatgccaaaaatttattttttctccattacccacagttatcgtagtggcagcttgatagagtcttttgtcgcagtcatcgcaaggtaaatccattccaacccaaggcttgttgtcctctttccatttgaaccagagccatttgaaccagagcgcgagaaaatttctcaaggtctgtgtaacaccctgaaaattcgaccgacaaaatcaaaactctaaaaatacggattttcaaaaactttttaaactaattgcatcatgccgatcttattcgtctattttatctggatttgatctcgaagattattaatcgtgagtaaagaatagttaattaggaataaaccttaaaaacaaattggtaaaataaatacaaattaaaataaaggttaggtgggggtagaaataaataaaatattatcgcgaccatatttggattaattaaatttaaatgcgatggaataagaattaaccctaattaaaactcaaataaattatataaaaataaaatatgagtaatattaatctaggataaattcattagttaagatggcacaaatattgagtatacttcatttatgcaaaatttgggaattatagaatcaaatttaaataataaatgggccaaaaatcgggaaaaataggaaactacactgttcattagcctctaggtgctcgacatggtccccctagccccgccccctcccgtgccgcacgcgccgcccacccgcgcgccgcccgctcgcgagccgctcgcccgcgccccgctcgcccgccgcgccg

SEQ ID NO: 8743 - DNA, 83247 bp, Oryza sativa
  unsure (1)..(83247): unsure at all n locations
gattgggggtagttcagtggcatttctgtgtaaataagttaaaaaattaaagggtagtgggtcttttggggtggagtggagctgtggagcagcaaaaacccagctccacccccgtagttcattttgtaggagtagctctgctaactccgctcccaaaaatagaggatctagactgtttggcacagctcgactctaggtaagtttgttgggagctggagctgtgccaaacggggccttacttgccgtaattactctagtgggcattgcagtataactatcatcgatgcaacatctaaactctttcgtacttgtatttttggcaggaagcggctgcaattgctgcagcagaggtggcattcatcctgcaatcagcccaaggccatgcccttcagttcaccatcgctccagactcccccgccactccacagcatgagccacagcagcagcagccgcagccgcagccgcagcaatagctagttacttcagtagcgtctctcaactactgactcgcacatgcagaagaagaggatacctcagctagtggccgctttgttgtttcctgttgcaactggcccagggacgctaagaacctggcctcgccttgtgtggccgggtagaaaccttgtaaaacgccagagattcatttgttgcaagcgaccgcagcttaagccccgctacccttcgatttgtctctgtgtaactcaagcattgatttattgtaaatttgtcgtctgttggagtccatttttttagttcctttgccaagtgttttactgccatgtacagtattattacatgggagcttttatctttcaaagaattaatctgagtgagtgtgaaactgttaggctacgtttgctgagaggttaagcccctgtttgggatgcttctggcttctgcccccccgaccgaatctagcttctcagcccaaagtggatctctctcccgaacaagataatcaggttacatgacctaaaggcgggtttggggaactcagatcctgcatttggcagctagtatggtcattatgttgctgttgtgctaaattaggacgcatcagttgttacttggtgctcgtttaacttattccataattttgaaatgttttcatcggttaaattaatcctctttggctggtaataaactaccctcattttctaatttttcctaatcagatgggtatgattgtagtatctatttgctaaattaaattagacaagtttgatatggttgtagtcacagctatggcaagattcttttctaacaaactagattccacacgttattgactaacaaaacgtgataagattttcttatacttactaaggtgtgacaatatttatgggtaaaagtgtgacgggaaccaactacatgcttactccatcccacaattcatttgttttaaagttgtctcgtttgtccagaaacaagttcgttcttagcaatcggagtttgtgaaattaagaaataatatgtatcgaaagtagaaaaggtggaaaatgattatattaggatttgacagagcagtggcattctagctttttttattgttatgtataggatatatggaaaataaacttttttttcaagacaaaaggagtactttctacatacttcatcagtcccataaaaaactatttttatgaaaccaaggaatgtgatatatcatagtaatatgaatttagatattgtctagatttttggtattaagatatctcatatcttgtatttttatttgtttatatagaagaaaatagtactccctccattccataaaaaactaaataaaataggatacgacgttctctattacaacaaatagactctagctgtgtttagttcctttcaaacttctaaaaattccatcatatcaaatgtttggacacatgcatgtagcattaaatttggactaaaaaacaattgcacagtttgcttgcaaattgcgagaggaatcttttgagcctcgtcatgatttgacaatgtagtgctatagtaaacatttgctaatgacgaattaattaagcttaatagattcgtctcgtagtttaccggtgaaatctgtaatttatttgttattagtctacgtttaatactttaaatataaatatatgtttatatacttaaaaaaaatttgaaaagagctaaacacggtctcttctctatatagatttagtgtcctacagaacgtcgtttttttttatgggtggagagattgagagcaaaaggtagtcaacgtgtaagctacatcacacgctccaccctcgcgtctcgccacaagaatcgggtaggcaggaaaaagcggaccgtgaccgcggcagcagcagcaggaggcagggatcgggatctggggccccaaaagccgcacgtttcgccccccaccgacgtatctacgtgcttccccgtcgaccacccccatgggccgtggccctccgcatccgcatcgcgctttgcgctttgctctttgcgtgggccccgcaccacgtcaccccgtcgcatcgcggcagcccacgtggcagtccacgcccccaatcggccattgacgtctgggaatttgaagcctctcgagtctccactcggtgggtttagagcaagcttaatacggagtagtgtagtcagttactccctccgtatcataataatataaagaattttgagtttttctttcaatgtttgaacactcgtcttattcaaaagaatttaaaattattatttattttatttatgacttactttattatctacaatattttaagcataacttttcgttttttatatttccaaaaaaaatttgaataagacgagtggtcaaacgttgcaaataaaaactcaaaatcccttatattgtgggacggagggagtactaacttctaatttctagttaatctaataatcaattcatataatagttagctataaatatatattatatcattaataattagttccacatatcatacacacggtgttttgttttagagttcgtactgtagctggctacaaatatgtaacccgtttctgttctatctcctctcttatctcctccacgtaagtttatagccgacttattatttattattgtacgtactcttaaaactaaaagggagaatagctaatatggtccctaaagtttcgctcctggatcattttagttcttaatctttcatattgtaatatagtccttgatcccaccaaaatcaccacatggacatgccatgtcaccttcctatgcaaaatctatatgatttgtccaatttacccttacgcataggtaaataaaaaacaaaagaaaaaagttaaaaaaatatatatggtacatgtaagagcaaaaatatacctcaaaagggtgaaaaaagaagtatttttttcctatggttatgtctaattcactcttatatttatttttctatgatatatgtaagagtatattggacaattcattatagatttgcatgaatgatgacatggcatatccatatgatgattttggtgaacccaatgactattctaggccttatgacaaaggttaatgatttctttggaccatttaaaaggttagggactaaactgatcctacaaagaaacttagtgctattctcccaaactaaaaaaaagagtttagaaaaataacgagaatttgttagaccacctccgtggccgctcttctcgcgcgtgcggcatgggtggctgccagtgccgcggggtcacgtcgcgtcgctctcaatcccgagatcgcggcgggttcggcttggcgattggagaagaagaaaagaaatggcgccgggtgcgtggaatatttacggctgagtccctggtttgtttcatattgttaaccgtgacctttggctaatactagtttttttctttctttctttgtttcgagttctcttgctcaggagtgggcataaaaaaaaaccaagctgaaagaccaaatcgaaaagacctgaccaagaccgagaaattcaatcctagatagtgaaagacggaattttattcggtttgtctccccagctaaccgaatagaccgaattaacatgaaaatgctcaatgcaaactacaatccactaagttcaataggattaaactctaatttttcatattcctactctttctaggcatgcaaccccataagagtctttattcagacgtgcttgtgaatttcttttttgtgatttttgtgttgaaagatgctatgatttttttccatgtatgaaactgctcctgaatttcgggtaggaatgagaccgaatttgctagttttgatattttttgcgttgaaatttggtcttcactttttaatgaccgataatgaccgaatagactgaaagaccaagacctaaattttcggtctgaccaaatacccacccttactcttgcgtggattcaggtggacaacttcgcattgcagcaaccgtattcaagctcttgtgccaaagaatttcgatggaaaaaacaccaactctatggatatagtttcggtgaaaaatctagaataacatcgtctaatcctaatcttggtgaaatcttgttcctgccttctcacctttttatatttaagggtttactcgcttccttacagttccgaaccatttcaaattttggtaataccaaaatttggtgagacaatgaactataaacatgtcactgccaacataatcctgttaatttttggtaattatgaaacttctactctcaaaactacttttggccaatgctcccacccttttgtctaatgctcaaacatatatttttgtggggaggattaattcctccatagagttgccttagttgaatatatattgcctcattaattggtcattgatgaggtggcatttaggcagatgaaaacaaaaaagggaaaggatgaaaaccccaatttccagccaatgaatgctcttgctggacgccccacttaattatgaggagtgacgaaacactgcaagctgatctttgtttcctgattgatccatatccaatggcgctggagtcgattccgcttgtgtatccatccatttgactcccaaacaaaaaatagatagatcaactccacttgtgtatccatccatttggcttccaaacaaaagatagatcggtgtagacgtgactaagctcgacaatgatgacacgattgttgcgggatcaaagctttcgtgttgctttgtgataagctcggcaatgacaacctacgtttgggctctgtttattaccggtcatttggagggatgcatggtgtgtgcggaggtgggtgtgccgcgtttgttcagacagccatgagattgaccatactttgctttgtcgagttgtttatttttttttcttgtaacccatcggaattttactgttttggtttgtctactatataaaaacctctttcctctcataaaaaccatccaccctcaaaaattcatttctaaaaaaaagattgtaaaaaaaaaagaaaaccaaacagcctactagatccaaatctcccactaaaccgaataaaaaaaacagttacactgctagttaaaaaaagaagaagaaagataaacaacggatctcccaaggtcttcaacgtaaaaccgccaaaccgggccccacaacaacgtcacaattccacatcccaccgtcactgacaccccggccccacccccagtcaaccacccctcccttccctcccccaaacaccacggaagacgaaacaaaccaaaaccaaaaccaaaccaaccaaccaacttgaaacctcccatctccgatccccacgtcgccatctccccctccctcctcctcctcctccgcctccttccccgccataaaacccaacccccaccaccactccatcgccaccaccaccaccgcgccaacccttcgccgccgccgccgacgaggacgacgacgacgatcgaaatggcctcctccaccaccgcctcctcccagctcgccctcgccctcggcatccccggcctcggcggcctcctcatccccaccgacgccgccgccaccaccaccaccaccgccgagggcaacgatctccacgccgacgcctcccaccccgtcctccgcctcgccggcgccgtccagcactacgagtggggcggccgtcgcgggtcctccctcgtcgcgcgcctcgccggcgagggcgatgatggtgatgagaggccgtacgcggagctgtggatggggacgcacccggcggcgccgtcgtcgctggcggcgtcgggggagtcgctgagggagtggctggggaggcgcggccccgccgcgctcctcggccgcgacgtggcggcgaggtggggcggcgacctcccgttcctcttcaaggtgctctcggtcgccagggcgctctccatccaggcccaccccgacgccgccctcgccagggcgctccacgcgctccgccccgccacgtaccgcgacgacaaccacaagcccgagatggccgtcgccgtcaccgacttccgcgccctctgcggcttcgtctccgtccaggttggttttccaccacccgcatttcgctgattaatcactagttctaattgcttcttgatgcactttgagatcgaatttttgatgataccattagttctgatgttgttgttgcgcatgaattttgttagtttggttggttgaaattgtttatgagatgttgccagcagatcccatggatgattcctaatgggtaggtgggtgtgaggggcggagttgacttatgtcgaaatcgaaatgtcaagtggggatctggctgctgatgaatttggcaacgaactaatgattaatgattaatgggatctgtaattatcgaacgggcaagtacttactgacagcccaacaacctgttaatccttcgctaaaatatcgtcatctataatagtagtatataatataccttcaaactttttattggtttcaagaaaatgcagagaagatgaggttagaatttcattttgtttttttttttagaaaatcacacgcctttcatgaggtactgtggtccagtgcttcacaaacagttgatgctgtccaagtatccagcaagctgcaatggattatcccccaacgccaaaggcatcattttattgttggccccatgtccatgtatagtgtagattctgtccaaatcacatccagcgatgcgtttacaagtatggctgcttaggtaggtgggagccgtttcgtggacagcaattggaagtatggcttgcttactagcttaggtaggcagcaggcatttcgtggacagaaaaaaagggtgttgttcaacagccgtagccaactgcttattattctgaacctcatatgttgcagtaatatttccctatttgaattgcatatgcatcaccgatggacaaataaacaagggggggggggtaatatgctcatatttggttcttgtacaatgtttactctgaaattcagattctggttggttagcatgtgacttaagtaattctagatgtacaatgtgtactctgaaattcagattctggttggtcaccatgtgacttaagtaattctagatgcactccagcttcattgactggtgtttggctagatgtatcacatctttattgaccgatatttagctagacgcaatgtgtgactagtttcagagtaggaaacaaggtataatgaagtatatagaatacactttcaatataattcttttgtttaaatccttccaatttttcggaaaatagattacaaatgctatagaatctcattgttaacaatatgggctacatagtaccttggagcttttaggactctaagcattgattacctgtaaaattaagtactgacctattatactgcaacccaggagctcaaggatgtcttgaggactgtacctgaggttcgagagttagttggcaaagaagaggctgtgaagcttatgggtgccaaagagcatgatggaggcatcggagtaaggtcatatctgcaatcagcttttactaatttaatgacagcaagcaaagaaacagtttctgaagcagtctcaaagctaaagagtcggctgaatattgagagtaaggtaaactattctcttaattattcttgacagatgtattatttatttcacttgcctataatctgtgtcagctgggatgtcaatatcagtttgttccttcgtcgtacgctacgttttgcaaaatgtttgagcttctatctgtcttcttgttcatttctaaatgacaaaggaagactttttaggaaaagcatagttgttgctgtccaacttttttttttttgggaatattgctgtccaactttagtgccatataatccaattgtgtggttaagatggagtgtgatttgacctcatgtacttggggctacaagacattgtgtgtgggatactacctcttgaactcataggctttgcagcaccttgtatgacagattctggtagcattgggctggtttaatttacaacatggtgaaatgagggtcttaaataataaaaaaaagtaaggcaatggttctgattgtgagctacctcacatttctgctttctgaaacccagttcctagctctgtattcagaatttcagatatggcagcctcatatctgaggtaggatcagcagttcagcaacatgttacatgcttacacaaagatattgccaaacctgatattcctttttgaggagattcaagcctgatattctgcaattgaactgttttgctgttaatgttcttttcaggttagaaccttgacaaagaaggagcagctagtgttgtcactggagatgcagtaccctgaagatgttggtgttttagcagcattcttctttaactatgtcaagctcaaccccggtgaagcactctatattggtgctaatgaaccacatgcatatctttcgggagagtgcgtcgaatgtatggccacatctgacaatgtagttcgtgctggtctgacccctaaatacagagacgtccaaactctttgctcgatgctgacatacaagcaggtttgtttatctgatttcttatttatataagcatcacctatattctgttgatattcgctgttatctgattatcgtctattgacaattagtgtttctaactcttctgatgctacactaatcaagtaatcatcattgattatgttactactactggtatggtagaattgcttgctcacttcataattaagaaaggcgtatggtactactactgttatggaaaaactgcttgttcacttagtgattaaacaaggcatatgtttctagaattgcttgttcacttcaaaattaagcaaggaaaatacttccttcaaacatgtggagcttgattacacgaacaaactcagccagaatgttcaaatatactccagaaaatcttgtgctctttattccgtattgtaatataacttacgatcttccttatgcagaactacccggagattctgcgaggagttccagtgcaagcatatgtaacgcgctacatacccccatctgaggagtttgaagtcgatcgctgcctgctgccctccggtgaatcggtcaccatgtcaccggtgcctggcccatccatcttccttgtcatgacaggggaaggcaagattgaggcagattccatgcttgatgaaggaaaggcaaaggaaggcgatgttttcttcgtgccggcgcacaccgaggtcaggatccttgcttctggtcctgggagcatgcagctttacagggctggggtgaacagcagattcttcagctgacttcaataacaccgcaaatcttcagggattaaaggttattgcgagagtaattggtaggaaaacgggtgtcttactgtcgtcctttcattttatcataaggtagctagttaagccatcatagtgtataggcaaatggagataaagtctctctctttcatacccttaatcctgtttatttttttccccaatatgtaatttacatttttcagtacgctggaagcaaatgaaatctgtagatgagcttctagtttcgattattcattcatcatgtacatgcgaaaattgaagtttgctttggatatagaataactaatatgattccttcgatccttggctagcggcagaatattattgttcgtgattacatgcgaaagggatggtgttggactgttgagaggaatggctagctgcagagcctctgcctaaaacgagagatgattgaacaacattagctataaaagaactgcaaccttagctattccagtcatactaactttagacgtagattatcaccggaattatgactcttattataaaagcaattgattaagatgttgagttagctgggaatacatattctttcttgattcttgaattaaatttctgatgactgaaatttctgctgttttttatgagtagaaatgctacctttcatcaaaaaattttttaaaaaaattgattgccttaatgtttttattttatatagttttcctcaaaaaattaagaattgattgatttaatgtttttatgagtagaaatgctgcttttcataaaaaaaattttaaaaaatgattgccttaatgttttttattttatatagttttcctcaaaaattaagaattgattgacttaatgtttttatattatatagttttcaatacttctaacttagaattgatgaggagtaaaatgaaaaatgtttctgctcttcataaaaaaatttgatttactcaatgtttttatattatactcccttcgtctaaaaaaaccaacctacataaggatgagacactacatagtacaatgaatctgaagctagtgtcccatcgttttctaggttgatttttttttagacggatggggtatagttttccgtactagtatattatatagttttccatactagtatcttagttatatagaaagtgaagaggcaaagtatggtaggagtttataatagatagcgagaatgtacattacgttagctttttatatcaaacacatatttgtgttttaatatatattttttcaatcatattgaatatatttgtgttttattagagtgagggacaatacttccctatttcgattatggataaagatagccaaatatataatcatttgactgcaatatgtgtgtgtgactactagaatttagaaactagcacttgcttgtgagctagcaaccttagattaaagtgtgagtaatttgtgttgttgtagaagcggacacaacaacatgatatgattggcttacatatggacatccaaataatttcgaataaagaagttttgagtatatatatacatcaggtaattaaattatagttgggactaaatagttgaattccatctaaaatacatatgttagctcatgtacggactagacctatgactagcaaactttagaacaactaggagtatttgtatttgagatgtctatttaacctcccaaacctttcactttgtttaaaaatacacctccgaactccaaaatcatatactccctatttctttgttaacagtgaaatttggtaagcccggagttgtcatcggcttagagtcagcatcggcttcgaagtcctgggattagccgatgagagttgtcaagtcgtcagttatcggattcttgctatattcggttaaggaaattgatctactaaaggaagcttatccagaatagaccgagttcaaagagaatgcggcatgacaagttatctattaattagaatactttgttagtttttagttgttggatttttgctatattcggttaaggaaattgatctactaaaggaagcttatccagaagagaccgagttcaaagagaatgtggcatgacaagttatctattaatcaggaatagtttgttagtttccttttatctttagaaaagtgtgtttagtgtcctataaggactttatctttccttttatctttaggaaagtttctttcttatccgacaaggacttgtatcaacccatgggtataaatatgtacacccggggtctatgtaatctatcttcacgatcaatacaattcggcgcatcgccaccttttgccttttctactttattttatcgtccgacgggacttggcacctgacgcggggctgcatcggtgttcgatctccggctaaggggtaagtccaatgttctgccagcccgggcaattgtatcgtttacgtcggcgtcgttcaaggctgcatcagtacattcgacctcttggattgctctggtttgaatgatatatttgcctacctatttatcatatatctctgttaatctagtcttagcatatcaatttagctctatcggctgcctctcgttttagggtttctgtcggtatcggctaaatcgcattgctagaatagattagcttagacatctaccatcctgaaaactcagtcaacggcttgattgtctagatattatgtttcttttcatacttagtgctgcatcagttaagtttgatctactaagttgtgcttagaaccataatctccagcctgcttcttgattgccaataagggtttcatcggggtttcagccggtgagttatctggacgttgcatcggctcataaggattgcatatacatataagttggatttagccgatgacaacaaaggtttcactgtttaatctaatcctgtggatttcatgacatcggatctccagccgatgtgtgctttaactttcggatcgatgcttatttatcatatcattatttgccaattggtttatactagattatattgttattttattacatcatcatcagccgattgcctttatatcattatctacattggacatatagccgattgcttaaaccctatagctatcggtatcggctatcggctggaactactccatcggcttgtcagccgatcgactgttttgatctactatttgcatatcttgtcagttgcagcatcaaactgactggcacgcccgcatctcaccaatctttggacctgcacaggagctaagcagatctcccaggccggtgtgttcgatttttttgtcaacattcttaaaatataataacttttacctatgaatctgaacaagtgcatgtttcaccggtggagaacccatctttacatacggttcgcaacatcttgtagttccagttatgtaaccgagactacaaatccgggactaaagatgtccatagtcccgggtggaataactgagactaaagatctttagtcccgtttggtaacaccaaccgggactaaagatggtagcgccacgtgctgacactatcctaaacacttttttctttctttttctccattgttttttaccgtttgcatattgatttcgtactgaactcagcaacaaaatcatccacaatcacaaaaatatcacaatatcatccataaattcgcatacatcttaaatttatatatccaaatacatcacaaaccaacaaattcgtatcacagatcaacatcaaaaacatcacaaatcaagaaattcatccacacaacaaatttctcagccgagccaggcgccgctgtcgctgccgccgtgccaccgcggaggggagggtgccgcacgggccgtgccgccgcgtggcccgcgtcgccgcggaggggaggagagggcgccgggtgggccgccgcgccgccgcaaaggggagggcgccgcccgtcggcaccgcggaggggaaggcgccgcctgccggcgccgtggaggggagggcgcgcgccgcagacgatggagatggggaggggagaagagggaggagagggggaggaggaggagataaggaggatacaggagggtgaagaagatagagagatagaattgaagaagataaggatgagggagagaaagagataaagaattttcggctctctcccccgtgaatttttatctctgtacctcccacgcacgttttttactgctcgcgcgctttttttaatatttagtcctggttggtataaacaatcgggactaaagatattggggggcctgtcacggcctgacaatgaatgaaccaggactaaagatcatatattcccgttacacttcaaaccgggactaaaacatgctttttagtggtaactctagaaaaccatctaattaggaaaagaatataaaaaaaccccaaaatgctgtctacttaaaaatgtggctgaactttcatttttttatcccatggaatggataagtaagttgctactctggaaaaaagaaggttacaatagcaacaatcctcctcgagagcagtccttaggccatccacacaagggaaaaaacagagtggaaagatagagaggacaacaaggtagaccgaaccgagcgaccgaggtaggcgagagttggtagagggcggtgggtagtttccatggcggctaggtagaggatcatcatctgacggtaccggcggccggcagccgacaagtgggggccagatcctcgacgcgtaattgatgaagattgctggcctagcgaggaaccataaagggcgatcaggtgcaacagaagcccgaggtgtgggttgatgatgaagttgcaggtgctgaccatggaggttggaaaagattggccacgactttgaagcagagggggacaatcaagtaaccaaagagataataaaaatggaaatgaatcccaagcgaaacctaactgtcatatgctagtaggaattcagacaatattatcatctaactgtagattgaccatgctatgagtctaactctgagcagaataattgtacgcttgagatttttaactggatgtgcatgttaattttggtaaatagtgagtactgtgttttacgtaaatttaatacgttatattaatttgaatggaagggaaattctcttttatacatattgtacaccttcctttgttttacatacactcctttttttttgcttcactatattttaagattgatgtggctagttatatttttttagtgatttgattgtaacccgtttactgaaagttttaaaaaattttattgctaatgaaaagcccatcaggattatgttctcaaatagtgatccaaccatatggaagtgtgtatgtataaaattgttaataaaattgataataagagcatctgagatgttttgatactttgttgccatcttgtctggcatgatgaattcaatggacattccaaaagatatgattttttacattttgggagtcaggctatgctaagaatatctcatatcttatttgagtacggattttcaaaaactttttaaactaattgcatcatgccgatctcattcgtctattttatctggagttgatctcgaggattattaatcgtgagtaaagaatagttaattagaaataaaccctaaaaacaaattggtaaaataaatataaattaaaaataaagattaggtgtggatagtaataaataaaatattatcgcgaccatatttggatcaattaaatttcattgcgatggaataagaattaaccctaattaaagctcaaataaattatataaaaataaaatatgagtaatattaatctaatctagggtgaattcattagttgagataatacacatattgagtaaacttcatttatgcaagatttagaaattatagaatcaaattcatataggaaataaactaaaattgggaaaaataggaaaaagacactattcattagcctctaggtgttcgacgaggttccctagccccttcccctcccctgccatgcgcgcctcgcgccccgagccgtcgccgtcgccgcctgccgccgtgccgctgtcgcctgccgcgccgcgcgccgctcggccgtcgccgtcgcgcctcgcgcctcgtcccgccgcgcgccattgccgtcgccatcgccgcgccgcgtagccgtcgtgtcgccgctgctgccgtcgtgtcatctcgagccccgcgccgccgctgccgcgctgacgccgcctcgcgccgcgcaccactgctgcgcccgcgcccgcacctcgcgccgcgcgccgccgctgcccgcccgtcgcgtcgcccgtcacgtcgcccgtcccgtcgccgctcgtccgtcgccgttgcgccttgcgccccgcgccgctgccgtctgccgcaccacgcgccgcgcgccgtcgcccgtcgcgtcgcccgtcccgtcgccgctcgtccgtcgccgtcgcgtcgctcgtccgtcgccgtcgtcgctcgtccgcgcgccgcacgccgccgcccgtcgcgtcccgccccgagccccatgccgagcgcccccacccgaagccccgcgccgccgtcatgtcttcccctccccttatctctttcccttcccctatataagccccgctattcccctcttctcctccgtctccaccccctcatctctaccactcctccacgccatcgcgccgccgtctccacgccgccacgccgtcgcttaaagccgccgcgcccccgccacgaagccgccgcgccgcgccttgcgccaacaccgccaccgtcgctgtcgccgccgttgccgtcgccgtcgtcggtaagccgccgcccaacctttccccccctcgcgtccatcgtcgccgccgcccgggagagcaagagccgagagagagagatagagccgggagagggagaggaaaagagtgccgagagggagaggaaggaaagaaaaaggaagagagaaaaagaaagaaaggaaagaaaagaaaaggaaaagagagaaaaagagaaaaaagaaaagaaagagaaaagagaaaaaggaaaaatttaagagatttagaatatttaacatattagaaattaattataggattaatgagaataccgttagatgaactcctactatttaaaatacctaaagtactaagatttgattatagaactaattatttacgaattaaaacaattagatgaatcttaatagattgttatagattatttttagtaatgtctataggagatcaattcgcggtaataatttagatcaattcgcggtaattattatagattattttgggtaatccctataagtaatcaattaacggtagaaaattcggatttagttactagggattatagccgtgtaatatatttaatcgtttagtcatagactaaattaaatcatataatgtttctaggattttgtcagatagttagctcgcgctagaaatctctaacctattatatggatataatgctcaggtagattaaattaaaaatttgtgacaataaaacatttatacccgcaaaatagtttaaatcgaaattgggtttgtcatagttcgcagatagtaaaattaataaaaaggaatcgactttcgcatgtgacttttatttggatttatttggatttttatttgaattctaaccgaattcaaatcaattcttgcacgtaactatagagcccgagggagttgcggatccaagcgaaggccaagacccgcaagactttgagcaaggcaagtcatcactattctttgaacatgttgatcccaattgcgaaattgttttgtttacaaataaaattgcatgcaattatgaacatcctacttgtgattataccatgccttgattattgttcacctttaaatctttgtaaccatagatacgtacgagtccctagtcaactatgacacttgcttagaaatgctattttagattcatgcatactcatatttatcaaatgctatatgcttgggcaattacctttgggaaggtaattgagatgcggcatgtggagacatgagcgccacattgccatgatattgacgacataatttgtgaaaggaaaataaagtaaaacaactgttttcgactggggcggctggaggacttgggtggtgtctggaaaaggctagtgccgtccctggtcaattaaggaccgagccatgaagttaagcatgaaacgacccccgtacaaccgcacttctcgtatgggtatagacctagcggagtagatagctgagcggaggcagtatccatgcatagtggtttcttgatgtgtgaggcaggggctctacggtgggggcagccattggtaggaccgcgaggcgggtgtctacagtggtgtcgccatcggtaggactgccatgtgagaatctaaaacataattataacttaatgcatgtgtgagtcttcccttcccgggtgcgccagaactcctctcactgctagaaaccgtgtacgcctagagtgcatgaggatgaaaagttcatggagcgggtactgccaatgcgaggttatcaaaaagctttgccgtgacgcgtctcatgtgttgggacgaggctcatgtgttgggcagtcgcggagtgcgggtaaagtgtacatccactgcagtgtgagtaaaccaaatctattcgaatagccgtgctcgcggttattgagcaccgggacgtgtattacacttggctagactctaaattcttaacttgtgtgggaagggatattgcatgatgaattttatgctgttggagccacttcctgagaggcgggaaggtggacgtcctcagaaaaccatgacgaatcaatggtgggaagctatccttgggatcacaatggatggtggacagaaccgtcgttgtttaaatacaaactctggtactaaaatttgatcagtcaatgctaggtcttaggcttgtgaaaagaattacaaaacttgctttgcgcaaaagaactatggccatcctttgaactccccctttcatatgcattgttgctgtggtggcttgctgagtacggttggtactcatccttgcaaatataaaatttatcagaagcgggagatgaagccttggaggatccctatgcctactatcaggagggagatgaagacgatggcgtccagtaggtcttagtacggtcgttgcccgtggcaatggcatgccgctgcctgaattccgctgccttatctatttctgcttttggatgtattccggacctctcggtccgatgatttaagactatgcctgcgggcctatgatgtaataattcgtatttaatactcgtgtatgtgcacttgatattccagctatgaattcgtgtgtaccaaactacttgatccagggaaatggtactgtttacacgattgattcctgttataaaaacgggggtccacagagctggtatcagagccatacgactgtaggaaaagaccaaaaggcgccccaccccttttctaagttggccaagggagatattcccatttagtaatactttcaaaaataaaaacgctatgtttacaaaactcggtacaattttcatcttactcttaactattttatttacaaaacaagttttactctcaactgactttgggtttttcttaaaattagatggcagattcggattcacccgctacctgggagttgagcttacctcaatcagaggggtatgtcattgagctgcatcggatgttgaggcgtctgcgataccctggattcccgtcataccgagtgagacagtgtggctcagtttgggaggctcgggttgagattcacccccgagtcccttccgagttggactacagcttccagacacgtcaccaccgagacctgccagagactgcgatgcaggatgccgcccgggaggccttcctccgactcagctctatccaccgagctgagttagtgagtaccgagtttgctcatcacctgttccgggaggagggcaactcagtttgcacagttcaggacacgccctgctgctacaacccgatggtgactcggttgtcacgatgggctgaggcagtagatgactactacgaggaggctctgttggagattgacgaccaccagagacgtgtgggggagttagagactgaggtgaccgacctcacagcacagcagcttcagttggaggaggagcaccaggcttggggcagtgagatagactcactgaaggcacagctccaggtccacggcgaccagttccagcagttatctgaccagtacaacgatcaccgcgggatgatggatactcttgaggagcagctgagagagagtcaggagcacgtcagccagctggaggagcagcttcgagcagccaagatcagcactacaggggcttctacttccacagcagtaggccgtgaccgctactttttcctcaccccgccatacccaccggcgttccacgctcttctgggagaggctagtatgctagctaccgagtcagcgccctacctagtggaccctacagcgacacagccacctgttccggagttggtgcacactccactgatccctacaccttctccgcagctgggttccagtttggagactccgatccaggtcgactccgagacagaggggaccgacaccgagccagagatcgagccagacatcactgatccttcagaggatgaggctcctgttccccgcatcaccttccttggaggccctcgcaccctcagcactgctcgcaagagcacacgacctccgggcaagaggcccaagccagatccagaggccactacttctgggccgtggggactcaggtttgcgcgagccagcgaccaccctctacctgccccgggatcctgcggatggctggaggactagactgacggactccttgcagcttcgatctcgtatcagatggtttttggatagtatgcaagaccccctcccttacctagattgacgagtagtttgatgattggtttgatgtatcgtttggatgaaccttatttggactgcgtatgtatgcagtcaattgcatcatgatttatgtaccatttgtgaaactctgtgatgttatgatatctattgttgttgtattataaatgagtttattccaccatgcttgcgaaacaaagtccatatcaacacaaccccccttaatgggataaagccataggagctagttagaaaattaggatacttactccatcaacctacacagatggcaagccgacgtcgggcaacaaccagcaatgacgaaactcagacacccgacttaaacactctggccggagttatggccacccaaactcaacttctgcaagccatcgcaaacaaccaaggcaaccgcggagggtcaagctttggagagttcatgagaaccaagccgcccacgttcgctactgccgacgagcccatggaagcaaaagactggctacgcatcatagaaaagaaactgactctagtcagggtacgcgaagccgacaaggtgatcttcgcagtgaaccagctggaaagacccgctggtgattggtgggatacctacaaggaagcccgagaagacggtgctggagaacccacctgggaggagttcactgcggcgtttcgcgagaatttcgtacctgctgcagtgatgcgcatgaagaagaacgagtttagaagactgcggcaagggaatacaacagtgcaggagtatctaaacaagttcactcagttggctcgctacgcaattggagacctggcagatgaagaagaaaagatcgacaagttcatagaaggactgaatgatgaattgcgtggacctatgatcgggcaggatcacgagagtttccagagcctgatcaacaaggtcgtcaggctagagaacgatcaaaggacggtggaacacaaccgcaagaggaggcttgctatgagtcacccacctcagacagtgcctcagcgacttaagggagcccctccgtccggatggaagccccctgtcatggtgaccaaccgtcccgctgcacttagcaacttcaacaggccagttgcacttcagaaccgcacccctacaccaactttggctgcccctggagccaagaagaatgtggactgcttcaactgtggggaatacgggcactacgctaacaactgccctcatccacgcaaaacccctgtccgaactggcgcgaatgcaatgactgttcgcggcactactacccctgctatcgggcgaggtctattcaagactccgcaatctaacaggaccgccactggatttgggcgcggacaagtgaaccatgtccgagctgaagaggcccaggaagatcagggcgtactaatgggtatgttctctatcaattccaccccggttaaagttctcttcgattccggtgcatcgcattcatttatatctctgaaggctagtcaaaagcacaacttgaccctcgtgggacttagaaagcctatgatagtacactcacctgggggcgagataactatgagtcatgcttgcatagatgtaccaattcgccttagggatgtggtatttccctctaatcttatggtgctaataccccaaactcttgatgtcattttgggtatggattggttagcaaagcatagaggagtaattgactgtagacgtagagaggttaccctgaccacaccctggggatcggatatgagagcaaccatggatcaagaacctaggctaaccgaacgtgctgggggtatattcaccatgctacccctaaagggaatgcctgtagtacagcgatttcctgatgtgtttccagaagatttacctggaatgccaccagatcgtgacgtagagttcattattgacctgatacccggaactgcccccatatccaagagaccatatcggatgccggtcaatgagttagaagaacttaaaaggcaaatcagagagttgcaagagaagggatttgtacgccccagttcgtcaccttggggagccccagtgttgtttgttaaaaagaaagacggtagcatgagaatgtgtgtagactaccgatcactgaacgaagtaactatcaaaaacaagtatccactaccacggattgatgacctcttcgaccaacttaagggagctaaggtgttttcaaagatagacctttgatcaggataccaccaactgaagattaggaccgaggatatccccaaaaccgcgttttcaacacgctatgggttgtatgaattcacagtaatgtcgtttggtctaaccaatgccccggcatacttcatgaatcttatgaacaaagtattcatggattacttggataagtttgtggtggtattcatcgatgacattctgatctactccaaagatgaagaagaacatgcggaacacttaagattggttctccagaaactccgaaagcacaagttatacgcaaaattcagcaagtgcgaattttggttgaaggaagtcgcttttctgggtcacgtaatctcagccggtggagtagcagtggaccctgctaaagtggaggctgtcacggaatggaaagcacccaaatctgtgactgaaattcggagttttctaggcttggctggatactaccgaaggttcattgaagggttctctaagatagcccgaccaatgacacaactactcaagaagaaaaagaagtttgtgtggtcagaacagtgtcaggaaagctttgagcagctcaaggaaaagctgacctcagcgcctattttagttcttcccgacatcaggaaagactttgttatatattgtgatgcgtcaaggcaaggactaggaggagtactgatgcaggacagaaaagtggtggcctatgcgtcgcgacaattgcgaccacatgaggaaaactaccctacccatgacctagaactcgcagctgtggttcatgcgctaaagatttggagacattatctaattggaaaccattgcgatatctacactgaccacaagagtctaaagtatatcttcacccagtcagatctcaacttgaggcaaaggcgatggttagaattaatcaaggactatgatttagaggttcactatcacccaggcaaagcaaacgttgtggccgacgctctgagtcgtaagagccattgcaatcatctgagaatggaagggatggtccctgagcttagggaggaaatagctcagctgaacctacatatagtaccccgtggacagataaacaccctggacattcaacctcttttgagaacccaaatagaagaagcccagaaggacaacgaggaagtccgagagttgaaggaacgcttggctgcaggacgtgcaaaggaattttcaaccgacgaaaaagatgttctatggtataaaaagagaatttacgtacctgaacagggtggactgaggggattaattttaaaggaagctcacgaatcggcatattcattgcaccccggaagtacgaagatgtaccaagatctgaaggaaggatactggtggcccaacatgaagagagatgtggccgaatacgtagcactctgcgacgtatgccagaaggtgaaggctgaacaccagaggccagcaggtttgttgcaacctctcaggattcccgaatggaaatgggatgagataggtatggattttattgttggattgcccaaaaccgcaacaggatatgattccatttnnnnnnnnnnnnnnnnnnnnnnnnngacagcgagattcattcccgttaagacaaattatagcagtgctaagctagccgagttatacatgaccaggatagtatgtcttcatggtgtaccaaagaaaattatatctgatcggggcacacaatttacctcacatttctgggagaaagtccatgaagccctaggaagttatctcgcatttagcacagcttatcatccacagacagatggccagacggagagaaccaaccaggtcctagaagacatgctgagggcttgtgctctggattttagcaaggactgggagagatgtttgccctacgccgaattctcctacaacaacagctttcaagcaagcctaaagatgtcacccaacgaggcattgtttggtcgacgatgtcgtaccccgctaatgtggtccgagactggagaacgggcggtatttggacctgatattattcaagaagccgaagaaaaggttcgcttgatccgtgaccgtctaaaagtagcacaatcacgacaaaagagttacgccgacactcgaagaagaaacctggaatttaaggagggagattacgtttatctaaaggtttctccgatgaggggaaacaaaaaggtttaaggtcaagggaaaactggcaccaagatatgtggggccattccagatcaccgccaggcgaggagaagttgcatatcagttacaattaccgaagaatatcgcggaggtgcacccagtcttccatgtatcccaattaaagaaatgcttacgagtgccggaagaacaagctccgctggaagagattcacattagcaatgatctcacatatccagaacacccgattcggatattggatgaagcagaaaagaggactaggagcaaagtgtggcgtatgtacaaggtacaatggagtaatcacactgaggctgaagccacctgggaaagcgaagaattcttgaggacggagtacccgcatctattcgaaaactggtaagaaatctcgggacgagatttgtttaaggggggtaggtttgtaacaccctgaaaattcgaccgacaaaacaaaaactctaaaaatacggattttcaaaaactttttaaactaattgcatcatgccgatctcattcgtctattttatctggagttgatctcgaggattattaatcgtgagtaaagaatagttaattagaaataaaccctaaaaacaaattggtaaaataaatataaattaaaaataaagattaggtgtggatagtaataaataaaatattatcgcgaccatatttggatcaattaaatttcattgcgatggaataagaattaaccctaattaaagctcaaataaattatataaaaataaaatatgagtaatattaatctaatctagggtgaattcattagttgagataatacacatattgagtaaacttcatttatgcaagatttagaaattatagaatcaaattcatataggaaataaactaaaattgggaaaaataggaaaaagacactattcattagcctctaggtgttcgacgaggttccctagccccttcccctcccctgccatgcgcgcctcgcgccgctcggccgtcgccgtcgcgcctcgcgcctcgtcccgccgcgcgccattgccgtcgccatcgccgcgccgcgtagccgtcgcgtcgccgctgctgccgtcgcgtcatctcgagccccgcgccgccggtgacgcgctgacgccgcctcgcgccgcgcaccactgccgcgcccgcgcccgaacctcgcgccgcgcgccgncgctgcccgcccgtcgcgtcgcccgtcacgtcgcccgtcccgtcgccgctcgtccgtcgccgttgcgccttgcgccccgcgccgntgtcgtntgncgnaccacgcgccgcgcgccgtnngccgtcgggttgcccgtcccgtcgccgctcgtccatcgccgtcgcgtcgctcgtccgtcgccgtcgtcgctcgtccgcgcgccgcacgccgtcgcccgtcgcgtcccgccccgagccccgtgccgcgcgcccccaccccgagccccgcgccgccgtcacgtcttcccctccccttatctctttcccttcccctatataagccccgctattcccctcttctcctccgtctccaccccctcatctctaccactcctccacgccatcgcgccgccgtctccacgccgccacgccgtcgcttaaagccgccgcgcccccgccacgaagccgccgcgccgcgccttgcgccaacaccgccaccgtcgctgtcgccgccgttgccgtcgccgtcgtcggtaagccgccgcccaacctttccccccctcgcgtccatcgtcgccgccgcccgggagagcaagagccgagagagagagatagagccgggagagggagaggaaaagagtgccgagagggagaggaaggaaagaaaaaggaagagagaaaaagaaagaaaggaaagaaaagaaaaggaaaagagagaaaaagagaaaaaagaaaagaaagagaaaagagaaaaaggaaaaatttaagagatttagaatatttaacatattagaaattaattataggattaatgagaataccgttagatgaactcctactatttaaaatacctaaagtactaagatttgattatagaactaattatttacgaattaaaacaattagatgaatcttaatagattgttatagattatttttagtaatgtctataggagatcaattcgcggtaataatttagatcaattcgcggtaattattatagattattttgggtaatccctataagtaatcaattaacggtagaaaattcggatttagttactagggattatagccgtgtaatatatttaatcgtttagtcatagactaaattaaatcatataatgtttctaggattttgtcagatagttagctcgcgctagaaatctctaacctattatatggatataatgctcaggtagattaaattaaaaatttgtgacaataaaacatttatacccgcaaaatagtttaaatcgaaattgggtttgtcatagttcacagatagtaaaattaataaaaaggaatcgactttcgcatgtgacttttatttggatttatttggatttttatttgaattctaaccgaattcaaatcaattcttgcacgtaactatagagcccgagggagttgcggatccaagcgaaggccaagacccgcaagactttgagcaaggcaagtcatcactattctttgaacatgttgatcccaattgcgaaattgttttgtttacaaataaaattgcatgcaattatgaacatcctacttgtgattataccatgccttgattattgttcacctttaaatctttgtaaccatagatacgtacgagtccctagtcaactatgacacttgcttagaaatgctattttagattcatgcatactcatatttatcaaatgctatatgcttgggcaattacctttgggaaggtaattgagatgcggcatgtggagacatgagcgccacattgccatgatattgacgacataatttgtgaaaggaaaataaagtaaaacaactgttttcgactggggcggctggaggacttgggtggtgtctggaaaaggctagtgccgtccctggtcaattaaggaccgagccatgaagttaagcatgaaacgacccccgtacaaccgcacttctcgtatgggtatagacctagcggagtagatagctgagcggaggcagtatccatgcatagtggtttcttgatgtgtgaggcaggggctctacggtgggggcagccattggtaggaccgcgaggcgggtgtctacagtggtgtcgccatcggtaggactgccatgtgagaatctaaaacataattataacttaatgcatgtgtgagtcttcccttcccgggtgcgccagaactcctctcactgctagaaaccgtgtacgcctagagtgcatgaggatgaaaagttcatggagcgggtactgccaatgcgaggttatcaaaaagctttgccgtgacgcgtctcatgtgttgggacgaggctcatgtgttgggcagtcgcggagtgcgggtaaagtgtacatccactgcagtgtgagtaaaccaaatctattcgaatagccgtgctcgcggttattgagcaccgggacgtgtattacacttggctagactctaaattcttaacttgtgtgggaagggatattgcatgatgaattttatgctgttggagccacttcctgagaggcgggaaggtggacgtcctcagaaaaccatgacgaatcaatggtgggaagctatccttgggatcacaatggatggtggacagaaccgtcgttgtttaaatacaaactctggtactaaaatttgatcagtcaatgctaggtcttaggcttgtgaaaagaattacaaaacttgctttgcgcaaaagaactatggccatcctttgaactccccctttcatatgcattgttgctgtggtggcttgctgagtacggttggtactcatccttgcaaatataaaatttatcagaagcgggagatgaagcctcggaggatccctatgtctactatcaggagggagacgaagacgatggcgtccagtaggtcttagtacggtcgttgcctgtggcaatggcatgccgctgcctgaattccgctgccttatctatttctgcttttggatgtattccggacctctcggtccgatgatttaagactatgcctgcgggcctatgatgtaataattcgtattagatactcgtgtatgtgcacttgatattccagctatgaattcgtgtgtaccaaactacttgatccagggaaatggtactgtttacacgattgattcctgttataaaaacgggggtccacagaagctatgctaaagatatcccatatcttgttttatgaggatagatatcccatatcttgtttgatgaggactcttaaatgactttaatgacatgttcatcagtggtagagagaaagagaggctctgctaatatgacattgataaacttaacgccatgtaagctaatggcaaaaatatatttgttggattattcatgcgtcgtcaggagggatctggtcaattttaccaatatgtttttcaagaactgattacaatctaaactttcttgataatctaaactagttacttttcagcttcctccaccatcttataacttttcgaaaaaccatcctatactatacatgtgtgtgtggttagtcttcacatctactatctatttatatttcatatatcacacctcaattgtctcccttcttgtttaaagttggttgtatctacaatgcgtttatggtgatgagacatgcaaatgttgcttgatgagaaataataatgagtataattttttcctatgattttctcgacccatttgaccggtaaaaaaaagaagggaaaatctggttctataacactaaaagaatgcaattttttatttatactatatcaaaaatttccagttaattctaaaaccactaaaagtttgcatggtttccctttaaaccatttcttcaatatctattagttatatattaccacccaagtcagtgtttattcattacatatctctaccagatcattgtttagttattattagttaacaatatgagcacaacttcaccaccaaccagcatacaaaatcactattaactaattatatgaactactaccttttacctattctgatccgtttagattgggccatgaaacccaacactttcaccatcgctatatataccataccttttatcactatcacaatgcaagcacttccagaagaattcggtaacaaccaacgaattaattaaacgaggcactaaacaacatattaccattctaaggactttttaatagggaaaattacaaaaaaaaatcaccctagaagtcacttaagtttgacattccatcttataagtcattttattgcaaatgtccaccctctactcggttttgtagcaaaaaccaccctagtgcacacgtgcttaaatgaatcgatatgttttcataaattgtcttgacacttttcttgagttttcacaaatataattactgatgagaggttaaatgttgttgcactaagtttcattatatgcagaaacaaaataatgaaacacaaagaataagtctaatgcaaacacttagataagattgacccggctatcttagcctatgagactattcatcaatgataacagactaattcagcatgaaatggagagggtgccacttgcttaatttactctattttagatcaagttcaagccgatgcaagtatctaaatttgtattgagggtggtacacacatggtgaaaatatgtgaggtatagctaaaaattttttttaggctgggttcctgggcaccccccccccccccccacatactctagctccgcccctgaattcagctaaacacgtgcgaacgggatggtttttttttaccaaaaccatgtagagggtggacatttgcaacaaaatgatttatggggtgtaatgtcaaacttcaagtatcttttgtggtggttattgtaattttccttttttatatgaacttttagcacgtaagcatgcatgaactttctatgcttacctgttcactactaaataaatgtgtacatgcatgatttatcacattggagcgtcctaagaataactaatatcatgaatagtacaagcatacacaacatttcctgatctagttcaccacgagcaaaattctgataagcccctaaaaacgcgtgggacatacgttctcaatcctgttcacatgatccaaagaccataattaagcggcccagctgaagtacaccgagtaacatatctatgctaattgcatgagtttgccatctcatacacagcgatttcaactaattgtgacaggaatttgttcgatcatgcctgatgtatttattagctgtgtttttgtggtgaccatgcatccatgatcagctgccagaaaacatatgtatatgatgtgttcttaactgaataatatatgcatagtagtggtgtgagacagggatgttgattccatccccatgtttggacgaatttggcatgagaaagcaacatctgcattagagcgtgactttgtacatatgtttggcaacatacagccagaaatgtgttcatttagtatattttgtctacttcatcatatgaaatggctggtacatagcatgatcagttttggttatataaggatttcaataagagtgaacgggtaaacacatgtctatgttatcttatattaaggttatcttagattaaggttagcgcattgcaaagttatattagatgttggaggaaactaaaaaatggtgatctataaagaccgtgtgttattattttggatagactagcatgataacccatgagaaacctgacctccctaatattgaatatattttgagtgtattgaaggcgtgaccatcaaccaatcaacaaggaggagagaggccatcttaatgaacaagaatgattaaaagttgtctgagttcacaagtcatcgaagattataatggtggatcaaagattataaatgaagatggggtgggcactaaatagttttgggtgaatatattgaggtaggaatataatataatataatataagattgaaatttgattccaaaataacgataacagttttttattaatgagcagcacagaactaaatattgtaacaaccgatatgaatggccaccacttctatcttaatgcttatcagtcatgctatcacatgcagccgcagttgtatatcattagcttctcgtcttaagtgaaactgttaccagatcgttagtttgagaatgtattttaactcactctgtatttatatatccaattatccactattatggattggggcatcaaaggcctccgcatttgtcgtgtgcctttatgtacatactagtatagatcttgtggttctcctaccatctctcgctttatccaccggcagaattgagcaactgaaaaatttgctatgggacatccaaaaaacgtgtaattagctaggagacactgcaaaaacgcttatttgctataggacaccaccaaaaactggtaattagctactggacacctataggattattttattatatccggagaaattgcagagagaaacaattgtgtaagtacgattctacccttcgatttttttctttttattttttatctatccttttctactccttcttccttattcttctctctctattctttctcgctttctctctttgctcttcaagcgagcccgagggagcgccggtgaccgcgcgacgaggcgcgggctagtgtgggcacctcggttggaacggcgttgcgcattgctgaagtatgatggcctgtactcgggcgccagtggcgccgggatgtactagcggcgaccgagcatgggctccagcacaaggaggcggagccgggtggggctaaggaggaggacgcgcccgccacgtgagccgatgacatgccactcggcgtcatcgcccaaggcaaacaccccgccgggattacgcgccgtggcaccacggcggcggctccgacggcagtccctggtgctgtcgacgccgacagggatggagcggttgttcgcccaggcgccatggttgtggttgtggaagaacccgacaagggagcccctggcgcgccgccgtggaggtcgttgaattggcagaggaagcggcggctagtgagcatgcggcggaaccgactactgacgagggagacgtggtggaggcaggtcaagtgcggcggtagcagtaacacggcgagtgtcactagccacccctccacgttctcgctcgactcggccacgcccaccaccgccccgccacgccgccctcatccgccgcgtcgccgctggggcgtctcgaaggagaacgcggcgtctcgccgtcctcgtgtgggtatgccatggcgtgttccggctggtcgacgtggcgctgcgtgggagagagagagggggcttaaatttgagcttacatgtggggcccacgtttggattcatttgagcaagggcaaacttgtctttaatgattgtttttctatccaatttctccggatataataaaataattttgcgggtgtccagtaactaattaccagtttttggtggtgtcctatagcaaattagtgtttttgcggtgactcccagctaattacacgttttttggatgtcccatggcaaactttgcctaaaatactccctcaatttcaaaatgtttgacgccgttgactttttatcacatgtttgaccgttcgtcttattcaaaaaatttaagtaattattaatttttttcctatcatttgattcattgttaaatatatttttatgtaggcatataattttacatatttcacaaaagtttttgaataagacgaacggttaaacatgcgctaaaaagtcaacggtgtcaaacatttcgaaacggagggagtattaatcatgcatgcctgatgaattacacgttgccattttgtagtgactatgattcctcaatgagctttgagctagtgaaagacatgctcctgtagaaaaactaatacaaatcacaaatggtgtatttttcgttattaaaacgaatgatatttatcttccgttgctgctgggaatacaaaataacttccacaacaagctctcagttttatctggattgaaaaggcctattttgatattttcaactgtcagaaagaaattcaaagaaacatattgaatggccaaaagactagactttctatcagctaaaaaaatatacagtagcaaattggaattgcaatttctgacaataattagtatagcgtaatggttaggcctgtgggaacttgctaattgaaatattcactgttatcttcattgtctcgtcgatctcactgcacatacacatgcaagatacttcgatgtgcacaagtgtttggtcagtaattccccatacacaaatcttaatgaacacaaagaaatttggatttgatgtgtactgtagtatgtaaacagatgtgctttcctagcgatagtagctagtatactgatcatgttccttctgcaactgacgcataagttccatccatccagctagacttggtaaaaattaaagacaatagataagcatgcggcatacatgtgaacctgactgcacagaattggagatgtatatatatatatatatatatatatatatatatatatatatatatattacacatagagtaacttgaggagatgctaagctagagaggggaaatatttatgctaacggagtattatagtgaaaatttgagatttgtttttgtaaaataaacattctaagtagtttggtagtgctattgaaaaagtagcatagccagacagttggtgagaatacacatcaatttttgtaattgaagagtgatgtttaaatgagaggaaatatgctgggaaagttgaagcggacacaactgtaaaagatgttagttaaaccttaatcgactacaagattaaaaaacactagtgccgatggctagcgagaatgaagttatagtcttttagaccagttagagatgttggtgaatgctgaagctaccataattataagtgtcagtagtaatgttgattgaaccttaaaaaaccacaacattaaatcaacattggtgctggcggatagtgaaaatacaacttagtcttttatacaattgtgttggtgaaagcgaaaggaatcacaataactagtgtgaattgaaatgttgtttcaatcttaatcaataacaagatagattaaattaatagtggtgctagtgggagagagaatttagtttaattgagagtggtagtagtgggagaagagaatttagttttgagccaacaaatggcataacattttgatattatttccgtaaataaatccaccacgatgattagagtcagatgatgcaccttcccctatggaatagaaaccacctcttttaagcatgtaggtagggatggcaatgggtcgggtcgggtacgggtagagcaaaaccatgcccgacccgatacccgacattgcccgcccaaaccctacccactagagttagcgggcaaaactccatacccataaccatgcccagcgggcgcgggtatgttcagtgggtatccaatggatctcacataaataataacttgaaagatatgtaatttaacaaagagaaataaaatcaataatttaccaaattgtcggttatcaacaataatttgaattacatcacaattaattatatcccttcggaaatattttttccttgataataataccctccacgattttactacggttaattaagatggtattataaatagatttgaacccttcgatcaaataagattaacagttcagattactttctactaccagtagagagcaccgtaatgcgcctctaattaattaatagtgcagtaatgcagtggttaggcctgcctgtgggagctgccaatagaatgggatagctattctactgtcatcatcctttggctgtgtttagatagtggaaaagttgggagttggtagtttggaaaaaaaagttgctagtttatgtgtgtaggaaagttttcgatgtgatatgatgtgatggaaataaactaaacatggcctttgtctcgttaatttacctgtgcactcacgaaattcctattccacgcatatgcaccagaagtgctgtgtgtttctattccctcgtgcgtcccaccagctatatgcatttccctttttttttctttttttggatctggaaataaaattagccccatcaactacgccatatggtatacatgtatttcccttgcgcatgattcccagatctagagaaacaatgatgagttttttttccaggtaagtgtatgtgtttcatttatttggtatacatgacatttttttaacaaaaagcaacaactcaaatttgaaaaaaaaaaaggtccaaataaaaccttcatctcaaaattcaaaactttgaactcaggttttcactttcaactcaaaatttgaaactttcaactgaaatttaaaaactttcaaataaatatttaaaacttttaactcaagatttaaaactttctatccagatttaaaactttcaactcaaattttcatctcaaaattgagaacttctatatcgaaattcaaaactttcaattcaaatttaaaaaacttttaagtcaaaattcaaacttttatctcaaaattgaaaactttcaactatctttttttaagttgttaactaagttatttatgtatttttaaaaattagagctaagcatcatcattagcgttaatagtgatttgcgtgagtgactgggacgtacgggcgctttatgcagcccggcacacgtccactagaaacccccgtacactcatgctagatagtacttcaatatgcatgagtttaagctgatcagcaatttcaatcatgcagaaactaatgccggcgaacacaaagaaatgtggattatttttctgcacactgtaaacgaatatgctttcctattgaagagagaaaaggtagcatccttgtcgtattctttttcgactaacacatataagttccacgcatgcatacagccggtacctaagtaaagacaataggtgtgcctgaatctgatcgctctgaagcttcgagcagctacagcttcagttctaggatctagagcttcccaaaacatttcaatttttcgtccaaattacaagagctttagttctatggtctagaaaatgaatttgaagacattagttggtttcccccgattatttggatatattcttatcagctttattttaaccagctgtttatctgaatataaagttaccagaacaaccccttggttggtgacgaggaaagtgccaagaaaaaaagaaacatatgtatggaacaaaaactgctgatcaactgatcaagaaatatgaactcgaaatccaaaacatatgtagtactagagattttaacggagtttagcatcggaatattattggtaggaactataagaaaaactttgtatatagtgagtaatggaaggcagagaaaatggttaatgatttgttggagtctgaaatcaactacaaatccaaaatagattagtaaaaactgctaatacaccacgaatagatgagtaaaaactgctaatacaccatgagctactatgcgttgccattgtattgtattgtgttgcatgtcatgcatatcaataaaattgtacttctcttcgtaagttccactgactacttctcttcatgcatgtgacaacaaacactcgtgttaaacataccgtgtgacagttaaaagtgaaccggggaggcaggggatgtaaaaacaacatgagctagctatatatatatatttcatcaccatatcaaggtcgtgcggactcattcacaacgtgtgaccgagataactatctccaatataatagcgtttttttcacttgtagtttctctgtgtagttatcctaacggtggctagcttccaccttattagcgcacttcatacgaggagaacaacaaagccgagataacatgtttcgaaagaaaacatgtaattaatatgattgaaagagaggagcgggtggatgacatgtgaatgcatatataattaaaatatccattacccattagaaggggatcagctgaaaagcattatagcattaagatatttggctgaaacaattcagtattttatatgtgctactaacatagcgcgactagataagtgaaatgcgagaaaaaaacaaatatggaaaatgaggttttggaggaagccaaagaaagacaggtgaaatgcgagcaaaagaacaaatatggaaaatgaggttttagaggaagccaaagaaatatatttaacaggatgatatgatggggattgggcggaggccagggctggggaggagggatacttgttataataatagcattactactcccatattcttgtcaaaaactaattataaggaattttttgtgatagattggatccaacagatcttaacccctacatatctagtgctatatgtgaggagattttttatgggattttgactgggtttggcatcgggattattggtaatattgtttgcccaacaataaaagagtactgttctaacagtatgaaacatcacaggatatgtactgaaacattcgaaataacactacgtgcaacatttccaaatcaattgcagaacatcgaaaagtacttactagaaaatccaaataatactgtatgcaacttaaaaaatctatgataacaaatcggggacgactccgcgtcgaacgtccgatattccaccaaatatcggacacccgtctgtctgcgcgcctgtcatgcctcctgctgatgcagcatgcatcttccgtctatcatgcacctctgtatgccacatgcagcctaccacatatattctagtatatgcgcctgtcacaccacctcttccttttcctctttccttctcacgtactccctccgtccaaaaaatgacaaaccctggtttccgtgtccaacgttcgaccgtccgccttatttaaaaaaattataaaaaaaattaaaagacaagtcacgcataaaatattaatcatgttttatcatctaacaacaatggaaatacgaattataaaaaaatttcatataagacgaacagtcaaagttggacacggaaacccagggtttgcctttttttggacggagggagtatagtatactagcacttttttctccttttttctttcaccaaaatttaatcaaaattttcttttaaaatatacatctagtttatgatctaattataccattaagtttgttatatttgaatttttttataaaaaatctcatacagttatatttttattaaaaatatatgtataaaaatcaattgttgttcacaatttatataaaattgtttcacctcactaatgaaatgcgttccagagaaatgcaacatataaaatatattgactgtaacaatgacaaccattgtatgaaacattaaatacgaactggtgatacataacaaaatcatatgaatatacaaaatatttataaatacttaattacttgaaatattttctttatctcatccatgaagcacagcgttgtaattgttgaaaaaaaaaaccctgctgaaacataaaaaaggattatgtgcaacatttgtacatgaagtagtgagacacccggaattacttattgaaacatttatataataccatatgcaacattaaaaaaaattaaacgtgcaacatagtctaattttaaatgaaacattctcttctcaccgagtgaaacatcgagttttaatggttgaaacatataaatatatgttatcgaaatataatcatgtgatatcttgttttgaagatttaattacaacgaatacttcgatataattagagcttggatcggataaatagttttgaagaaaaataattttaaagaccacgtttcatttacacatcggtgtgaccgtatatatgtgcttgcttgcatgttgtgcatgcgtgcatccatggatgacgtaacggagtgagctgccgtaggcgtccgacgttttttatctgatcggacgttcgaagagaaacattttcataacaaatcagctataaaaaattttttcatcagaatactctctccatcctcttttatttgacgtttccgacaagtttgataaaattaaggtttgcacgaaatgtcttttttatccttcgtgaacttcgtctcccccaatgctgcagtgctatcgtgagcgagcgatggcaaagaacagaacacccacgactgacaagctcaacctcagctgcccctacataatcgccgctgccccgatcgatgtgctgcaccatctcaatcgtatgatggtagagagatttgtgccgcggagctgcgcgattcgcgagctcatcaataccacggtggccactgcacagctccccgacgatggaaatgaaacccaatggcaacagctcttgctacgtgatagtgatttaaccccaatgacggcatctctcctcaggcgaaggtgaggaacgaaaccccaactcctcatggtcgcctccagcgacgcatatccacccaattaggaatccatagggggtaattcatactttttctatactataaaaaatatacttgagttacaacgggtgaaggctattttaatcaattattgttagaattttttttgtctaaaaagtatatgcgattttattttgatagtattgatatctaatttgggaatcttattgggatgatagtcatatccagtaagttgctttctaattatctggcaagaattctaaagcaattatgagtccgactctcgtcctttgtaaagccatataccacccccaaagggtatgaaaataccggatgaccttagcttttcaatgaatcctcatctcgtgtagcgaagtcctgttagtaagaccccgcacaaaaatggattatataagaatataattccgaatattcctccgggtgcgtatagtagcattgcgattccaaatcttttttctttatgaatagaaaaaaatcattgtaaagttgatatgtgagtttactaaaatgatttcttatacgactccttatgtatttccaaaagtgtacgaacttaaaaactaactcaatacgaatgacgtaccaaaattccgacagaaacatcttcaatttttataatagtagagactgaaaaaatacccatgcgttgcaatgggtaaaggcatttttttctagtgatacaactattaagagccaaggaataaattgaaacataactattgctatacattataattgaaaaggcgttgactcctgcttgcctctcttaacttccataagacagttacgtgcccgtgcaatgctgaagccgatcccgcacaatgccaaaactgttcactgatcatcccatcaaatcgattttttatcaatctcccaaaattgattgagggcttttgatccacttgatcagttctttagtttttcctaaaatcagagcgaatccgtaaaactcaggataaaaacggcggggcaagatcatctggataaaaatggcggagaagatcatcggctagcaatccttcacaactgttaaacagagattaaatcttgtgaattaatgccgaattgaaaggtgaaattatgaaggaaaggatgagtgaggagtggagaatcggtttttgcaattagttagaggagaaaatgcatgtggaggtagatagatttttgcaattagttagaggagaaaatgcatgtggaggtagatagatgtggcggcgatattagggttcggcctgggcggcgcggtggcggctggaggcgtgtggcaacggattagacacgtatagaggacgtacaaaatcaaattaatggaatcattacttattataggtataaagagataggttagatataaagataaatattagaaaactaactcaaacatggatgacgtaccaaaagaatgacatatattccatacgtatgacgtatattctatcaccatatgaaggatgtatgtacggactcattcacaacgtgagacagagatcactatctccaattgcgtttttcattttcagtgtccctacgtaatggttgttgtcctacctgtggttagcttccatctcattagcacacttcatacgaggaggagatgaacaacaaaatggagatagcatgtttcgaaagaaaacatgtaattaagatgattggaagagagagtagcagatggatggcttgtgaatgcatatataattaaaatatctattagtggaaggggaccacctgaaaagctttatagcattcagatatcagataatatttgtctataagaggagttggagggaaagcaactaaaacaagtgtagtcggtatcttagcttattcgtatgtactgctaacatgccgtgcatgtggcaacagaaaaagaaacggagaggcacaagaaaaagaaacagagagtgagattttggagtaagtcaaataaatatttgattacaagatttaacgggatatatatcaagatttagcggggtgatatatatgattagggaattaggcataggcgaggtttgtggggagaagggaggcgagcgtgcacgtagtagctgaaaatgtcatgggttcatattgaacttatggtgcttgcatgcatcaattagttagctaattagttagcgagactagtaccggtcagtgcatacaactgttgcatgcaagtagttagtagtggccggattgagtggatcgagtggagcatgcatgtgtgggcatggcatgagactcagactaaggtgttgtgtgaaggtgtgtgtcgccgaggttatataaggcatgtattgcgttattagatttctaaataacagaaaagagaatagacatttgttgtcataatgctcctgcgttgattagatttccgaataacagcaaaagtatttgttgccataacacttatttacttacttgtataataatgtataataatttactaccttgggatggattgctggtataatataatgaattgtgtagaaatatacctacgtatttttcattcaaataaaaaaaaattcaatcagcgatcatggtatgtgatcgtgcatcactcgtgaaatcacactcgaaaaacatgcggtctggtacaatccttgcaatcccccaaattaatctctctctctctctccagaaggaagcccaattacataagagtgcgcgccccatgggcctaagtacaaagcagcaagagagttttggcccgtgccatgccccactatcccgtcacgggcctccacaactctacgtctaaagcccaaattctccacagccgcccaataacttgtcgccactgtgatcgatggatcgatctgtcacatccagtccaggacgattggaagagaggaggggagaggggagagagagaagagaggtagaagaaagtgctacccactaacatgtgtggcccgtgtgggtcccacgccgactcagcttgccacgtcagctaaaactggttataataatgtatagtatttcgggtgattcggttttgtaaattaagggacccgctatatctggtatttcaatttagggatgaatttcggactcggcgataaattgaggaacctaaggtaaacttattcctactttttaacccgcaaccgtctgagggttttcccgaatgcctaagaaagcccaattatagctgagaccgtatgaggcccatgatatgaatacggcccacgctaactgatcaaaggctagcacgttcgcggataaaatttaaaattatactgttgtagtttttttctcagaaatatactagatgcgaaaggatttacacaaataaaccgtcgtcgtggtttgaaagtgcgaaatcacaatgaaatcgtaagacaaacgcgcaatactgacagaaatgtgctgtcacgggcggtttcgtaaggcagaaatgcgagaccgacttcggtgtcgctaattggccgagcgggagagctattcagcctcggtctcgcttgttgcccgagcgagatggccacactggccgctaattaataacacaattaatcatactaattagtgattaattaattaccaatgatattaattaaagagataataattaattaattaattgctaatgacactaattaattaattaatcatgtgagtttttgggtctccggactcgcagcgcgatactgcgtggtgtcgcctcctctccacgcaagaccgctttatcacacacttgccttatggtcttggattttttattctgcgatagtggtatatttttgttattttcttctaaacatgtatatacctataaaattattgaaaaaaacctctcatatttctcggatgctttcatccactaggttatctatatatttaacgtctgaaaatttatcagaatacgcaacggaaagagatgaatgtgtcatgtgtgacagtagaaaagtttagcacaacacaaatgatgtgttatcctatcttactataaagttatcccccactaactccttaagcttaacatgcaaagatgtcacatcatcatccactaacgagatgccacatcatcatccactaattaacaatatgtcacatcatcatccactaacaatcattacatttaaacatcatgcaaacatgctatatctttatagtttttataatttaagagcttttcaaatacaaacatgttaaattatcatccaacataattcacataatgtttcaatgtatatcttcatgcaaagatgccacatcatcatccactaattaacaagatgccacatcatcatccactaacaatcatcacatttaaacatcatgcaattacatgctatatgtttatagtttttataatttaagagcttttcaaacacaaacatgttaaattatcatccaacataattcacataatatttcaatgtatatcttcatactaaattcccgcagcaatgcgtggggtttcacctagttaactgaatagctagatcatgcatgttggacgaacttggcaggaaaagagcaatatatatacgcacgagcatcagatagggcgtgagtgcgtcatgcactcatgcttagcatattgttgagcaatgtaccgaaaaattaatgttttctccccatatacatgttcatctctattttcatcctatgaaatgcatgcatcatctgtaaaatcggttggctatatagaggagctaggtaaatggacatgctcattctctttgagaagttggtgtctcttggacaagactttgagttaagacttctttacttttgtttttttgtgacactaagacacgcgtgtctattagaaaagttagagataatctggtcaagactttttttacataaggttttttattaatacatgctaatcctctttgaaaagttcataggacatgtagagatgttggtgagaactgaatagatataaacaagctatacttccttgaacaaacaataactgaaacatcgcctgagaacatgctagagtataattcttatcgccacatgctagagtataattcttatcgccacttggaagatataaattttgttccataatcaagttagataaccctaaacgattaaaatacatgttgtaaacataattatgcattagtttctaatattgagtatatgatgagatttaccattttgttccacattcaactacggatacagcatgagcgcggcggggtcttgagcccccactactggcgtgaagactataaagaccccactaaatttttttagcatatgtagatgggagaggggactataactctatctagtttgcttagaacccactgctatttctttctggatccgccactacgtaatcctagataattgaaatatatgcatgcattagtttgtaatattgagtatatgatgagatttacctatttcatttgtgtttcccactatctaattttgttgaaaacatatattatataataagaggtgtaatcttttcatattcgtctaagtgagaacatatatattatataataagaggcgtaatcttttccatacatgtctatataagtgtaattatgtgccgaaaaactgccttgacatagtggtacttttgttgtttcaatattcgtttgtagaggaggtcaatcgccaccgacctgcattcctgaacaagccccgtttgatcgatcgaacttaaatgactattaatgactattggcgcttgaaaaatgacatgccatcatgtgttttctggcatgaataattaggtgaaaccccacgcatcgctgcgggaatttagtatgataacaacaaaaaaaataacgtgtaagatagctacataacatcagattaagtaaattaatgtggtttatgataatttaaatttaaatagtatatagaatggtgattcaaactaaaaagtaaggtggagaaaagtagggagatagtttggaccgtagattaatcatctaaaggctaaaaacaattgatgtgatatgacttaattagagaaaaaaaaaggagaaagataatttagaccataaattaatcatttaagcactaactaagtgaggataaactatataagcatataggatatcataagacataataaagatatatattgaaatattatttaaattatgtgggatgataatttaacatgcttgtattatgcttgtattttaaaagctcttaaattataaaaactataaaattatagataatataacatgtttgtatgatgtttaaatgtgatgattgttagtggatgatgatgtggtatcttgttaattagtggattagtggatgatgatgtggcatctttgcatgttaagcttaaggagttagtgggggataactttataataagataggatacatgccaaaaccatgttattattgcacagtaaaaaacagagatgtataaatataaactttatgtctctataattttgattcgagtgagatatggcattaaaggtttttgttgtccttatagcgagcggaatgtattaatttgttaaaacacatatgttggcgggagctgaaattacaaagtcatgaatcagttaacaccaagaactccaatagatgccatcatcccaatgcaataaagaaatctctgaaataactttctatcacactagctaatacaattattatgatcgtcagtcaagctgattgtgatagtccatatatattggcataaaaaaaccatagttagagaatgaaaggcaattgaactatcctctcttggtacttttgcaacaaaaaaaatcatattgtttcattcatccaagtgtgtccttcagacaattgtggtatatagacatattggatgtccttaaacgttttaatctgattcggtgagctcacctggaaagcatttctatttgcggtacggttatggtgtaaaaaacaaagacttcaacaatcagaagcacctaattccgcatgttagtcaacatcatggcgtctgctaattcattatatttcccagatgacaatttgattggacgtcacagatgcttattgctaactatagttcgttgtcacaaacgtactcaaagaatgtgctaaagacagtgtgtacacttttgtggtacggattggatcttttgctatgatatttcttagacgattttttaaggaaaattgtctatatatgatgagtgaagaacaacacaagttgttcttccccacccccaatatatgtcctatatagtatggaaataaaaactcactatttacacctgaggtattatttgtttgaaaagttgtaacataaacacgaaaattccaaacaaagttggaaatggaaaatggatgaaagaaaaaaaagagtttgtttaggttgatttgggtaatttatatagatgcaatccactgtttgattcagaagagtaatacagtgttataatttctgtacaacaaaatatacagtacgatgcagatcaagactaatttcctttcagttttttcgaatgcataaaagctttacatgtcaatatattagaagtaacatttgaatacaacggtgacacaagtagtggtcaggggggttttgcagaagactaatttcacatcgcgattcgcaatcaaaacgaaccgaacagacctttgaaactcttgaacaagttgatcgtggcgaggtgttttacaattgtctctatccgcagtagaatcagtctggaccataagtatttttaccatccaatataggtataaaaatttgtggtaccttgagataccagatattggatggtaaaattgctccgaaaccattcatattaatcagacgccgagaatagagaccgtgaaggtactctcgtgtaattaactactgaggaagacataatactggtcaataaaatttccaagatcaaaataaacgtacacacattgttggaagtatctgatttcattctattttggctcgttaccggcgagaagaacgaacgaacaaaatcaacatgtgaagcggcatacgcttgtctcaccaaagatgccgacatgagtgacgtcatcgtcgttgttcctcaaggtagaagacgaattcccacaactctgccgcttaatttcttgttggttcgtgttcaccggcggcgtcgacatgatcgacatcgtcgtcgtcgccgccgtcgtcctcgtcgtcgcacgatcacccgatcgtcgccgcgatccggacgtgtggttcaactgcggcgccaccaactacacgggaggagcgcctacgagtccaacctcgagcgattgattgctgggctggccaagaacgcgtcgacgccgtcgctgttcggcaagggcgccgccggcgccgccccggacaccgtgtacggcgtggcgctctgccgcggcgacttacctcaacgtcctcggcctgcgtgcgacatgcgttcgctcggcagcgtccccgggctggctgcggctgggcagtgcctcgcgtcgctcgaagtacgctgggtcgtctgcacgcacgaccgctcggcatgtcctagctcgcggtatcttccggcacatgcacactcctacacaccgtcagacacgcgaactccatacgcgacgagcgagcgcacgcacacgtcgagcacgcagtgtccagtcggctgcctgcactgtacaccagcggtagtaaaccatgcagcgtcagccgcgcatgtctgtctccgagtgtgcggcacgcacccggtcaatcgtcgcgcactaggcgctgtgacgcatgcactacagcctaaccatgcactgcaatggatgactacgctccccaggcagcacgtgccgatggcaatgggcgagtcgctactacacttcgctcgactcgcgcggccgtcacggtcgcaccgacgcacgctacatatcgcgcacgcgggcgggcagtggacgctcagccgcccactgttctccgtacgtcttctacctctcatggcctccagtgcacgccggacctgcgtcccggcggctgctggcgctgcctccagagcatcaacgacatgacgacgaggtacttcgccggccgccgcggcggccggatccttggcctctggtgcaacttcaggtacgagacgtatcccttctacaagggacagccgatgcggcgcatcggctcgtcgggcgccgacgccgtagctccggcggtggcggcgaacgccgtcgcgtcgccgccgggagagaagcacaagaggaggaggaggaggagcaaagtcatggccatggccacgattttcccacttcttggatcattttgctgcgtcatcttttgcttcggattggtcagaaggtacaagaaaggtaaaagctactctatttcatattataagtcatttgactttttacttagttaaattttctttaagtttgaccaaatttgtaaaaaaatattaacattttcaatataaaacaaacatattatgaaaatatattcaatattaagttcaatcaaactaatttggtgttataaatgttattaatttttctataaacttaaacctaaagaacttcaactaaaaaaaagtcaaacaatggaaggagaaaactgtaatttagccacgcaattgtgcaagaaaatgagcggtgctctactaccagtattatcgcactagaagtatctcaacatttgatttatgagttgtaccgctcgtcggaaaaattattctatatagttgataggttagtacaaatagatatggtgtatttgattagaaaaatggtttagattaattctactaccgatagaaagcatggtagaacacctccgagaaaattagacggcagcggttttactgaaagaattgtttcaattctgaatttaggtgaagtgagcttgcagggtgatatgaatatgcagacagatgaagaagcattggcctggggaagagaagcatgtagttcagagttcacatcgttcaaattatcacaagtgttagatgctacaaacaacttctctgaagataataagcttgggaaaggaggatttggcccggtatacaaggtaacagcaacatgccctatcatacatagactcgtagagatatggaaatcttaaaatcagatatatctctttttttaagagagtcaaaaacatatggtccagcatctggtagctggttgctaatgaatatgtttcaaatcctcttacaagtcatacaatgaaagttattttcttagaaggatgagtaaaatgctgatatacagtacataataaatgtaaataattttggcgtgtacatctggttggatgtagagtccaggttttacccacttttttattaaaaaaatgtacataatcatttatcactgataaatctgttttgatgttttttcctagggtcagttttctgatggatccgagatagcagttaagaggcttgttgcttcacattcagggcaaggtttcacagagttcagaaatgaaatccaactcatagccaagcttcagcacacaaatctggttaagctcttgggatgttgctatcaaggagaggagaaaatactgatatatgaatatttgccaaataaaagcttggacttctttatctttggtattacttctcataatatcctagtgcaaattcatagctaaatctggctgttggagttgtttttatcaactacttacgtttattgatatgcagatgaacgaagaagagttacgctaaattggaataatcgcctagcaataattgaagggatagcacatggacttctttatttgcacaaacattctcggctgcgagtcatacatagagatcttaaagcaagcaacattctcctggactgtgaaatgaatcctaaaatttcagactttgggcttgcgagaatattcagctcgaatgataaagaagaaaacacaaaaaggattgtcgggacatagtgagtttttcttacaattagcacatccaaattatatcatcaatttacataacacaaacttcacatatagtttgtttctttataaattttacctatgatatttcagtggttatatggctcctgagtatgcttcggagggactcttctcaattaaatctgatgtattcagcttcggtgtcctaattctcgagattgttagtgggaaaaggaactctggttttcatcaatgtggagatttcttcaccctacttggatatgtgagttctttttcctatacataaacacataacattgtgttgtcttgtagtaatcaacctctatttattgtgaccaaattacttgaaggcatggcaattgtggaaagaataaagatgggttgaactcttggatgcttcgttgtctactgaattgcatgcatttcagatgatgagatgcattaacattgcattgctgtgtgttcaagagaatgcggctgaccggcccacaatgtcagatgtggttgtgatgctaagcagcgagaatatgacactgcctaaacccaaccatccagcatattttcacataagggtaacaaaggaagaggcatccacagctcttgaatctcccagtcttaatgatgtgacaatgtctatcctatgtggcagatagtttttttttttttggtttgtctcatatatgttttttgtgcgattgctttgatttgaaggggatgtgttctatgtgtcatgtctaataatatttgtcaatcatagacgagacaattgtcaatgactagctagcttagttgctgcaaaacttacatgtctgcatatgagctttttttttccagtttttgtttgttcgtgaacagagaggatgtaaaagaagaaattttggccataccaaatcccatctttatgcatcagttggcaattctgaacaactgaaaataagatgttttaattgcttataccaattgtattcttaccagaatgacaaaatgatgttattttttaaccaagcagtatcattcattttattgccagaaagtcacaatgatcactcatcaatatataatatttcattataagaatatctggtacattttggatattcatacattccggtcgtcaatttgaccatttgcgtatactaaatctcatagcattgaacaaaactgacaaaagtgtgggctggtggccagttgccatgtcaagagttggggcaagccaggcgatgcggttgcaatggggcaaaccaattaatgtcaaccattttaggttttgaaaccaattgcctcaacatttcagcttccaccaacatgtcgtgccaccgacagtggcgtcaggcgtcttactagtaatgtggtgaaaaatgtcactatcctcacatttttctctttattcaggcagcagcagatgccaaaaacatgtcctttagacaaaggatcgatgaataacacaataggtctgtccatatatatatatacctgaagattagtgtaaatatcactacgaaaacaaaggcaacacactgttgtctggattgttcatttctaagtgactgcaatagcttacagtcactataaaaactgcattgatctctcgttagcttttgtgaaccacatcacgtacatgacaaggagctcgccaccctagctgcctgctttcgtacctggtttttttgaggatgaacagcatcgaaggatttttgaggatgaacagcatctcgaaagattttgcacatgccggccggccgtcagtattgcaagcttcctaagagcatttgcaatgtgggtttttgagaaggtgctaaaggaaagagtaagagaaagtcctaaatattgccgatgtgtagggatccggctcctatattgtgctttgtgctgcagtgcagaatagcgatttgcaagttgttaatgtaaagcgtaatgtacagaggtactgttgatgtgccctgtagcgctcgatctcgttcgttcgctataaatcggacggctgagaataccctctcttacttcgcacattgtagcatcctatactgacaaacagtttcatgaaacttaggcaccttgctttgagcgaatatagtgaaggagaacgtttttttttcttattaatattggagaagaatttttttctattaatgactgcaacgaaacaaaataatagccactaaactgctcaatctaatccatttctcgtgtaggaatggtaatgcaaacgcgggaggtgaataacatcgaaaacaaatcgtccaatacgttctgctactcgatatattcctcacaatcgggcccaagacagcccagaaagagcttaggtctgggccttctgaagtctcgtcaaggaaaggccattaggcccgttatacaaatacagcccacgcaagccagtccggtcggattgggggcttgggtttttttattttatttattaaaatatttaaacaaatagttttgtttcaaagttttataaatctacacccctaacgcccaatgtacatgtgtcacgtcataaaaaaacaccatctctgaggcgtcaggggtgtagatttgtaaaactttgaaaaaaaatttgtaaatattttaataaataaaattaaaaatttaaaaaattcgggggcttggggcaccaatgcaacatattgagaaactaaacatcttttaaaaaaaatatagatgtgaatgtgtaaagtgtgacagaaatatttttgtatcatgcatggttgatgacttatgtgctcaagtagagaaagtttaacacaaatgatgtgtttttaactaaataatagctggtagtgtgagcgcagctaggatgttcacattggatgaacttgtatgcttgcgccatacacgcatgagcatccgttgagcaacgtgtggaaaaatgtttctttcccatacatgcatgttcatctattttcatcatgtaaaattgattggctatattttttttagataatgaatagaaaaccatcctagcctttgcgagctacaaccaattattacaccaattcgttcaaagcgagtgcaactcaaagaaaaaaaacattttataaaaaacactcccaaacatgaagcaaacccaaactaataaaaaacagctatataaagagagtaggagtgaacggaacctctttgtaaagttggctataacgtaacgtttacagcgaaagcccattgcgtttttctgctgtttcctagcgatgcaacacaaaaacgttcactatttgttagaaatcgtatgcatagcattttcgtttaatcatgtgcatgccatgtcgatcatggaccggatacggtgacgaagaatcgaggagattgccaccggccggcctgcatccctgcacctacgtttgtatcgtgcaaaacaagccgttcaatcaaacttaacgacttgttggtgacatttctttaatgtgagaaatgtcatgccatcatgttatttttcacaattaatacacgccaaaaccatgcatgttgttcttggacaaactatagaaagaaaagccgtataaatataaacctatgttgctaaatttgttgatccaattggagagatgaggcattaccatcgaaattgattgattgttaatgttgaactctgactgatattatagtaataaaggtctttttctgattttttttagggatcaaggtatattaggttgatgaaacacgatctgaccatcatagtctaaacctgatattatttatcttgagaagttgaactattattagagcgagtgacgagtgagatgttagcaggagctgaaattatgaaggcactattggattcaaagcaacaactttatttccttatgagcattacttcaaaatactatcccatggttgcatcataaaacaaaatattctcaatagtatctagagtcactcaaattggataaagtgaggtaatataacaccaagaagttcggaaaaattacgaagatttattatgtataatcttaataaaaactctatacgaattattatgtataatcttaatggaaattgtatacatttggcattttgttcatggtattttacatatttctccctctagacgttttagattggaggcattattgggtagataattaaatatattgaaggatttgcatcttatccatttttgttgatgcttaatcacttttttgttctattatatggaaataagcacctacactacatgctccctccgtggacatatgtttgtcttaaattcgcagtaataggatatgtcacatccggtactgatttgttttatattggacagaggagtactacacacccataagttgcaccattaatacacgcttaattagttagaatttaatttgttcttttttacaacctatagtttttaaatttgagcttgcatgtttgtagggtaccacgttttgatcaaaagttttaattttttttttcataacttattgcatggcattctcttagtaggaaatagacaagcccaagataatcaatcaagtagttttgtttgccatacatttatgatatatccacttatttcccgggcagaagtagtccaatttttatccattggattcagtgattcagtccaaatgtgtgataaggctttgatgtatttcaactagtctatctatctattatatactaaaagcctattaaacttcctgcaaacgctctcaagttatcacatggcgctctaataaattagagaaaatcctagaaattctaagaaaaaaagtaaaacatctgccccgtaattttcattgattggctatataaacgtgaaagcctgtcacgtttttctgttgtttcctagcgatgcaacacatgtcgttcaccatccgttagcaatcttatacgaggatcgatatcgtacataaaaaacgtacgcatagcattttcatttaatcatatgcatgccatgtcgatatggactggatatggtgacaaggaatcgaggagatcgccgccggctggcctgcatccctgcccctacgtttgtgtcgtgcaaacaagccgttcaatcaaacttaacgacttgttggtgacatttctctaatgtgagaaatgtcatgccatcatgttatttttcacaattaatacacgccaaaaacatgcatgttgttcttggacaaactatagaagagccgtataaatataaacctaattgcatagatgagtcattactatcgaaattggttggttgttaatgtataactctaactgagattaatagtcctgattttttagggaacgaggtgtacgaagtcgatgaaacatgatcttgagcatgcaagtgacatgttggtggaagctgaaattaagaagacaatagttttgaaggaaacaactttagttccttccattagttagaatttaatttgttgttttctatactctataataggtgttgaatttgaatttgcatgtttgtaagttccccgttttaatcaaaagttttaatcttttttcataactaattgcatgacatcctctaaataggacatagacaatcccacaataaataaacaatctaaaatagtttgtttgctatacatatatgatatatccacatgttttctgcccttgcatcacagcctctaaataggacatagacaatcccacaataaataaacaatctaacatagtttgtttgctatacatatatgatatatcacataatttccgggcagaagaagtccaatttttatccgttggatttggtccaaatgtgttatgagacttttgatgtcttccaactagtttaactaaatatctatgacacactaaactgcataaagcaaaatagttgaaacactttgtagataactaaaccatcaaaatagttctaaaaaaatataaaaacttttttaaaaaaagggtaaaaaatggttcgttttttaccactcagattatttttccataaatcggatttcaaaacatttgcatttttcaagcttaattttatcgagcaaacactcccctttttttccatagactcctcttctctgttcgtgaatccaagatccgcttctttctcctgcggttgctctgcgctctcagcaccaaccaaatccccctccaattcctcatctttcttgaccaattcttgaaatcaatcagacgcaataatcaaccactattcttattatagttggatcataattaatcaaggttccgtgcgtcgccactgtgatttgtgcacttgcatttgatcgaattcgttgccgttgattgcgtttcttgatgttgtgtgttgcaggtttgaggtggatccatggcgatcaagggcggcggcgggtcggcggagaacagggggcggagcccgctcgccatggtggtcgccgtcggcctctgctgcttcttctacctgctcggcgcgtggcagcgcagcggctacggcaagggcgacagcatcgccatggccgtgaaccggcagacggcggcctgcggcggcgtggggctgagcttcgagacgcaccacggcggcgccggcgtggagaacgagaccatggcggcgccggcgccggagttcgcggcgtgcgcggcggcgatggcggaccacacgccgtgccacgaccaggagcgcgcgatgaggttcccgagggagaacatggtgtaccgggagcggcactgccccggcgacggcgagcggctgcggtgcctggtgccggcgccgccggggtacgtgacgccgttcccgtggccgcggagccgcgactacgtgccgttcgcgaacgcgccgtacaagagcctcaccgtggagaaggcggtgcagaactgggtgcgacacgagggccgcctcctccgcttccccggcggcggcacccagttccccggcggcgccgacaagtacatcgaccagctcgccaccgtcgtccccttcgccgacggctccgtccgcaccgtcctcgacaccggctgcggcgtaagcgacatcatcgccgaccacgcgcgccgccattgattcattccaccatagctcgctcgctcgctcatggaggtgttcgtccgtgcgtggcgtgttcaggtggcgagcctgggcgcgtacctggacgcgaggggggtgatcgccatgtcgttcgcgccgcgggactcgcacgaggcgcaggtgcagttcgcgctggagcgcggcgtcccggcgttcatcggcgtcctcggctccatcaagctccccttccctccccgctccttcgacatggcgcactgctcccgctgcctcatcccctggtccgccaacggtaagccctaccctcaccgccaccgccgccgaacacgactcccaatgcacacatatactacctctgggggcaactccaaaatttaagattagggggtgtggggtggggaagaggccataagaccgaataaccaatatcgatagcaaatgatgtcaaatagtcaccgttaataacaatcaatgtgtaaaatagttctttaaaaaaaacttaaattttagctttttaataatatcattaaaagtttggaactagactttattactaaatccttttaatgtaaactaatgaataatctcacaaataagaatcttctattttactttaaaaagatgagaaatcacaaagtaattttgtagatcatgtttcttgctaatgtttttagactttctaactaactaaattgataataattgtaagctacacaaataaactagataaatacatatcttagttagcctcaatatagagtaaaaacaggaggcgtgatggtggcggtgttcgtataggggggtgttgacctcctctggcacccccatagttgcgccactgactacctcaatttcaaaatgtgagacaccattaacttttcatatgatgttcgatcattcgacgaatttaaaaatttagtatatatatgcacaagtataagttaagactatagtttctttagtggtaaaacaagtcagaacaaaataaattaaattatagttatatttttttaataagacgaatagtcaaacgttatatgaaaactaaatggtgaatcgtcatacatttttaaatggacggagtatatgctgctccctccgtcccataaaaaccaatgtgacacattctagtactatgaatctagacatatccatgtccagatttgtagtactaaaatatgtcacatccagtcctagattttttttttttttgagatggagggagtatgtagcaagcgagcatgaactttgatgcacatgtcgccggctcgcgcgcgcaggtgggatgtacatgatggagatcgaccgggtgctccgggcggatggctactgggtgctctccggcccgccgatcaactggcggaccaaccacaaggcgtgggagcgcacggaggcggacctcgctgccgagcagcagctgatcgaggagtacgccgcgatgctgtgctgggagaaactcgccgagatgggcgaggccgccgtgtggcgcaagcgccccgacgccgctgttgtgtcttgccccacggccacgccggcgccgccgaggacgtgcgacgccgccgccgccagccccgacgacgtctggtacaagaagatggagccgtgcatcacgccgccccaagcggccggcgaggtgatgctgcggccgttcccggagaggctgacggcggtgccaccgagggtggccgccggcgaggtgccggggctcaccggcgagtcgtacgcggaggagaacgcgcggtgggagaggcatgtggcggcgtacaggaaggtgaactaccggctcgacgccggccggtaccggaacatcatggatatgaatgccggcgtcggcgggttcgccgccgccgtcttctcgcccaagtcgtgggtcatgaacgtcgtccccaccgccgccgagctctccacccttggcgtcgtctacgagaggggcctcatcggcatcttccatgactggtaaattcaacctgcatttccatttattgctttccatgacctgaatattactacctcttgtttctctctgtataacgttgattacttttcacgtaacgtttgatcatttatcttattaaaaaatagtataaatatataaaagtataagttaagattacatatagtttctttgattataaaagacatgtcacaagaaaataaataacatttatattgtttttttataagatgaatggtcaatcgtcatatcaaaagtcaattgtgacatacattaaaaaaacaaagggtgtattatccaagaatatgtaaatatttttctattgattatttttcaccttcttctccttcaggtgtgaggcattctccacttacccaagaacatatgacctcatacatggcaatggtgtcttcactctctacaaggacaagtgagtctcactcacattctgttcatatctgtttcttgattgcttcctcagtaagaaataagtaaggttttgaaatacatgtagtcaatgcatttaaactttgactatcaatatctctttgaaatttttttggttcagttctgaaaatgctatgattgtatttttctacaaaattactttcaaaataatataaccttcatacatttttatgataataattaacaattcaactagtgtcttgtaaccatgttaatgtccaaaatgatatacttatttatcactggaggaagtatatgctaatcatgctgctatgctctgttgagtgatctctgaagtgatgagaaattatgaattcttgctgtttgatgatgttctgtgcctaaacaatttgttggttttaatgtgtgagagaaggtgcaagatggaggacatcctgctggagatggatcggatcctgcggccggagggcacggtgatcctccgggacgacattgaggtcctcctcaaggttcagaggatcgcgagcgggatgcggtggaagatgatcatggcgaaccacgaggacagcccccacataccggagaaggtgctctacgccgtcaagcggtactggaccgccgacgacaagagctcggagccggagccagagccggagaagatgaagaagaaggcggggagctcttcacaagagaggagagctccgaggaggaggaggagagtacagcaagttcttcagaagagaagggttcagaggagtaagaggtgctgatcatgtgtgattattttcagttgttggggagttcaattcttttcagtgtgataggggagatcaggagttgtgttctttcgatttgatgattgtcttaggatgaacaatatgatgttcggtagcaggacttagcatttccatagattcaagaagcatatactttgcatgtctcatggtttcagctgtgcttgttgatcatttctcatagccataaacatgcagtttgcaacagattacaaatatttcttcaacttgtaatgctgaaacaagctgcccatgaacatacaagatcagattttcatgacttggtgacagggatcatataattatcatcagttaacactgctatcgaattgcatcatttttctctcttcctggtaaacaactctgtaatatggcaacatatatccgtaaaaggactggaagtggaaaactatagtcaaacgtgatctaagtttcagagcaagcactacaaatacaaattacaacagagggcaactatcacagtaggtatcagtaagcgcttcgcagtatttacaggagtgtgtaactatcaccattcaccaagtatcgatttatcgattcttttttagcaactgtcaagtgtcaactggccggctagcccttttttcgacctttcttgctgccgctgctgttttcttcttgagaagattgcgggaggctgaggcgaagctgccctggcaaagaatccgtcaggcctgaagaagtagccggggtgcttccacttccagctcgggatcgttctcgctctgttgatactgaggtccctggaaagagctgcagctcctgaggccgtgacgcataaacctggctggcaccagcagactgatggtgctgattgtgcaacggagataatgtgtttgttgggtgcaccatagctaaattcggaccattgccccatatgtgatgtggaacgggttgagttgctgagttactgccattgttggctactggttgtgacatcgcaagattgctttgattgaggtggttgtttcccatccttgcacaaatctcattatgcagttctaatatttgggctctgagcatgatattctcttcttgcagctcattattctctgaaccaacctgttaatatgttcattttagtattagctgcaaaggcaatgatgaatagtacctaaacaactatcggcaagtaataaatcaagcaaacagttgaattaacccactggaaatatgagaggaaaaggtgaataagaaagtaatgtctgctaattacatatttgcagtttccatgaaggcatttcaactgcaagtacacctatgtgtgactgttacaggaaaactacattactatatgcaacttaggttctacttataaaacacaccaatttcattaaaacaactcacgtattgacgctcagttagaagagcggactgttcctttctgagagattctacttgagaaacaagatcccgcagaactcgtgcagcatcacctaacacagtagcctttccactattttgtcgttcaggatctgtaatagcagaagtacaatgatcagaaaaggtatatgaatttgatatttgaagtaaaactaagagcagtaaacacaaaaaactgtttggtcaaggtaaggttctccaaataattcatcatgtgaagaaagttcagtgcaacgcactaaaatttatatgcaccaatcagcagacaactttttctaactgtttatcaatttgcacaattatgtcctagatcagcaagaattatttaaattctaatattttattacatgtgcaccatatcagctctgcatatatttctaattatggagtacaataaatgtagcaaaggttaacattgtgctgttttgacaaattagcatcttcattcatgagcaggctgctaccgaattgtcattactccatatcagatgaagttagcatggaagatgccaatgagcaataaacacaaaattatggataaattcatggtttattcgcattgtgtacttgaacagtaagtggccgttcaaagatagggttaattagatctatgcagtttaaagcaaagataatgcaaataaatagcaatcttggatttcagattcacactaaaaaatagcattgcatcaatcttttgtagggaccaaacaagattctcttgaaattttgttctcagatggaccactcaaaagggggcttcgaataaagcaggaaagccagaacttcacatggggatattttagcaaattgaacagtgtaggacccattctttttgggatcatagaatggcaggataggaatggcacagtctaacactgcaaactccaaaatagatagagacaacatataactatgggacaatagcaaataattgaattcaggaactaacgtatgtccacttaggtgttgtattcctaatttcatactctaaacaatacgcacatacttacatcaggtacctgcgacctgctaaaacacaacctaatttaagttgacttcgtattctccgcaatgtacactcagttacatatcattaagtaattaaaggaaagatggattcaagtaatagaatgcaagttgctggtactaatatttattttctcgaaagagcatagtatatctactataaagatatgacattgattgatgatgatgggactgtgctaaccaagcatactgctgagctcaacaaaaaggtcattcaactggtcacgcttaagtttctctcgttcagctttatgagttttctttggagccttttcctgagatcttttgtcaagagacctgcacagaacaaaaataagcatcacggaaatagaagtacatcatggtaggaattgcactgctatgggaaataaatgtgcggaaagcatgaacagcaacaagattcagaataatctgaaagtgcacatgtaaacataggtcaattttaactcactgataaacttaaaaggcgaagcaattctgaatcatggtggatatctgaatatgaaactaagcatcatacatattttgattatcaaatatcatgtaacgtaagctccttaaatgataccaattgtcaactgaattgatgttttgaatatttaatattattgctactctgtcagcaacttactatgggcaataatttttaatatctactctttatgcgaaaatcattacagcacatataacagataaataacttcaaatctatcatccatagtgagctcactcccccgtcatatgacaggatcacagggtaaaggagaatggacccaactgcacgatcctgtgtttagtggttactcttgtcataattcctaaacagtctctatctcaagaaggtttcttgtcaactatgtttctaataaaggaaactctatcgtcttggatttgtccatttgtgcattgtatataacctttctctttcaaagtgacttcagagaacaagtctcaagcatacggagctatggttagcaaaagaatatatgcatgaaaaggagaactaagacgaaatagatgatgagcagtgctatacatactaaaaaaaaatcttaccaacaaaattcttggaagttatagaaaatcaagattcaatcatagtgtgccacatctgtgtttgtaaaaattcagtaacattttctttatgtgtagctttttcctcagttggttgatcatgatgaaggcaagtttcttgtgcttgaactactggccaaattacgctttcatgcacttttgcaatggatatttacaaattacagctagtttcaatgtgggaaccaaaccatggagataaaaaaaagagagagatattatgattgacgggtagatgttggccctgtttagttcacatcaaacttccccccaactcccaactttccatcacatcacatccaaaactttctacacacataaactcctaacttttttttcaaactaccaactttccccaaacttctccccaatttcaggaactaaacacagtcgttatcattgttccacaacaatagcccaaaacaagtagtacagaaaatgtggtgataaatacattcagattcggcaggatattagaaatgagaatgtaagcacgttagccaaaattagagcataaatacaacctaaaagtgtctaacgcgacgacaatagcctaattgtccatagcaataaaaagacattggttattgttatgaagcttaataaatgggaattggataaaaagaaagtaaacagttaacaacgaacccatcaacagccttgtcagaagcagcatttgagctgccacccagtgaccccgagctctccgtgtcagccaccatgcccagattctggttcctgcatcacacaaaggtaatactggagcaccaaaagaaacaaggctcaaaaccaaatcgaaaacaactcctcctcctccaaacatcatcaaactattagaagatcaggctcagtccattcaaaaaacccaacaatgataacacagaaatcaccagaagctacacttttttatacctacacaagaaaccaaactacaaatacacaagaactaaccatgtgtactaggagacaaagctagcttagcccgaattcttcttgcaagaaacagtagtactaaagatctgcacataatcccaccaagaaaccgttttcttctctttcttttcccccacatcaagaacaagaagccagcatgattagttaaccaggaggggggctgacctcacttggggcatggggaggggggttcacccccgaacccccaaaatctttctttcttggaccctcaaccaacccagccacccgatccggcaggtgtggaaggggaaggaagccagtcaggcggggtcagcaagaagaggaggagaaggcgacgccgccgcctaccaccaccaacaccaccaacaccagcttgagctgcagatttgtaagaaggaggaaggagaggggagggagacgaagaccgagagggaggggagggtggaaagtggaaaaggtgggggaagaaggcgagcacgcggcgagcgtgtggcggccacccacccgcacacttgggtgatccggacgccagcgagctgacacatggcgacgacgacgacgaatcccgtcgccatcggtcccacggggaattcgcggatcgagaacaaaagctgagctcccgttggattgggatgatggatcatggatgggatggcggaggaggattgggatgatgacaactttctttgcttgcttcttcgtcacctctcttggtgataaaaattcgatctttattcgttctgtccttgctgtaaattgttgatgccattcttctttttttactacttcctcagtttaggttatacatctatgtaagtaaatatgagcattgctagtaagaaaacttgaaacagagatagtactacctttatcggtagtatattatttatgggttaaatccgatttatcttcttaactattcaaaagtttaaattatccttttaacttttatattatacattttacaccacataattatttaattcgaacaaattaccccttttctagctattaggtggttttggctctcatatgtatgtgcaaagccaaaaccaaatgtgagactagtcacctccttcctcgtgcatctaccctcctcactcgatcgtgcaaagcaaacctcaccaaccacctccaactctaaggcaatgtttggctaatgggaaatggaaatgatttcccacccaccaaaaggcatctttaaatactaaccattcattctccctctttcatttaatcctaacccttcattcatttcccaatcccaatcccaccctctattttccattatccaaacacactctaagttcttaaagaaaaaaaaaactccaaaactagctacacacgggccatccagccccatcatttggtatattggagtaaaaagcaaaacaacatatttatcgaatgaaaaataatttgtgaatataacttttatatacgtgttcttaataacgatttaaaaacaaatgaaaaaaaataaactacgataaaaataccttaaaatcgactctaaatttacggttgaaaattcacgaagccgccaccgccgtttcgcatctcatcctgaagctggtgctgcacagcataaaaaccaatagtgtgtggcgcgcctactctcatgctaaaatctagccggcatgcatgcaaagatgcaatggtgtaagggcaggattaaggccctccttgtttaggcttataagccaacttataaatcgaaaagtttaagcctaaacaaacaagcagctttttcatttgtcttttttgaagctgtaagccactctaacactattaagccaaaagctaggttagagaagcttttttggcttatgtgaggtagatgtatgactcaactactaaatttaggacattaaatctaccggcttataaatcatataagccaataaactgacttgaaagtctaagtcaataagtttaagcctaaacaaaagggcctaagtcgttttgcctgtgagctgagtcaacctgatcaaataactcacaaggtgttgcttccgactattcagacttgagagcagtttactactcgtacaagatagtggccttaattaactatttgttgatggatgcttacgcaaagactagctaccttacttccctaaaacctgtattaattatgcaacatatatatgtagaacacttttatgcgcacacagcgtcgatttcgagagaaagaagctgacaaattggtcttacgatttgtttctaagggcaagttttataatataggttgttgttacctctaatttcatctctatcaccaatctataattaagaggtaatctatacaataaaagttacctccaatacacaaaacccaataacttgctacaggacactcaaagtatgtagcatttatcatgagacacccaaagaacgtgtatcttctcgtggacattgcaaaaatatggtaattagctgctggatatatgtctcattattttattatttttggtggaaacggagagagaaacattggttaaagacaagtttgcccagggacccacttctcaatctctctttctttgttcatcttcttatgtggctaccttctttctcatgcgcgtgttgtggcagctatatagcacgtgcaacagctggctgggctagagcacggggcggcgcgccgccactaggtaggggtggacgaaaagctcgtggctcgttagctcgttcgactcgcgacaagctcggctcgactcgtttcatttttctaacaagccgagctggcattttagctcgttagagataacgagccagctcgagctagctcacgagctgctcacgagccttaacaagcccatacctcatcaggctgccaggccacaaagcccataggcccatttatttagaaggcccaatagacaatagtgagcactaaaagtgaaaaccctaggtcattcccttatccctcccctgttcccttgcggctggtggctgagttcccccacacccgatgccaccgctctttgcctctcccccagcgcccgacgtcgccgctctcccccagcgttctcctgcagcgcctgacgccgccgccacctaccaacccacccacctgcggcgccgcccggcagtgaacatgagctcctccctatggtgtcggtgagctcgagctcttctcctccgccatagtgctcctccttgtggtccaagtgccggcggaggtcaagctcgtccccttcaccgtcgtgctcctctccgtggtcaccggcgagctcgagcttgtttcctccactgtcaagctcctccctatggttgcagtaccagtgaggtcgagctcgttccatccaccgtcaagctcctccggttctccccgtggttgccagcgagctcatccccatggtcgcctcccttcttgcttgcccccatagctcacgagctaaatcagctagctcgatcttgcagacaagccgagccgagctaggtttctagctcgttaggataacgagccgagccgagctagctcgttatcctaacgagccagaccaagccgagccgagccagctcgacatccacccctaccgctaggagtcctccccggggctccgtttcaaatcgggcaacagcgaagtgggcgccaccaccgtcagccaaatcctcgcgcggtatacgtgccccgtccaccatttttgccatgggtagatcgagagggatggctccgcccacacggacgagtggctcatcctcctcgccggaaggggcgtcgaaccctgaccctaatcttctcgaagttcaacaatttcctcttccacacgctttacaccgccattttctcatgccgcgagctcaccaaattggagctcaggagctgccacctcccggctgccctcggacttctcagggttcccaaatcttactatgctaatgcaacatcctgaaaatgcgtcattttctaatcctgcatcatgccgattattatgttcttaataacttcctaaacctaggataatataattagagggacctcctagaactaactcgcacaaaacctctctggtatttaatctcttttgtgtttttcatttaaaaatatatatttggttaaattgaggtgtttcttgatttggtttaaaaccttcttttgattaaattttttttattcaaatttagtttgaaaacccctttttattattatgaattgtggtccaagaaattctccactattgtcctagaacctaaaccaaatgattccaattttattggatttaattgtcgacccatcatttgattttaaacctatcctttgattccaagcctattcttatttatcgccaaatatctaaattcttccttttgatctagccgctaatttaattcccgtggcttgatttccttctcggtacaagaaaaatattattacaaatattgtgaataattgctcttgtgctaagaaaataaatttatatccttgtcacctaaatttccttttagcctcaaacaattccttgaaacccatgccatatattttagggttcaaatcctatccttttgcctccacatattttcctaccacattccaaaaaatattttgaggaatactattaatttacttttctatttgagtgcttccaaataaattccctcaaactccacctctaaatattgcactcaaataaattagaaaatctcctttgtgaattctctcctaattcaaattcttcgcaaaacctagttatccaaatcaagtatacaaattagacttctttctttttgtcatcgggccgaaactccgttctttcttccttttggcccaatcctttttctttctattttcctccttcctcttgggctgccggcccagctaagccgagccggcccagttcggcccacaacccaaccgcctccctcctcccagtgcgcgtgcggcgcacgccgccgcaaccgtcgccgctaaggaatcaagtcggcgccgtcatccttcttcccacgccatcgccgtcgccgattctcccttgtcttcctcctcttcgaaccgcctctcatcgcctatataagaggatgaaccccttctgtttatcccccacaaaccgagcttgaagctctcctctcttttctctctccttgccatggccggctatcactgtcgtcggccgatctccctcaccggagcaataccggccaatccctcgcgccatcgagcttgcctcgatgagaggaatccatttttcccctttcccctcttcctccacctctgaatcaaacctcaccggagctctctctctcctcccggttcacgaccttccatccgccgttccggctatttcccttactcccttttccggccactgccatccctaggtgccttgcagtcgggaacaccactggccgccggcgtcaccgcctcctcgccaccggagcccggcgccccctctcctcctcctctctgttcgaccgaggagaaaaagaagaaagagacgggaagaagaagaagaagaagaggagaaaaagaaaaagaaaaaggaatccctgacaggtgggcccatgaacagtatactttcgcaatttactctatttaattcaaattccaatatttagaagcccatatctcctaaaccgtagatccgatctcagtaaaacctagacctaaattcatctaaattcaaatgcttcattttgatgcctaatttgttattttataattttatttgaatttattcaaatatcatttgaatttatatttgcctttttcaaatattttcttttaccccaaaataccctttagccactaaaaagccgccggttggaactttatgccttccatggggacgtttgcggtctattggccccaacgtcgaaccgttggttgtaaatcccggcaaaaccaaacccaaggtcgaagtgctgctcccggcatcccacgccttgatgcgtacaatggtcggagcttcactattccctcgacctccacagcacgccgtacagttagctcttgagctctgtgtgatcctagccgctccgccgccactcacggttgtcggagtaacacttccgcctcgctagacctgcacaaacctcccatccctctggccgttatattgtctatcgacaccggctagagaagataccaaacctagtcgtcatgctttagctacgactagcgaacacccaaaccctagccaatatttatcttacctcgatatcggcttagacaactgaaaccttaatcagcctgccatccaaatcccacatcaactacaatattacttatccaccatatcttagccacctactctccatctacccagaacctatacataaaatatagaacctggccgatatactgccctactcctcaatcggcctaaatataaccgaaccctaggtataatcctacccaaacccactatcagccaataccagtcacatatctgctcaaccagttcaattatccactatactccctatccaccaaccaatcagagtctgcacataaaatataggtgaccttagccgcttaattccctctctaccccagccaccaactctttagaatccacatataaaatatcagcccagtaatccatatacctgcataaaagagataagctataccctaaaccctagtcctcctaaccgtttatctctttcttgctattttatggcttttattgaatttggatcttcctcttcttcagtagagtctattttatatggatggcaacctgtggtatttcaagcatcagataatcaggttgcctatttcggatttatttgcgttggagcaaggcaagttattattcctccccttgagcataattaccctatattctatatcccttttctatgcattagtcattcatgattttgaatgcataacctgaacatatagcaaaccagatatgctagcttttgcttagccctgcctagttagattatgcacaaaatttaatgaacttagattgggatagtatggtagaaatggttgatttccgggtggctagtactgttccaaccgacataagattgccaaagtacatgtgaagaacatacgagtacgaccgcaattctcgtatgggcatagacctagctgattaagttatctagcaaaggtggtacctctgtgtagtggttcttatttaagtcctcgcgcaggaggcaaatttacgccgcgaagggcgattgtgatatttaccgaggcgcaggtaaatatatgagatgaattgtgatatcacgaactgtttgtaaaccctgattgcgatgacatggtgtcatacaatcagttctctctaaaggcctcgggaacgctagaactcctctcgctgctgataacgttacgttcagagcgcatggggactagagttcatggaacaagtaccactgatgttagtgaccgaaaagctttgccatgacaaggctaatgtgtttggcacgtcatggattgcgggtaaagcgtacatctactgtagtatgaatattattaaaactatttgaatagccgtggtcgcggttatcgggcattgggactcacaatggcatcttggttacaaacataatttcaaactttattaaatactgttgcatttaaaacattatagactttccttctatattctctgctttctgcaagtaaatctaaccctactcaaatattattatttcatgcattcgttgttgattaatataatagcttgctgagtacgttgtactcacccttgctttaaccccacctttttcagagtcattttagagttcttaccgaagctgggagttcaatcatataagttaatctcattttaacttagttctcaagtatagattagatagatggtttaagtctatagcaaaacactagagttgagtcatcgtatagcttctgctgtaatagttagccacaagtttgtaaataccctattattttatgtaaaggaatctcctttggagccttgtcaaaatatatgcaatgaagaaccagattgttgaacctatatcaatctactgatccagggcttgattcagcctaaacatgtcggttaccgaatcattagtttcgggacccgacagctaaccctcaccacggttgtttttccgccgcatggggagaggactcgctgtggtcgagaacaacgcatgtgctcctcggctccagccgtggcccgcagatcgatggcacgacctcgtcatccgcctcaacaacgcgcccatggcggagcagagccctgtgggagaagaaaagaggagaataaagaaaaaggaagagaagtaggaagaagaatagtgtactggggcattttggtactttcaatgctctttctctctccgtttccaccaagaataataaaataataaggtgggtgtccagcagctaattacctcatttttgcagtgtccatgaaaagatacacgttctttgggtgtctcacaacaaatgccacaaactttgggtgtcctgtagcaaattttgccataactttagtactatcacatttttattgaattttgtgtagagattatccagaggtggctccttcactctcttcttccttctcttttccacatcagcaaatgagtctacatgtcatctaggggcaagtgtttaagggcttatagtacttgccctaactgggccaccacatcagcttaaaaccacaaaagaggatgtaatttatctggattaaatagttaggaggtgtaaaatatatggtataaaagttaaggagggtaatttatagttttatgataggtgaggaggttaaaccgaacttaacccattatttatcagactctcagggatgtaaggtaggaaaaattcagagacatgcataaaatgaattaagtgacatatctatacttactataaagttataaagttatagtccactaaatctaaagctcaatatataaccatgtcacatcatcacccactaataataatacatataacctcatacaagcatgcgacatcatctacaatttatttaattctacaaattaacatacaagcatatccaattatcatccctcacatcatttgcacaatatttgaacaaatctatctatcatttttataatatttaatatatatttaaatatgtttcatattaaagtgcaagtattatttgattatttcatgataattgctgataaaccctgatgtttcattctgtctgtcatcttttgaaaaatccacagagttacgagctttttaatgagtcctatgacagctcatactaatattactagacataaaaaattgtctcatatgtactatttgcgagggacctagatcgaattacggaaacatagaaggatcttttcgcaaaaaaaccaccccacgcaccgtttctatccaacgtggcatagccgagcgggcgccccttccgctgctcttaatagtttctcattagatgatatatgttgtagacagcttttcttgcactccggtactataatacgcgccagcgtgtcactagagcaaacatagaaactgaaattgttccagttgataatggtcatgcgccatttcactagtaaagaaaaacaccttaattatatttttaaaccacggtaagaagaaatttcacaaactttttattcttattaggcgctatatatttaaaatgaatgaattctgtagaaaaatcacacatgaaagtacatgacatagtacataatcgagatttcatctccattcaaataacatagttctagtttttttaaaattaagacattcccattacagccccattcttttttactaatgccgaaaaattaggtacggattattaatgccaactttaaaagtacaattcaattcctcagaaattttattgcacataccaattctcgatagacattttatttcaagctatctattaggttaataatatataatatttaattcatctgatttaagactttgttcttttttgatgctggatttttatttgcatgtttcccaatctcataaacgatacatttcacacaacaactttcttaaaaaaagtttcgtagactacttttctaaaataaccttttcactttgtaatagttttttttcacttgtttatacccacaaataactatcacaaaatcaaattatccatagatccatcaattttatctctcccaaacgggactctatcaggtggtgtctgagataaagttgaagttaacgcatgcaaaacgagaaatccgttaacatattgttaattaagttttaattattataaacttgaaaaaatagatttagttaatattttaaattaatttccgtatagaaatcttttaaaaacacactatttagtagtttgaaagacgtgctaacaaaaaccaaaataaaatctacatcagggatgtaggtatcgaattttctcattattcgggctataataaaaatgaaccatgggtgtgtttagttctttaggtgtaaagtttttaaagtatacggacacacatttaaagtattaaacgtagattaataacaaaataaattacagatttcacctgtaaactgcgagacaaatttattaagcctaattaatccgtcattagcaaatgtttactgtagcatcacattgttaaatcatagcgtaattaggctcaaaagatttgtgtcgcaattttcatgcaagctgtgtaattattttttttttcacgtttaatgtttcatgcatgtgtccaaatatttgatgtgtcgtttttggctaaaaattttttggaatctaaacaagtcccgtttcaactttcgagcggtaaacattcactacgccgaacaaaaaaacggcagcttcacacttcacagcagcgagactgacaagctgacaggccagtacagcacacctcctccagtactggaccagcaaacgaatccgcataatctgagaggtttacccgcataaatcctaggaattattctaccgactgtattattgatctaacgatctgagagaaaaattatgccctacgagcacttgaaccccctccttatataggggcaggaaccgaaattacaatgtacagcccatatgccttacgaacgactaggctaagtaactgactaagattacgggatatttccttaatatacaagttaacaaaaatacccgagtcctttcctaaacatattatatctgtataggctatcccctataaccagttggatatacatgctatgggggtacgtggtatctataatctccacaagagtatatttaattcgactgttacaattcagggactggattaaatacctgaatttcatgaatcgctaggatttgcccattcatgtgtcacgaagatgtgggtgattgagagttaattactgacacatgcattatgttagggttttggcggcgctcaggcgattttgcggcggcggccgtaagtctcgtcgtgagatgtttctggatggagctcgtcttcgatccacgtgtgttgtctgcagggttatcgcctgctttgaggattcgtcgtccggcttccaatcagattgtttgaggggttttgatctgagatcggattcatattcttatcatcaatggtgtgtccggcctggttgcaaggttcagtcctttccctagaatttcttagttcccaatcgtaacataccaggagatctttgcctttggatatggagatggattgtgaagaaggaaacgtcacgatctggtccgggtgccgtattcgttctggattcgttcttggtctccggcccttatataaacaaccctgggtcagatctgtcaagcacaaccaacaattgctgcttctgcatctaatctgacgaattagggctccggtttctttgtcgtctctttcgggtcatggcgtcttctagcggtgggggtgataaagggatcgtcactgggatggtcacccacccgaagcccctggtcgacgcgatgctctcccatcaagagacgtctactacggccaaggagatcatcttggccccaaataagcaggctttggagtcagcgagtcagagtaaagataagatgatccacgctaatcccaagaccttgccagcgacgggggctagcgacacctactcaactgggccgggtgcatacacagaaggagatgtggaggaggaggatgatgaagcggtggaggtactgctagaagatgatgaagtacaactagctgggcagtggacagttttgtcgagattctactcgcttcgatcacccaatcaagcggctctatttgatgacatgaagcgtgcatggagattgcgagctaacatgaaggtcaagtccctgagagataacatgtttatcatcaccttcagctcggaaggggattacaactttgtgctccagggcggtccatggcttcaccgtggagacgctctgcttgttgcaaaattcgatggcctgacgagcccgtccatggttccccttgagtttgtgccaatctgggtcaggatttatgacctccccttggtgcttatgacaaagaggaggggagaactgtatggcagcaaacttggacatgtgagggaagtagatgttggtgaagatggcagaaacaagcatgacttcttccggatcctggttgatttatcagtcaagaagccgctgaaaacctcgcttgctataaaattaatgtgcagggaagtgaagctgtctgacgtttcgagctacgatatgagagggtgccctttttctactttatttgtggttacatcgggcactctgataaagactgtgacaaaagaattgccaatattgatcaaccttttcgttactcagctgagctacgttgttctccgctgaagccttttgagagaagaatgagcacaatccatggccaacaaaagtcaggagtggcacgcaatctggccttccgtggagcagggagtgcaagctcgtcatcctccaaacaggggaaaggtaaaagcagggaggagattattcctgacagggtcgatgctcaggatggctttgagggaagagaagatgtgggggacggggtggtggatgaactgctagctagtcagactagcaatctgaacatgtcaggtgagaatatggtgcagaaaggagaaccggtgggtatggaggaggaacaacgccatcagctgtcaacatctaaccttgtttctgatactgatatgattctagcaatacagaacctgcagcaaccggcatcctttggaggagagtcttccgaggacatcagtgataccaaccggaaaagagtgcaaccacagagcgggagcaagatatccgacagagttcaacaggccttagtattgtatggtcaaggatctggtagagaacaggctaagcaggtggacccaaaggagccagcgagagctctcaaacggtttcggaagacggaggtggaaagtatggaagttttggaagcaaccagtcctggggctactggtaaactgacgggacccgctctcagggcccgtcaggagcaatgagttgcctatcatggaactgtcgtggtttggggaacgctgcgacagttcgcgatctgtgtggcctagttaaagaggccgattcccaaattgttttcctaagtgagactagacagaaggcggatagaatcaggcgtttacggaataggttgggtcttagaggttttgctggagttgatagtgatggaatgagtggggggctcgctttgtactggcatgagtctgttaatgtggaaataaaagctttgtgtgagagatatattgatgcttatgttcgcttgtcgccggatggccctctgtggcatgccacctttgtgtatggtgaacctagagttgagaataggcacaatatgtggtcgatgctccggtctctgaggaattcatccaatttaccttggcttgttattggtgattttaatgaagctctttggcagtttgagcatttttcatctcaccctaggggagagccccaaatgtgagctttctgggatcttcttcagtcgtgtgcactttttgatttgggattcaggggcacaccctttacttatgataataagcgccagggaagaaacaatgttagagtgagacttgatcgtgccattgctgacaatgcatggcgtgataccttccctaatgcgactcttgcacacctggcctccccccgttcagatcgctgtcccatatccttgcaactgtctcaggagatgaaacagccagccaggaagaaaatcttgcattatgaaatatgttgggaacgtgagccgtctttgccagaagttgtgcaggaatcttgggtggaagcagggactaaatctgacctgggtgatattagtgctgctctacgtaaggtcatggcatctctgcattcctggagtaaggtaaaattcaagaatattggccgtgaattacagaaagctaggaaaaagcttgctgagctgctggaaacatatgcagatagtgctgctgttcgccaagcctcggatcacatgaacgaactactttatcgtgaagagatgttgtggttacagcgctcacggattaactggctaaaggagggcgaccgtaacactcgcttctttcatagtaaggctgtttggagggcaaagaagaatcggattcagtctcttaaagacagtgctggcactgtacaccgttcggcaacagcaatggagcagctggctactgaatattttcaggaagtgtattctgccgaccctagtctggatcacagtatagtgtcaagtttcttccagtcgaaagtttcagcacagatgaatgaggctttatgcagcgatttaacagaagaggagatctctaccgccatcttccagatcggcccgctgaaagcgccgggccccgatggattttcggccaagttctatcaacgaaattggggcacaattaaaagtgaggtagtcaaggcagttcataatttcttcatcataggagtgatgccggaggggataaatgacacagcaattgttttgattccgaagattaagcagcccacccaactgaaggactaccggccgatcagcctctgtaatgtcatttataaagtggtaagcaaatgtctggttaacaggctgagaccgttcctagatgaactggtttcgcctaatcaaagtgcttttgtccctgagcgtcttataactgacaatgctctagtagcttttgagtgtttccatttcatacaaaagaacaagaatccaaacaaggctgcatgtgcttacaagttggacctgtccaaggcttacaacagggtagattggaggtttttggagcaagcaatgcacaagatgggtttcgctcaccggtgggttagttggataatgtcgtgtgtaaccacagtgagatactctgtgaaattcaatgggaccttgttaagtgcattcgctccaacaagaggtttacgccagggcgatcctctctctccatttcttttcctgtttgtggctgatggactgtcactccttctagaggaaaaagttaggcaaggagctattttgcctctttcacgtttgccgacgggcaccagggatctctcacttattgttcgctgatgataccctactgttttttgaagcagtgaaagagcaggctgtggcaatcaagcaagtgctgaatgactttgccgcaagcactggccaattgattaacccgtcgaatgctcaatcatgtttggtgcggcttcccctgcagcaatccaacaggatatcagatcgattttgcaagttggtgataatggtttcgatgacagatacctggggtttccgacaccggagggtagaatgaagaaagggcatttccagagtttacaagagaaggtttggaaacgaattctgctgtggggcgaaaaccatctgtcatcgggtggaaaggaagtgcttataaaagctgttcttcaaaccataccggtttacgtcatgtgtatttttaaaatccctgatgcagtgtgcgatgagctgacaaaggccattaggaacttttggtggggagcagttgggggcaaaagcaagacgcattggaaatcttggaattccatagccaagtcgaagcaaagagggggtctgggctttcgtgatactaggctcttcaaccaagcgcttttggcccgataagcttggagactgttagagaatctagatagtctctgtgcacaccttctaaaggcaaagtactatcccaacggttccatcgttgacacctgttttagcgggaatgcttcacctgggtggagaggaattgaacatgggttggagctactcaagaaaggaattatttggcgggtgggtaacggacagtccataagagtatggcgagatccctggttaccgagagattattccagacggcccatcacccgcaaaggtaattgttgtatcaagtgggtgtcggatttgctacaggatgatggaacttggagggttgataaagtgcaggaacacttttggccgatagatgtagaaatgatcctgaagattcgcacctcagcttcacttgaatccgattttttggcttggcatcctgatagattgggaaaattctcggtcaggagtgtgtaccacttggtcgtttcgcttgcagagaccggtgattgctccagttctacagaggtgctagtaaataaatcttggaagcgtatctgggcgtgcaatgtcccacaaaaagtcagaatcttcgcttggaaggctatatctaatagtctccccacaatgaagaacaaaaagaagaggaatctggagttgttgagcacttgctgcatatgtggagccgaggaagaggatgttgcccatgcgctttgtcattgtcagcaagcgaggaacctgtggtcggctatgtattctgcgagagccatctctcatgacgtgaatagtgcttggtccgggacggattggatcctgaaccttttggaggatgccatgtttctcatgctaatgtggcgcatttggcataacagaaatgagatcacccatggtaaatcaattgcgccagtggctgtctctcagagattcatctttagttatgttagctcgctaactactattaagcagtaccctcaagctgacataattaaaggtaaacaggtggcacacccggaccgcattaggcttcccagccaagctccccccgcagtcagttcgcctaggcgctgggagaaaccgagcacaaggtggatgaaattgaacgttgatggatcctttcaggcttcggatggtaaaggtggaattggggctgtttttagagacagctctggaaatgttatttttgctgcctgtgggtctatgctggtttgtggtagtgctatggaagcagattactcgcgtgcagggagggtattgcaatggcgcttcaatggacgttcctgcctttcattgtggaaactgattgcttagaggtgtttaatctaattcaatcaaaagagaaggtgctgtccgagttagcttttgttgtcaaggaggttcaggtcctcatgacaggcaacagggagattaaagtcaggaaggagtcccgtgatcagaatagtgttagtcatcatttccttgctaacaagggaagatgtgaggccttaacttctttctggcctgataacacttgtaatctcatttcacatctcatcgatgtggactcaattgagtaatatagctccctgttttcccccgcaaaaaaaaaaaacctgaatttcattagctaaagatcagctcgacgca

SEQ ID NO: 8744 - DNA, 25216 bp, Oryza sativa
cccttacatccacaagacccatggatacccctggagcacccccttcaattttttcaccatgaatgataaactaaaggtccctaaatagctgaggttgaagaaactgtgtaataaagcccccaatttttttttccttgatccgcccctgcatatgagaacacaattaatgtatcacgctaactttccaaaaacaatgttcttctgatggatcgttatgacatgtcacaatcttttaagttacgcttcctttgcaatcaatgatcatcataggactaaaaaccaataagattagttggtcacctatgtttttggcttggtagagacgacctaaatatattgccaagatagtacattattactagtgcacatgtactcatcggacatgtcgatgatagaaatgcacgagtcctctttgatcattttcttgttctcctctcttgtacaatcttgtttgcatgccctcaatggtgatgaattgtacgtagttttgctgtggcggttgcacactcatcttcaatcttggccggtaattaatgtagcgaacgtgtactgtttgatctgtctatataggctggcggatcaatcaagaccttgttgtgaagtttacttggtctaaaaccaaggagagatatgttcaccggttttggccattgttgtcccttgccacgatgatcgtctttaatttcatggtggttgtgggaaaaaaaagtttaagcacacgatccatctaattaactggataatgttccaacccaaatcgatcgatgataatgtagctagctagtccaggatctcaaggagtctctctcatagatactccctccgttttacaatgtaagtcattctagtatttcccacattcatattgatattaatgaatctagatagatatatatgtctagattcattaacatcaatatgaatgtgggaaatgttagaatgacttacattgtgaaacggagggagtatatatagatcacatgcattctgaaacctaactagctaagtagctactccctccgtcctataatattaaaacctatgactggatgagacgtttcatagtgcaatgagattcattgtactatatgaaacatcccgtccagtcctaggttataatattatggaacggagagagtagctactactacatccatttttaaatatatgacgtcgttgacttttggataaacgtttaaatatttgtcttattcaactttttgtgtgaatataaaaaaaattaagtcatacttaaaaatacattagacaataaatcaagtcgcaataaaaaaataattacataaatattttgagtaaaatgaatggtcaaatgtatcttaaaagttaatggattcttgtataaaaaaacggagggagtagtacttttttacaaaatggttgatgaaacactagaatttcgagctcaattgcatgggaggcttcttcacacatcctctccacagaccacagtacacgcaggcaaacatgtatctaaagactcaattgagatcctctgtgcagtactgcagaggacctgcatccctgaagactatatactgccagcatctgcatgcatgcatggtacaaccaataggctccaaattaagcacatatagctccatcgatctccatcgctggagagcacgtacacatgcatcagatcgaaaggaagctagctatgtgacgcatcactcactcgatcgatggctcactgccatctaccaacaatgtacctagctagagcttaactagagccacccatccatccatcatgcatgcatccacatctctgtctagttctctacagtacacacacatagagatcattgatgatgtgatagtactccctccgattacatatataatttctcgatattttagacagcaacacggttgctagaatatatctttgattataatttcattacatatattttttactattataaaaattaaagatgtttgtgtcggtactttggtacgtcatccatgtatgagttagttttaatttcgttcgcttttggaaatacatatccgtatttgagtagatttttaagttcgttcattttttaaatatagaaaggactcctaattgtagctcataattttctaaaaaaatatatctaatcaaattcctatagtaaattacatcttaactaaaccatataacaataataagattaaaatagtgttcacctgttgcaacgcacgggcattcttctaatataagataaatatttaatgttattaacatacttttaaagagattacttccaccgtttcatattataagtcatttgatttttttcttagtcaaaattctttaggtttgacaaagtttatagcaaaagttagcaatatctacgatactaaattagtttcattaaatttaacattggatatattttgatacgaaaggcctcatcttttcacttatgcttatacctattagctaaaatttaaattttcaaccttaaatttggagttttttcatcgtagtttattttttagcctttgcttttagatcattaagaacatgtatataaaaattgtattcataaattatttttcgtttgcaaatatgatgataagcctaatgttgaggctgggagtttgttttgtattgaaaacattattatatcttgctgcaaacttggtcaaactttgaaagtttgactaaaaaaagtcaaacgacttataatatgaaacatgagaataattattcatacacatacttttaaagactcgtgtttctagtgtctttaagctaaatattttagaagttattgatagttaaaattctaattattcaacatcaattctatctatccaaaacattaataattaagaaactggagagctcctagctaagagataggtagatacaaatacgcatagatatattgagagccatgtgagccggccctagctagctagtagaacacacaaacacacacaactaatgctaccatgcatgcatatatatggatggttcgtactagctactacgtctttttagcttgtttgttggtgatccgatccaatccataattgcgagcggcggatggccggccagccgccgccgccgacgattaccccggcggccgtcagatttgaattgttcgccggccggcgtgtgcatgattggccggttgccggccggttgggatcttggcatgggttgcccatgaatttgcatgggcctgccatgattgtgtgtattgtgactgatttgatggggtgcatctagtcgatcatcgattaattcatcgagataagctagcacgatcaaaatctggtgattttgttaatataatcatacctgtgctaattaatggttgaggtgaaatggcattatcatgttggttgattttatcggttcactgttgatacgattagggaggagataagccaccgtttccttcctgatcaagaaaaaaaaagttaaagataaattatgttttgtgcggtcggtatataacaaagttcctccgccattatattatctttgtcaaagaaagaggagagataaaagggataatacatgaattgaagtcacaattttaaaatcctattataagtcgcccgatcaacttgacgtaccaggaaggtgttcgtacagtgtctctgactagtttctgacatctagaaagaatttcgctacatcgatagaggtcgagtttagttctaaatttttttttcaaacttttaacttttgcatcgcattaaaatttttatacacacgtaaacttttaacttttctgtcacatcgtttcaattttaatcaaattttaattttagcatgaactagacacactcagaaagtattgaccaccgattcatgattaagtcgacgcccctacttttcctacgacacgactggatcataagaacaagaagaaagaataacgaaagaaccgcaagcaaaggaaattaatagacgaataggtttcaacggcttcatctttagatcagttagattaattccacatttagcagggatgatcatggtcagactaagaccgagattaagtaaattaaactccaacatatcttttcattaattgtgtcctgttttaagcatttagtttgatttggaaatgaaaattaaggtcaacgaattaagatagatcagatcagttgtttgcctatatggtagtacgtggttttggtgaagtgtcccatttttgccctccgtacactggtcggtgcaaaacgccagtgtcattttcctatcttaattcttaccgtgtggagaggatcagtactcgtaataggggcgcacggtccaagtggaagaatcgtcaggattggccaattaaacctcgggctggatcagctggtatcatgtacacaattcataaatatttaatgtttgtttaaaggggaaatatctaatgaaaaacatcaaataagtgaaaaagccgtgaaaaccatatctaaaaccatatctaaaattcataaaaatgactagagataggtatagacctgaaatacattcataccaaaactcaacttcaattgagagataaaaaaaagacaaattttaggtgaatagtgttatgttattattcattcaaaaattttcttttttgtcactccataataaagttgagtttgaacttgaaatttagtgagaatatatttcatatctatacctatcttaggtaaatttttttatgaatttacaaaacttttaggtctggttttcatggattttcacttatttgatggttttcaccggatatgtccccttgtttataataaacttttaaaattttatcttaaacatcaaagttaatttcctgcgagcactccctgtttttgtttgtgtagtgtaaattttgatttttcagttcttgtttgtatatatttgtaaatgctaaatacccatgtattgtaacaagtatacgttttccctctctcatagccttgataatttttagtccaaaatgcatcagtgtttaggctgctttctttcctagttttctcaactcaactctctcgttttccacgcgcacgctttttcaaactgctaaacggtgtgtttttttaaaaaaaattctatatgaaagttattttaaataattatattaatctatttttcaaaaaaattagttaatacttaattaattatgtaataatatgtattttgttttgtgtgccctcctcctcccgaacgcagccttagtagccctacatgtcagctgacggtgggagtatgtggtgacagattctcaccaacttaatttattaatgctcaaaatttcaattggtgggtgttgatagattcaccgctcaccagcactactcgagtcttgtaaaggtgtaataaaattgccattgcattgcaccatataaatattttgaccattaattcctgttctgtaaatttaacatcatatattcgtgccaaataagatcagatccaaattattccccctacttattgaggacctattttagttcgaataaaaaaaattaacatgcgtatctgttgaactgaattcgtcagtcagatggagtcagaacactggtccggagatatttctaaaacgccaggctgctgatatatataattgagcattcgtcaaagtaaagaagagtatatgtcatgtgctcctctgacaagagagacgaaaaaaacgagcacaagatcactgcaaatacgacgtacgaattgaagctagcagctctcgagcaaacgggatagtgtgtccgagctcaattatttgtgttgtttgacgagttgaaacgcgtattcgtatgtcgagttgcaagtcaaatttctcgagatccatgcacagtttgaattgaattgagcgtacgcccgccgcacagtttgaaaaggtctccccctttgagaatatggtttgggaattcaattagaagcagttcatttgtttttggcaagttctaagcattcctaattcattgttattcaaatatagccaatattttgtttgtaaaaaaaatcagagtaatgcatggccggtttatgacttcggggttttgggcacaaagaaccatctgaaaagagaagtccaatctgcacacttgaaaagtaaaaaaaaaaaaagcaatgaaataatatgatttaatttaaaaacttttctcttttttttttcctgatcatggcggtgatcgggtgatgcgtggcccatccttgatcctggagcccacgcgcttgcctacttgatcatcaatttgcccactttttccacataaaaatacaggcaatgcatacaccttatcatgagctatactcctagctagcaagcaagcacacagaaacattgtttattctttttccaagtgtatattccttcctttttccagctttttctcccattttgtaatgcctgcctaaatggagtagctctatgtatatcttttttctaaagaaacaaactacaaacgcattcgctcacaacacgtgcactcatcccacacacatacaccctactcctatgagcacctcgggaaaactgagtcgacatatcttgagattaacgaagtcaccacggatctcttgctgtcgacgggtacatcacctaccattgaaagaataattaaccgtaaatatgagtatctgtgtcaaatttaggatttgaactcgggtagaccaagtaacctgaccagctacgctcactacgcagctctatgtatataaatgcaaatatgcaatgaccttgccttaatttgggacacgtgtcacagcatgtgctggatctcattagcttgcaaacactcaatgtgcattatgcatatgtgtcaatgtgtgtgttctaccatcacccatcattggtacattttgctacatgacaagtagtaccagatttattaacttggttccacatcttggtggagtaggtcatatgcatttacaagctctttttttcttttcttttctgttgatcaaatgattgatcaagtagatgtgcacattccttttgggagttaaaaaaaatgcttacttaattacattatacatgtatgtctctgtctatctgatcctctgttatgtagcatcattgcacaatgcttggaatctacttaattggtgaatcatgggggctatcaaaagaattaaagggaagggtgagagttgtgcaccagagactatgattaggagctaatgaggggttgttagtttgtacttattgtattctacaaattgtattattgtactagatactaaatacatggctcatcattgggaacccttttcatttgaaagaagggtggcctgcatggtcccctatgaacatgttatttgcttgtcaagacttaggtttgttgggtgagcctcttttgtgtgacagcttggatgaatgtccaaggaaagaattaagaaaacatcatgtagaatatataggtactaacaagtactcccttgatcctacagccatgatctttgcataaaaagaggatatggttcaatgaaagcaaccaaatacacaactctgaagaaagtaacaatgagagaaagtagaaccgcatttctcttttgtgcttttggttcgtgaggatattttaataatgagagggaagaaaaacaatatacaacattgaagaaagttaagtagaaatgcattattcttttgtgcttttggtttttgaggctattgtaataatgagagaaaaattagacatgttttgcatacacccctcatggctaagctcaactatcaggatcacaaattcaggtggcaggtgcctttcttccctgtccaattcaggaaccattctgctgttgaacacgaccatacatgcagctctagatcctcaatattttttcttggccttccttctcagcaaccataaggacagacaggactggatccatagcaaaatagactaataccctaccaagtgaagtgaagttcatcacaaagaaagccaggaatgaactggactttgttctgaagtggctacagacaggtggttgggatggcaattttcagaaactagatttgatatgccttaagtatactgcccaaatctcattcagtggtatcacaatcatgcaacactgccagctgcccagctttaaggctaaaggctaccccatggtaacagtaaattaaccagcatttggatcatatttgtaagttccaacaggttgtcttgagctttcctctataatcaaatcacagcaagtttcggtgaatagttctgaaaggagcgcatctaattatagcaaagatatggtgttaccgtattatattataaccaaccaagccaactccaataaaattatactaccttcattccaaaatactccctctgtttctaaatatttgacaccgttaactttttagcacatgtctgaccgttcatcttattcaaaaacttttgtgaaatatataaaactatatgtatacatataagtatatttaacaatgaatcaaataataggaaaagaattaataattacttaaatttttttaataaggcgaacggtcaaacatatttaaaaaagtcaatgacatcaaatatttagaaagagagtataatcatttttgggcgttttaaaatgtatctggatattggaaaacgcacataaatgattatattttagaacaaaggggtagattagtacacgggcatggcatagttgtaggcacatcattggaagagaatacagagcaacacatttaatctttcaatcagcacaaaacctttcctggtttcagctttgaaattgttggcacaaaatgtaaaatttctatctgataccatttctaagctggcacaacttaaataacaaatagtagagttctaagtatctctcagacttaaattgactgctaatctaatttgaagctaattaatgggtacagggattagtgaagccaggctgaatgggagtcgagcagttaactggttcagtctgaagaaaggggaggaatgtcttcagcgatccctttaccatcagcggcgtcgtaatagaagaaattcttgatcggatcacccttaccagatattgacttaatcacctcctgttaggcaaaaacagagtgcaaaacaatgagaactgtgcataaacacagatgaaattcctgtttggaacagaacaaaattaagttcctgctgcttttgaagattaacatttgacaaagtacagaatacttttcttggcaaaaaaaggaatattactacttttggactcctttcagacatcactgagttgaggttgctaaataattcagaaaattttacattgctacagaatgttcaaatctttcttgtgctagttctttcattgtgtataattccttgaaccatcaatacaaaatccgtattccaccaaaaggctgtagataaaatatttacatctttgaaggtgtccagtgagagtaccgatccaattccatgtgtaactatcatctaattgtggcaacacaatatccaagtatgcatcttgggcccctggactgagaactacacattcatgctcccaaaattgtatggctgagctagggaatcataactgataattagaggacacagcacttctgctagctttacatcgatcttacgtagcaaaaggatagtcaaacttcagcacatgtctgggcaaagtgtctgtcatgggaattgggcctggaggctgtgagacccacaaccaggacaagcaaggcaccctcagccaggggccatcattcatgattataaattaagttgtctttcaatatgtccgaaaagacccactaaggaccttaatatgtagttcctaagttcatggacccaagtaatgtggtttaagtgaattactgcaggagtaaaatgtggatgcatagtatttgttgaggagtttatttttttcttttgggggaaatggttattgtgaagttagtagtttacttcaattaccatctactagagggtaaatccttaattgccatctagttcaaccacatatactcaattttcacattcaagtaatggaacattggtacctacctgaccaagaatgccgccaaggattgcacatacaggaggatgttgcttctttccagctgctaaaagccgttccaggagagcagtaggaatttgagactcacttaaagactgcagtttatttaccacaccatgaaaaaaatcttaaagaacatgattgaaattaaggaacacaaaaacttatataccattttatcacacatgtccttcctcagagccaaaactgcaggtcgatcagaaagtgatgcctcacaagcattgcggccttcagatgactcataattctccagtactgcaaaaggacatttcaagaggacatatgcgcaggggcagggaaaaacaagttagaaagctggctgatttgtttgagtatttggggagataaaactgcactaatgaatcttcaacagtgctgcaaaagtctgacatcctcacctctcatggcaaagtacagtttagttgtttttcttggtaaattcttccagggtacggagatagcttcctgtataaaagatcatttccaatgataaacaaactgtaacattccaaactgaagcatccaaaatggtgatatatggtggcatatggcaacaaattgaacacatatttaagtgatgatacacataaagaaagctaaaaagtcaaggtcaacatgctacgctactccattcttctagggatgtatgcaaaatgaacaaaccagaaagcatcagcacattgtctagtgtagatttgaactcttacaaaattattccaaaaacacctataacccagaaaggggatttctgtggaaccaatttaattaccacatgaaatgaagacctccaatagtaaggctgggctacatgagcataaataagtgtatttttctatgccgtgaaaagaggatttggtaatagtgttgctgtgctctacatcaatcttctgtagatgtatctacgtattcaagtcttatccagattgtcaatcatacttagtttacctactccttaaaaggagtaaggagatggtgttggtatgctacactgatctccgtcaatatctatgtaaataagtatgtcctttttaggatttgattaactgcaaattggcacatgtatacatgtagattgccggctgatatggttttactttgttttagattgaagatgactgttcttagtattgtaaaaatataatatatgatacacatttattcgaataaataagcactctggcattctgatagtcaaaacaaaaaaacagcagagtaagcattttgtctatttatttttttgtcttacagaaaatcatttttttcagaggaaaacataagtttactattattaaaacatgaagacactattcaaattgtttattttttcaggttaaatggttttcatgtatatataccatgtagcttgtataaggtgcatcataaatattccacagctacatttatggcagccaagagagaacaaactacaggggcaatacaaaacatgtaatattaaatgaaagatgttatctcaagttggatcagcttcctctcaaacatataaaaaaaagatcagcttaacaagtcatttacctggagacttggatatgccaactcctttggtttgggttcacctccaaccttctgagaaaaaaaaaaacacataccccttcaaaaaagtatccagggcccaaactactgaacaaagaaaataattcctgaaacattctagtgatcatgatttccaaagcataagtgcttatatattcatagcgattgaaccaaaactagcattgcaagatgaatccttggtacaaattacaaaacttaatatgctagaaagtgtcacattaccatattttaagcaccaaaactaagtaacctttctttgtatcaccatttcaatgatgcagaaaaggaacagatacaataacttggttgaaaaccagtcagtgagagcagattagtacactacattttattaccaaaaaaaagtacgtgctcctttgcaattctcatccttaatggcaccttcatcaggctaagtacatcagatttaatatgttaacatgaacagtctgacataatgacatcaattttgagttcaaacatatcatagaaaaaaaatgagtgcctctagagtacatgaagaaaagtactaacaagtacacaaaccacatgcatgtacacaggaaggaatattggaagcagtatatgagaaacattatggagaaaataaaccaatttaagacatctgcgcgatgcttagtgcttacagatatatatgtggactgctggaaaaaaattaaactgaaaaatcaacagaacatatagcatgtcatatatgcccatacctgaacatagctatggttctgcaaatcaacaaatatttcaccacaggaatccttgcactcaatggcgtagaatgcaatatgcttgcttctcttccggcagttgtcgttaattaacaactaaagcagtacaacacatgcagaaatgttgtgagaactgagcgcaataaagagaaatttgttgcagaattttagtttaaaagacactgagtgacttggaacttgcaataggatgaagaactaaacgggagaagaatacacacctttgttttaataggcgcacagctaactacaattatgtcaaacttgtcaaggaattctccatcaattaatgatggatcacctaaaggaaatagcagaaacagtaagaaatttgtttttagaatatgctgtgaagatccaaagaattagtcattgttatggccacagatatatcagaattctctcagtaacatatatgctgatttcttggtacaatgatacactatagtaacatgtgcctgttactaaaattaaatgatttcttacaagaactttccttgttaaagtgcagctaaaagtgtaagattacaaattgaaatagaatctcttctttaacattttattcaaagattaaccattaggacgagagcaattcaagaatgcaagaaggcatcctactttatgtacttctaattctgacacccaaaccaatgaagaaaaccagactaggctcacccttttcgactgcaactcggaccattggattgaaatctttcagggactcacagcaaacctcagctcgtgatctaccaccatatatgctctcatcatgaggaattaagaaatttgcattgagatcatcctctgtgactaaatgatcatccatcaaggataaactgccaactcctgctagaacaatattcttgcagaactacagggtaagagagaaatggcatttagtgtataaggctgccttcgattatgagttaagctttatcaatatatccagaagaactgaggtacttaagtacctagatgaatatacaattgagtcaggatgcagctgcttatgatactctatgactacagaaatctagtttctaaggcatatactttaactactacctccgtttcaggttataagactttctagcattgcccatattcatatagatgttaatgaatctaggcacacatatatgtctagattcattaacatatatatgaatgtaggcaatgccagaaagtcttataatatgaaacgaaggaagtagtaaatagtataatagcaatcatattcttaacaaagcgaagtgcattgatcagataatcatgggatatgactgtaaaagaaaaggataaatagacatatattggaacaacgtaagctagcataaataaatgaaagaatttatctacagaaaattgagcctaaacgttgagaactaaaagcaattaactttaacagatggtacaacaggggtcctacaaaagagaaaaagccagcctaaaaagtaaataagaacattgagattttatctcgcaggcaatgcatccatagcactagaaagtctacaagaacaacagagcaataatcaaatgcccagaaaactaatgagttataataacgaactaaaagcaacaggtaaacatgggcaatttggcccatgaaactaacccctattactccataactcaatgcaacttcgtttcaatgctttgaatgcccacgcggtgtaaactacaaacaaaacgcaacaattggagaggaaaatcttaaaatacctacctcagtagtagtaccattcatgccgcacacgagcacatgagctttacttagcctgttccaagcagcacagattcagtagtcaaaaacagatgaaagacatcaaaagttttggttccgaagctaacaaatacgatggaatggaagaataatttgggggtgaaagttacgagaaattcaaggaaagcaccaaacaagctcaaaaaaaaagatttaggaaaattcaatagcagacacaagatacgaaaacagcggatatctctgtcttcacttcaaaaatacaaacacttcgggctcaagtttttcttttaaagaaacaaacaacagccattcgttctaacataaaccatgaaatcccccaaaagaatgattttcttttcttccttttctgcaagaaacaacctgcgattaaaagagaagaaaaagaagaagcatcaactcaacaaaatttcctccacataagcgaagagcgaaagaaaacccgggacttttaggggaagagagagagagagagagagagagagagagagagagagagagagagaggcggagccggggatacctcttctgggcgtcaacgccccagacgcggatctggcggtcgtagagcgccgtctcctgcgccgtcagctcctcctccgcgccgccgccgccgcccatcgccgccaccgcccggatccctagcctgggacgccgcgaatccgatcagcagccgaaggagaagggggaggagcagcagcaaagcgagggtttttggcgttcttggctttcgctgctgctagtagatgatggctttcacttcattctatttctttttctctttttatttgtttttttttctgttcggctgcgatttgggctttgggccttgggccttgggccttggatgaacggcccagcaggtagtttcggccctgaggtgatgatgggctatatgggctgatgggccaggccctatggttgatggtttgcgtcactaattaacagcttgtttggttaggggaatataatagagggaatgagagtttggagtgtggagattgttagggcatcactaatgtatatggcaaaatgatccatatgaatgggacccacataaatagtttttacctatggtaatctccacaatgtatatggatacaaggtatcattaggagaagagagaagagtagagatagataatataatttattccatatgggtagtccatatgtatatggataccttttgttatttttttctatatgaactagttgcacaatggtaataggtggttgaatgaaatattttattgcttatggactacttttacaccacattgtggatacccttatgtctattgtttgatcggtggatatataagagttttttttggagttgggaggggcactttgagcaaactccatgcttggaaggcaattcccttttttttagtacaacgagataaatcttaggcaaaatttgctacaggacacgcaaaaaacacgtaattagctgagggacatcgtgaaaatgtgaaactgcccgaggacactgcaaaatatgtgaaatttgccgtatgacaccgaacgcattattttattattttctagctgaaagtggcgagtatttttttcaaaatgacaagattgcccccaatggcaagtatattttcttcttcagtggcgaggcgaggcgcgtggcgagctcggcggcctaggtgcggaggacggcattctcggcgtcgacagcgaggaggccctgggtggtgaggccaagcacgatggcgacgtgcgcgttgtcgcggcggaggtgcgccacctgtgcggtgaggccatcgaggtggcgctgcttccgcatccgcaactgccgcaccaaccaccgctgacgacgccccctccccccgccgctgccgacaccgtgctcccccctctcccgcttgaggaagccattaagaaccaaccaatcgacggggaggtggacgggcacggcgtcaccgccagacactcggcacccagccgcgcgcgccgccacatggcacctagctgtgcccgccgccgcccaccttccgcccttgcgtgccccgtgagagagagagaagagagagaggaagaggggaaagggatgcgcctagccaccgcacgccggtgcttcccccctttaccgcccacatcgcgccgacctcgccgcatcacgcgttcccggtaaagtcaacgggaaagggaaagaaggaaagagaaggggcaatccgtgcatttagaaaagtatctcacctcttttgacctggaaataataaaataatgcgaccagtgtcatatgcccaattacacaatttttgcagtgtcctcgggcagtttcacgttttctcggtgtccctcagctaattacgcgttttttgcgtgtcctgtagcaaattttgcctaaatcttaccgtacatcatcacttcgaattagatttatctacatccgtactctaatagagatagggtgtgtgttcgttcatagggggtgggtgtaactgcgttgttagcgtctgtatttgtattgtgttttaaaaatttaaaaaaaaagagaagagattgggagtaaaagttaaacaccaatgaccaatcccttcaccaactcccttctccaagatcccaattggcaagtaaataaatttaagcactagaaaaatttcggaagtttttgttcttgaagaactttatttatcagatttttattcaatatatattttttcacacaattttgcaagaatacattcatattgctatattgcctgttgaattcgcgatgagcaccttgccgccaccgaatggcatggctatactcatgtaaaatcgtgtaattcagatagaatcgtgtaaacggtatattcatgtaaaattgagtgaaaaaaatattttgaagaagaaaaaaattctatgatttttacatgtacattatagaagatcttgtaaaataattcttgccttccaaacaaaattagcagtaattcaactcactgtaactcgttgaacatcacaatcagaagagacgcacctgcattgcatggcaattctttttctttctgtcaaactttttgagcaaaaactttttgccaaataatgaacaacaaaaacctgattggcaaaagtggtttgaatctaatttacagcaacgaaccagagaaaattcgacgcatacctgcggaagaaacctatcaaattcgccacaaacttaggcagatccatcacacaaagaacgcagcagctgttcatggcaaatcagaccacgccggaaagcatgtatatatgctgctgttatgctccagtgttagatagtatagggagagagatactgcgaataagccttagggacgattggaacttaagtaaacttgaagagatagagatggaaaataattctatcctaccataacgaactggatcaatacgatcttatccatatactagttcttcagagaaatgatatggtgtgaaccgactggatgcgtccgaaaaaagcaggcgatttttaatctgacccttcgatttccaccggatgattaatatctgaggcgattaattaatatcttggttaattgagtgagtacttgaagaaaccaaaagacagaacaggcatgattattgttgctggttcattcagcgattattcagttgaacaggtatatgaacaggcagggaaaatgaaaccgttattttttgtaagtattttctgcctactaaaagagagatcatttttccctaaaaaatagaatgagatcattttgcacatgttatttatggatctccactcctccggtccaatatcattgaatgaaggaataagtctattctgcctccctcaactcttgctcttggctgaatcccacctcttaactgcaaaattgggtataatgtctcctacctttgaaaactaatgcaaattggttccttcgatggtatgggagacggtttcgactgacgtgacaactttgaccacgttgactgcctaagtcagctctgtcaaaacttcgtctatcctatcttcttcccttttttactacgacgaactaaatcttagcgtacatcatcacttcgaattcaatttatatccatccttactctcatagagatagggtgtgcgtgtattcgttcataggggggtgaatgtgcgttagcgcctgcatttgtattgtgatgtaaaaaagaaaaaaaaaggagagattgggagtaaaagtaaaacaccaatgaccaatcccttcaccaactccctcctccaggatctcaattggcaagtaaataaatttaagcactagaaaattttcggaagtttttgttcttgaagaactttatttatcagatttttttttcaaaatatattttttcacacaattatgcaaaaatacactcatattgctatattgcctgttgaattcgcgatgagcaccttgccaccgaatggcatggttatactcatgtaaaatcgtgtaattcagatagaatcgtgtaaacggtatattcatgtaaaatcgagtgaaaaaaatattttgaagaagaaaaaatgtatgatttttacatgtacattatagaatatcttgtaaaataattcttgccttccaaacaaaattagcagtaattcaactcgctgtaactcgttgaacaccacaatcagaagagacgcacctgcattgcatggcaattctttttctttctatcaactttctgaccaaaacttttgccaaatgaaccataaaaaatgacgaaacaaaaacctgatttgcaaaaatggtttgaatccaatttaatttcgcatgcatacctgcggaagaaacctatcaaattcgccacaaacttggagagatccatcacacaaagaaagcagcagttgttcgtggcaaatcagaggacgccggaaagcagctgcatatatgctgctgttaagctcctgttcttcagagaaatgagatggtgtgaacggtgaaccgagtggctacatatgaaagaagcaggcgatttttaatttgacccttcgatttccaccgtgtgattaatatctgaggcgattaatatcttggttaattgagtgagtactggtaggtagaaaccaaaagacagaacaggcatgataattattgctggtccattcagtgattattcagtttaacaggtatctggagagagagagagagatcattttgcacctgttatttatggatctccactccggtccaatatcactgaatgaactcttgctcatggttgaatcgcacattccaatcgcaaaaccgggtataacgtctttcctatgttggaaactggtacaaatggagaccttcgttggtttgggaggcggtttcaaccgatgtgatagctttgatcctattaactgtctcctgagtcgttatgttggcaacttcctccatcctatcttcttcctcacctctccccctctctctattccctcttcgtcctctctttccccgacgaccgatctgttgccgtggcggtggcagcaaccctgcatcctacctactctactgatggacggcggcgcggccgatccagggggtgccgctccatgtcactggtgttggctcctcctccggctgctctcaaccccacgtcatcgctgctgtcgccgtcaaactaccatcagatgcattatgtgtgtcctaaccagatcactcactcactcactcagccagccagagagaagagagagagagagaagctgagagcagcaagaacgcaaagctagtgcagtagtactgtagtaccagtagtagtattttttttcctcaactcagacgcactagtttgtttgtccatttcttggtgtccaccacgccgcttccgccccagccgccgcagcgccatccatggagagtgtcagcagagtcacgagcacggatgcatctgccatcgctggttgtggccaccgccatgccaacacatcgatcgtcgagggaagagaggagagagagagagaggggtgaggaagaaggtatgatggagaaagtcactgccaagtggatccataaggtgactcagcaagttgatgggggtcaaagctgtcacatcggttgaaaccgtctttcaagccactgaagaagccattttataccggtttttaaagatggagaagacgttatacccgaatttacagctgggaatatgaattaacttaagagcaagttgagggagccaaagtaaacttattgcttgagtgaagaatttttttcatttttagattttttttaatatttacagaaataatctatcggccaaaaaaattgcaaaaatagaccctgccgcccacggcgggtcgaccgcgccgtctgccgccgtcggccaaaattgcaattacccccttgccgccggcaatgggctaattgcaatttttgccgcccataaagaggttgcgctcgtactttttgtatttgggccacttgccgctccagtagagggcggcaaaggacccagatgcaaaaagtacggccaaacgatttttctatgttatgttaataataaataaagaagtatttattggtaaaacttgttaatattgttataaaaatgtattgaagttggttgtttcgcaatttcatatgttaagtaaggtattattttgtaacttattcgacgtattagtactcggataattaataggcctatcgcagtctcggtcgtagaaacattatatggacttaaacaaggagaattatgtaacatgaagaaatagtagtacaatttgaacatgatacaactatttccattgtggttatatagatgatattagattcgaactaggagggaggtagtgcaatagttgaacacaacgacgatgtagtaatgggacaaggaagcatgacagtagaaatttcaatatgccaagttgtccgataatagctaacccctacgtgaggatccctctcctctctcaaaacgcgctttagttaccctgtattgctctggtagttcaagctgcacaacacggctaggtggagttagaacccttctggtgtctatccattctttgtattgacatctccttggtggttcctaggaggaaagaatagatgtaaagcgagcaaagttagtaaatgttgtgagaaaataaggattcatgtaatcaaaatattcttaccatgaaatcgtcgtcaagaatatttggacaaacaaagaaccttcgacccaatgttgtaggctttatggaacgaagaacctgacaacgatcaccacacctgcatcttggacggagtgccgtagttagcacccgccagtcgctctattgttcacgacattgtcgttcataagctgcttttctctgtaagtattgctcagtactttcggatgcgaaataccagtgaccttcttgtaaacaagtggttaggtcgagaacgggattttctgtatcgatccactcgatgtatgcgcaagccgtagtgcgggtctgctgaatagagtagtgttacgaagaataaagcgattgcccatacggaatgaataagcatatgcagataataaaatacctcacggtcatagttagggcacctaaaaaagcgccttcctcgaatattaggattcctcgaagccattagttggcatcgatcaccgcataggcagagaggacgctggcaccaaggtggtagtaggtatcctgacgtgccatctgtgaaaaatatagtgtttcgtgttagaacaattcaaaaagtagtaatgtcaaacaaaagataacttgtaaaattatgaaataataataaaatcatgagaataatgatgtacaacaagagtacatgctatttaaatatagaaaacgttactaagggtacataacgatgacgtgcaatttaacatatatgtagagttcgataatataacataacataacataacattacatgtcgaagtccgacattacatcagcatacctaaagacactaggtgccttagtctgacgttacatcacgagacctaaagacatgacatgccgaagtttgacattacacgacgaaatataaacacatcgataagttcgaaacaaattacaagcaaagccacatgccaacatagaacataagaactacaccacgtagccagacgtggcacgacgacgcctaggacattatcgagtggaggtagtgccttcacccgtagggctagctccatctgctgctgatcctgatagtcctgcctccgccgcacttggtttctccttgtctttaggacaatgcttgtaggtgtgcccacgttcatcgcatttgctgcaacgcttcaccctgccagcctccgactcgtccatatcgttgcggatgcgacgagtcttcctccttccagccttgcctcggagcttcgatgggtcaggaatattgagtacttcatcgttagtctctgtgaactccccagctatgccgaacccataaatctcgccgctccatgtatgatatattgcttacttactgaagtactgtgaaacatatactgcatctggtatgccacactctgctgcggcagcaatgacatgggtgcatggcctatggagcagcttcggctttgcacaagagcaatgacatgtgccatcggctttgagaacacactcctgcttcactctcttgcggtagatacccttgcctaccttatcttgacatagtatctcaaacctgtgctgttgggtaccttgcactagagctcgatgtttcatggcctttttacgcaactcctctagctttttcttcatgaaagttccaaacaaaatgttgttgttcggcatagagggaagaactgcctggaaccgatccctaaaatacctgcatgtcccatgtaaaatgaacttcactatgccaactagtggcagtccacggacaccgcgcatcacccagttgtaaacttctgccaaatttgttgtcattattccatatctagcaccacctgtgtcatacgccttggcccatttctcttttggttcatgcagaatctactgagaaaatttccgaatctccaatccagttcttctaaccaatgttggactatccgttgggagaggtccaagagcttgaggagggtcagcatcggcggtcgatggagccgctgcacgctgatcactgcatttggctgtcaactcatctaatctcttccaaagctcattgaattttttctcctggttctgattgcatagcctcttaaacatgttcatgagctccttgttcttgaattgcatgaagaaattagctcccatatgacgcatgcaccacctgctctgtacatcttcccactcaccagggtatcctcgttccatactcccaaactgcaactcttctatcgctcgcagaatgccagcgtgcctatcatgtatcaggcacacatttggcctcataccaacaacttttgttttaaccaatttcaggaaccagtaccagctatcagtattctcactctcaacaaaagcaaatgctaagggcaatacctgattgttcccatctacccctattgctgttagtatctggccccgatactttcctgtcatgaatgtcccatcaatgcagagaacaggacgacagttcacgaatgccatcttgcatgcatgtagagctaagaatgctctttgcagcacactcttgctaggatgttcaattgaggggaatttcttcacttcgtaagagctcccagggtttctttcctcgataacaccaagcaggcgtggcaaattgtcatacgaggcttcgtaagttccaaatctcatctctattattttctgtttggccctccaggccttggcatagctaatagtatacttgtatgtctcttcgatgtgtcgtattattgaccttggttcatatgtgagattatcgatgacatgcgcatacatctcagatgcaacaaatgcacatgtaatgttcctgtggtatttctgaacaccaggtagaaaacatgtatgcttggtaacgactgacactgtccaataatccttccatttccccttatacgcgtgcactctccagggacaactatctttttccttaacacaccgaacttcatattgcgaccggttggacttggcaacccaaaactctctatgaagtgacactgcaaaatgttttaccgcctccttcatatcttctgctctactataaatcgctccctgaataacctcattttctttgtactcccatctcacactatcctcttcagagacgaccagctcagaaaaatcctcactagcccattctgttggattaatatccgtctcatcatctgacgaatcaccttcctctacacgctcgttgtcagaatcctccctctccatttcatccacaatggcaccgacagtctccccctcgtcggccactccacctggttgaatgcccactggagctactacacccccgtcctctcgtgcgttgacctcctccacagaagtctcatttacttcagcacttagtccctcgccatcatccatgttcatctgcacacatggatccttcgggtgaacaaacggaaccatagctagaggccacccgcgttgcaatgcattttccacataccatctccatactcgagagttttgaactggcattagttgccaataaaaaccctcagctgcccgacttactatgacattgattgttatgtcacttgtctgtggatcaactctcaagcccctcattaaccatccttttatagaaggtacactcctctcagccggtctatcaattcccctttctgatacaataaaatctgacagatctaccccagttggcccgtaacggacatttcctgggccatggtaaacttggaatatttgtttgtttgacatatctgtcaacgaaataactagatcacattactctttcatgcaataaacatctacaacgtaatatcttcttgtgtttgccaatgcaacggtaaagtattgattccaaactagcagatctacgtagttaccgatatctataatacacacttctagattagtacaactaaaaccctaaaaatataatgcatttattcaaacaaagttttaaaaaaatacacactatttaactcaatagtcacatataggatctatgaatattacctgaaatcggcgtctgaatctggcagggcttcgccccttcttctcttctcctcccctttcttctttttttttcgctggatttgagggggaggaatgagggctgggggctgggcggca

SEQ ID NO: 8745 - DNA, 26367 bp, Oryza sativa
aggtatcccctcacctgtgacgggccgaaaggaaaacccgtcagaggtataccagtgacgagtttttcttccaacccgtcactggtatcccctcacctgtgacgggccgatacattagaagccgtcagaggtgatgggccgccacctgtgacggctttcatttctggcccgtcacaggtgagcggataccagtgacgggccgttgaatagaagcccgtcaaaggtatgagcaatacctttgacgggctttttttatctaacccgtttgaggtgtgttgggtctataaatacccccaaactgccaactgctttccatcccgaccattgtactgttcacaaatcggttgggagggcaaggggggcgattttttactaaaattcaaggtaaaaaacacattattctccattcattctcaacatatcgatcatcatttatttttcttcgtatgttgttgatttcagatggatcgtagatggatgtactatgcgcatcgttcgtctaccgagtatagagagggggtcactgaatttgtcacatttgcggataatggcagaaaaagtaggatgagcatgcacatgttgtgcccatgtagggactgtaagaatgaacagatgatcgaagacaaggatgaagtgcatgctcatttgataatgaatggattcatgaagaaatatacctgctggaccaagcatggagagcaagaggcgcctgatgtcgcagctgaagaagtgttggatcagggtgtagagaacaccgccgcagctcgagaaggcatgttcgtaccttctcctttaggtggagagaccatagatttggacactcaatgtctatctacaatgttgcatgacattgaagacgcagaggacaacgacagagattatgagaagtttagtaagttggtggaagattgccagatgccgttgtatgatggatgcaagtcgaagcacagcaagttgtcatgcgtgttggaactgatgaagcttaaggctattaatggctggtcggacaagagttttacagaactccttgagctgttaaagtatctgttgccagaggggaacaatttacctcagacgacatatgaagcgaagcaagtattatgtccgttgggcctggaggtcagaagaattcatgcatgtccgaacgactgcattttgtattacaaggaatacgctgacttggatgtctgccctatctgtgggggatcaagatacaaacgagcaaagagtgaaggtgaaggaagtaagtcaaagaggggaggcccagcaaaggtggtgtggtatctcccaattgcggagcgcatgaagagaatgtttgcgaacaaggaacaagctaagcttgtgcgctggcatgccgaagaacggaaagtcgatactatgctgaggcacccagcagattcagtgcagtggaggacaatcgataggatttaccaggaattctcaaatgacccaagaaacatgcgtttcgcaatgtgtacggacggcattaatcctttcggtgatttgagcagtcgtcacagtacatggccagttctgcttgttaactataaccttcctccctggttgtgtttcaaaagaaagtacattatgcttgccatgctcattcaaggaccgagacaacctggcaacgatatcgatgtgttccttgaaccgataatcgatgacttcgaaaggctatggaatgagggcacacgaacatgggacgcatatgcacaagagtatttcaacctccatgcgatgctgttttgtaccatcaacgattatccggcccttggcaacctttctggccaaactgtgaaagggaaatgggcgtgttcagagtgtatggaggaaacaagaagcaaatggttgaagcattcacacaagacggtctacatgggtcacaggagatttctcccaaggtatcacccgtataggaatatgagaaagaatttcaatggacacagagatacagccggacccccgacagagctaacagggacagaggtgcacaacttagtgatgggaataaccaacgagtttggaaaaaagaggaaagttggaaagcgaaaagagaagagcacatcgaaggaaaaaacagaggagcatgtggaaaaacaaaagacaaaagagaggagcatgtggaaaaagaagtcaatattctggagactaccatactggaaggatcttgaagttcgccactgcatagatttgatgcatgtcgagaagaatgtatgcgagagtttaatgggattactgcttaacccaggtactacaaaggatggtctcaacgcccgacgagatctggaagatatgggtgttcggtcggagctacatcccataaccacggaatccggcagggtttaccttcctccagcctgctacactctctcgaaagaagagaagattgatttgctaacatgtttgagtggtataaaggttccatctggttactcatcaagaatcagtaggctcgtttcactgcaagatcttaagttggttggaatgaagtcgcatgattgccacgttcttatcacacagctgttgcccgttgcaataaggaatattttgcctcctaaggtgcaacacccgatccagcggttgtgttccttcttccatgcaatcggccagaagatcattgatcccgagggactagataaactacaggcagaacttgtgagaaccctatgtcatcttgagatgtactttcctccaactttctttgacataatggaacatcttccggtgcaccttgtgaggcaaacaaagtgctatggtccagcattcatgacgcagatgtatccttgcgaaaggtacctggggatccttaagggttatgtacggaaccgttcacaccccgaggggagtatcatcgagagttacaccaccgaagaggccatcgaattttgtgtggactacatgtcagaaacatcttcaattggattaccacgatctcatcacgaagggaggcttgaaggtgttggtactgttggaagaaagactattaggttggatcggaaggtgtacgataaagctcatttcacggtactacagcatatgactgaggtggtgccgtacgttgacgaacaccttgcagttatccgacaagagaacccaggccgatcagagagttgggtcaggaataagcacatgtcttctttcaacgagtggctgaagaaccgaattgccaggttgcagaacttgcctagtgaaacacttcagtggttgtcacagggtcctgaatggagtgccaccacctggcaaggatatgacataaatggatacacctttcacacggtcaagcaagacagcaaatgcacagtgcagaacagtgggttacgcatcgaggctgctagtgacggtggtcgtcgtgatcaatactatggtagagttgagcaaatattggagctagattacttgaagttcaaagtcccgttgtttcgttgtcgatgggtcgatcttcgcaatgtaaaagttgacaatgaaggtttcaccactgtcaacttggctaacaacgcgtacaaggatgaaccgttcgttctcgccaaacaagttgttcaagtgttctacatagttgacccgtgtaacaagaaagtacatgttgttcgtgaagggaaaaggagaattgttggattggacaatattgcagacgaggatgattacaaccagcacgtccacggcataggtcaagaaatacctctagaagaggaggaggaagaagatgaagttcaatatgcacgtgtcgaccatgaggaaggattatttttgtaatttatgtacgtagtttatgtctacatgtctgttatctgtatgactctaatatgttcgcaatgatcaatagtatattgcttatgaaatagtcaaataaaataattaagtgaagcacccactagaagtgaaataaaataattaagcaagtataagcattggaaataatataattaaagtagtataataatgaagtgcaattactactgttagtgaaataaaataattaagtataaaaaaatatgtagtgtatgtgaaaatatgttaaggaaaataaaagaactaagtgaaataaaataaaatacactcgttttaggtaagtttatatgtgatgggtttatttgtagggttttataggtgacttatatgtacgggctagagtgttgggtttgtcataggtggttttattgtcacggttctatggttggcgttcgtcacaggtgaggccacctgtgacggccacatagttggagcccgtcacaggtgagtttgactagggttgacctagggttggacatcttctagatcgatccagatccggcgcccactctcactcactcactctctcgaccgccgcctcgcctctctcgacctctctgccgccctctacgccctcctctccaccgccgcctcgacctctccaccgccgtcctcgccgccgccaaatccgccgccctctacgccctcctctccaccgcctcgacctcgacctctccgccaccatctctgccgccgccctctacgccgccctccccaccgccgcctcgacctctctgccgccctctccaccgccgccgcctctcgaccgccgccgtccatctccatcgacctctccgccgccatctccgccgccctctctaccgccatctccgccctctacgccgccctccccaccgccgcctcgacctctccaccgctgccgcctcactcactctttcgacggccgccgggacctcctctcagtcgccacgccaggaccgtcgtcgccgccaccgggatctcctctccgccgcctcctcctctcgaccgggactcgtcgtcgccgtgtgccgcctcctctgctcgtcgtctcctctccaggtacccctctctctctgatgcccatgaatggaagaattgattctttgataattaaggaactttattaggtttagggtttgaaatttagttcaaatggaaaaattgattgattggccgcagatttaatgttgttccgaggttatcaaaccatcacagaatacaaaatgcatggggaattttggtggattggtcagtgtagtccatggacggaaccgacctagacaccaaaattctccatgcattttgttttctgtcattctttgatgattaaggaactttgcagattatctaaactttgtggatttatataccctttttgtctatgaataggtgaattgcatgaattgttgtttatatacatgatttatatacccttgctgctgctgccacataaatgattgtgggctgttttattatctacacttgattgaattgaatggatgaattgctgtttacatgacgttagtagtactgtctccttttttttgatgaaatatatgcatatttgagatgtgaaatatatgaggtgatgaatttggactatttgtggatgaaatatatgcagtattagatgaattagtctttttgtattagatgattttaggattaattttgctgcattggttgaattttgcatgattttaactagataaatggccagtgatgttttatgttaatacacccctgccactgctgttattgtgggctacttgttaatacacccctattgttgctgcccctgtggagtatctttgcccctgttgctgctgcccaatgtgttccttgttaaatggccagtgatgaattgctcaataagaacaaattatctacacttgttctttttttatgcataagaacagattttctgcacttgctcttttttctggattgataagaggagactatatacacttgttttctgtcattctttgatgatttatatacccttgctgctgctgcccaatgtgttccttattaaatggccagtgatgaattgctcaataagaacatattatctacacttgttcatttttttgcccctacacttgttcatttatatacccatgctgttgatacccctgtggcatatatactcctcctgctgctgttttatgtcaatcatgcaaattctgtacccttgctgctgctgttttttaaatttgcatgattgattcagtggttatatacctctacacttgttctttttttatgcataagaacatattttctgcacttgctcttttgatgttatgatttcctctttttatcccttcatgcaaatgattgtaattgatgcatatttctcagcaaaactgaggccatatctttcatagtataccccgtattacattggatctaatgctatttagtctaatggtaggaaatttataatctttttcgcgaaagttaaaccatgtcaacgcccggcgcaaacccgccctccccaacacctgcgaggatccaggaagaagcaaacccagccacagaggcagttgccgaaggtcatcccgcgacaacggcggtccaacaacccgaaattcatggtaatttataggataaattttcaccacatgaccacataaattttagctagcaccccttagcaaatattgccttctgtttgtgctgcagaattgccgcatgaacaacatacgtcgatgtcgggcgggacaagtgcaagtaggtctagtagaaatccgcggtcacaaaatatatggccgaccacagtgcaagttataagagaggttgacgctagtggtaggcccacggcgcccaggactgtcattggaagatggtctaactgctgcgggatagcggcacgtgagaacttcgggatcctccataaagatatcgggaaggtcacagaagccgagaaagagcgagcttggacggcaatggagaaatggttcacatttccagccgaagcaaaggataggctcaagcggaaggcattccaaaagatgggcaaagcttggaagaattggaagtcgaagctcttcaccgagtttgtcaacccgcccggcaatcatacgccgttcgatgaataccctcaaataaccgaagcggtttgggaggaattctgctctctcaagaccacccaagagtttagggaatcaagcgaggcacatcgcctactgcaacagcggaatgagcacccgcatcggctgggcaccgcaggatacatcggcaaggaggcaatatgggcccaagaagatgcagccgctgcagcagcgaatgtccctgccccgttttcagacatccctgaacaaagagctcgcaactgggcgcgggcaaggggtaaggtcaacccggacggctctgtcacatttgagaacaaaagtgatgccgtcgtctatcaggaactggtgagttcactacttaacctaactaatttccgttcgtataaagtacaagttcatataaacgactatcttcttttctagttgggcttggttactgaacaagcttcacaaagcgaggttgagtccgcgccgaagaggcgcgaagatgacatcctcacaaaggcgctcggaaccaaagaacatcctggccgaactcggggaattggtagcgatgtgccctggaagcatggactccctcagtacagatcccaatacaggaaacggaaagtctccaaggaagagagggacgctcgtttgaaggccgaacttaaggttgaggtcattcaagaactagaagctagcatgaatgcaagggtggaagaaagggttaacaaggtcctcgccgacatgaatataccccgagtcacaacacctgctgtgcaaccaactcctcgtgtacaacacgacgcgagtccgtcacagcataggagtagttgtgcatccacagaggtgccggcccctggtctcccgatcgcaccactagctgcagtggaccacatcgaggtaattgttgttatccgatccatatctaataaaagacatgtacacattccaatattaaattcaaactttcaccttatgcagggcgcagcacagtgtgtcctactagcgagagtccacccaactttcgctcctgaagtcgctgagggcatggctttcaagccctcggttatagacaaggtccacggcgcagacctgctagctgggtatgccaaggtgtccatcgatacagtaaaggacacctggtcaggctatccgctgcccgtgcccccaaatgatgaaatcatgactttgggcgatgcgcgcaagacgttcatacaatggcccaaagaagacatagttgtgaagatgactcctcgtccaagtcgaccgacggagcttacacctcccaagtctaagctatcaattgaggctccccgtggaccggcattgtcagtacctcattctcccggtggagctgatatggacttggcagatatagctcaaagcttggctccaataaagaccacaagaaaggccgatagctccccaccacttgtcaagggccagaagcgtgaacgcggcaaggggaaggtcggggagttggcgccggagccaaaaaggggcaaggctgcgacgtcgatgccggtgagcaaatcggggaaggtcgtgagggcgccagcccaatttgagctaggcatgccattggtggaggacaatgtgttagctgtgatgggtattgcttgccgagagctacataagcaatacatggagctaagcaatgccaagcggaaaatgagggagtcatccatagttggacatcacgaccaccagccgttcctatcgtcgcctgcctatataactataggctttgatgacctcttcgaccttttcaggatccggaagttggacactggtcttcttaaatgctactccttgtaagtgcataccttctatacttgtgatatgactggactatatctcctaattaaattagttctaatacgtacatattttaaggttgtgttggatcgagagtcgtcgccatggtaatcaggttgggttccttgatccatccatggtgaatgaggttaatttacgacagagcttcactgaggtggttgactatgtcaaccggtgtttatgggcccatcaagacaaggagtacatcatgtgcgcacacaaccaagagtaagaggacaatacccttcgtgtatattgtttttgaagttaaggttcttagtactaacgctacataaccactgcgcatgcgacattggattctcctagtcatcgtacctaagtggagtcgggttacctaccttaactccaataagtccaaagattatgatttcagtgaaatcaccaaggccttaaatatggcttggggcccatatgtggaaaagggtggtaggcacaaggagggcaagaatgaactttatcatgacaccaagtttgcatgcgcacaacagatcggagaccaatgtggtttccacgtgtgccacaacatgtcaacacttctaagagaggtgaaagatttcgaccctgaggttgttgctaatggcgaataagctcatttcaatatctacattgctattcaaaacgtgctaattaacctcttatttattaaacagaaaggtagagctggcttcaagatctcacccatcaaccccccccgctatcagaggcgaattgtgcgcctttattcttgcagaaataatgaacaagaaaggacgttttcatgccaaatagactcatgaacttggctagataatttattgtgatgtaaaaaagatgtttttataatttctggcgatgtaaaaaattatgtttttatagagtgcaatgtaatttactttcatatgtgcaatatttatggtactttactaaattgtcatcacatttgatcaactacgatttatgttgtactattcatctgttttctcctttttttttccttattgacaagttgtgcaggtcgatgacattatggctttaatccatttggtaagtatatatgcggttctatgagcaacgaccgaaattgtggctttcaaggggtgtgaatttgctgtgcaaaattgtggcatttgaactgcatatatgtgttgttggggatctgtgatgttatattggggggtgatgtatctgtgatggatctgtgactggaatatatctgtgatgtttctatttttcagagggcatggctagcaaatcctgaggctagccaatatttagcatttattttttttctggaattaactcatcagtgacgggtcggaacaaaaatccgtcaaaggtaacataacctgtgacggactagcaaataaaggcccgtcagaggtgacctacctgtgacgggcctttacttttggggccgtcacaggtagatcacctgtgacagcttctaactacggagacctcaacctctgacggcctttatttaaagggccgtcagagatgagtcacttgtgacgggtcctaactcgctcaaggctagcggagaccaacacctctgacggccttctagtaacttgcccgtcagaggtgggtgtcacctgtgacggccggccacccgtcaaaactcaccagtgaccactgatcactgaccatgcgcgaagccgtcaaagatgagggtttgggcccgtcacaggtgaccttggccagtgtagtgatacatgattagcctatgtgatgctacattaaacatatgctaattatggattaattaaacttttaaaaaatatttagcaaattatctctcatttatgcaattagttttgtaagtggtctatgtttaatattccgaattagtatccaaacattcgatgtgacagggactacctcatgactccatctccctggatccatatgacatatattaggtcgtccactcttctagagtttctagttaaaaaggtctactccactgtcttaaagaaaaatcttctaaatttagacatagtctatatatatagatttatagttgtaagttcgttttttctgataacgaagatgtacatcgttagcatatagtagcaaatccagcacgttacaacgacagtgcaaactcctctcctctggcctttactcctacacaagaaccaaaagagcaagagagaggaccttgcaaggcagccaagcatccatgcagtgctgctgacctgcccgtacaaaaaacaccaagaaaccttttgaatcgacgatggccctgttgccgtagccagcaacaagcgatgacactttggatagggacaatgacacaaaagggcccgtctagaacaaaaccaaagaagaaacaggggaacatgaggagcacagggaatgatgaagcttgctccctatcccccccccctcccaagtcccaagagcttgagcttcaatacttcagaatcacctcccgagggacaccgggcaaagcgagagaccacttcttttccataaacaaagcaaaggaaaagaaaagggggacagaatgacagtctgataaacagatcccacatatcaataacacattttcattttttaataatgaaaatagattatatctttgatttttatcataagacacacaaccgtaagtttgctaaaaaaagggtaaagataaaaataaatcaaaataagagatgaggtgatgggataaatcctcaactcccctttattattgactagcgttaaaccacatagattttttttaagctagcaattttaatggaactacgtcgcttatagtggaataagaaatcttaactactgatttcaagagtgtagttacactgtgcataatatcctgctgctcctgtggtagcaatgtagatcaaaagtgaagctaatatgaagataacatgcataaggttagataattatttaccattaaaaactttatcattacaacaacaccaaattgactaacatacaacatattttcatgagttcatataagaacaacaatggtttccttaaaaacccttcataaccacgggtcacatcaaaggttttattagttcgatttatttatacgccttacttaggattcatagttttttttaagctactggctgctgatttatcacgaaaatgtgttaaaccgtgtatttttcttaaacagtatgtttacttaatataactcatctcatttttacgttaaataagcttaaagcccaaacctcatattcgaccgcagccatacatcaccgtgggcagcttgaaaacaaaaccggcctatgagtatgacattccacacaaatctcttaattagagcatgtacaatagcaggctataagccagctataaccacatatcaagaagaaagcggactacagatttgtagttagctgtaacacgaacttcaaaacgttatatgtgtatgagatgtgggaccggatattaatggtgtagcatgattttatagctaactattgtatgaatgggctattagattaactatagataatttggagccaatggttagctatatactattaaggtggtgtttagttagagggattaaagtggggctaaactttagtccctctcaaaaaaatataagtccctatataagtccctaccaaggacttatatttttgtgagagggactaaatttagtcccaagttcccaaacaacccctaaacttgctagtaagggggtgtttagatggggttaaaactttttagtccatgtcacatcggatgtttggacgctaatttggagtattaaacatagactaataaaaaaaactaatttcataaatgagagctaatccgcaagacaaattttttaagcctaatttatctataattatgaaaagtttactgtagcatcacattgtcaaataatggcgtaattagactcaaaagattcgtctcgcgaattagtccttagttataaaataggttttataattagtatatgtttaatactctaaattagtgtctaaacatccaatgtgacatgtactaacaggcccttactctttacgagtattttttttcccatgggcaaaaggatccatgtgcacgagcgcagcagcgagatgtacgtgttccaggaaggaagagtccaaacacgtacgtacgcctcgaaactaaacctaatttggcacggtgcacgcagcgaccccaatgccctccctccaaagtccaatcgaactcgccaagtggacgtctaccagtacgtgtaggagtacatccattgcaagccaagccaagcaaaccaaaacaaagcttgttgcaaaaggagaatcaaacaacagcccaaaattatagattggttcaacttaaaaaccctgttttcaaaattctttttgagaagggtactttttcactcgacctctagattcaacctgctaatgcaaccatttaaattggaaacttagcccctcaaacaactcaatatgaaattcgcttctttggagatttgaattcaaaccttaaggtactactcaagtcactgtaaccaatagactgcaaccttattttcaaatatgtgacagtgttaacttttctgcaagacacttgaccattcaaattagtttgttattatttgtttttatcaataatataatctaagaataacttatagttttacatatgttcactgaatttttgataaaaggaattgtcaaataattatgtttaaatgtcgatcatgccatatagtactagatattactacgtagtgtaaagataagacatcctttatctcaagatatactaagtaaggctcccatcggatggtctattcagtcaaagaaaaagccaaaatttgaattttcaaacttaattttgacattgattttgagatattttcaacgtagtttctttttcagcattggcttttaagtcaccaagaacacatatataaaagttttatctacaaattcatttgtattctctaataagtcgttttggcttattacgaaaaaagccaaacgataaggccccctttgaatcgcagggtagaaaaaacggaggaataggaaaaacacaggattctgatgggaattgaagtgtaaaacagaggattgcaaaacacagaaaaaatacaggaattgtcatttgattggagcgcaggaaaaataaaggaatcggatgagagagatagactcaaaggaaattttccaagaggttggagctcttgctaaattttctccaaaatctacatgcaatgtgccattccataggaatttcataggatttgaaaagcttcaatcctttgaatcaaagggccaaatagaaaaatttcttataggatttgaatcctatgaaattcctacataaatcttttgattcaaaggggccctaagaccttaaatcagtataagatatgatagatcccagtactaacagtccaaacaagttactagcagcgctggagtatcacattcgtactaaaagtttggaacggaaaaagatttttggaacgggaatttttttaaaaaaaacgtggattcgaaactttgaattttaaaccgtgccagatggcctcgaacgccacgccggcgcacgtggctgatcgatcgtcgccacgtcgctggaactactcgagcttgatcatcacacagcattttgggtttaaaagaattttttgaggcgaattgtgcgagatgctgtcgtaccatgaaaatccgtttattaatggccaagttgtaagcaagagtcaacttgttaacaatattatggaccggaacaacttgttaatttaggtttaattcattcacacctctacacattacctcaaaagaaaacagaacaacgttgatatgctgtccgtcaacttgattacttgagggctgtgattcggagtatcaagttgacaaaattttcctctaaccggcaggccaggttgacaccaatatgaattggtttttatttaatatcataaaaaaatggctagtgaagattgggatgttgtttggtttgattccaacaaagtcaatgtgagaataatatgtagtggtagtacgtttgtggaagaaaaaatggtaataaggctagattttaattacctttgctcaattacgcatggagagtgtttcacttaaaaagaagaacttgaagaataagggtgtgtttagttcacgtcaaaattgaaaatttggttgaaattgaaacgatgtgacagaaaaattggaagtttgcgtatgtaggaaagttttgatgtgataaaaaagttggaagtttgaagaaaaaatttggatctaaacttggcctaagcctaaattaatcctaagactaaattctagttttaggtaccaaaatttataggatgtatgtctttatctctgagaccgaagatgtaaatcatttctattatcttagaaaaataaatatccgaattatcaaacgagcaggcccaacataatagaactacaatcgacatcgacttgctcttacattttgtaatcctggagtgaccatgatggtcccagacgtcacgaagactttggaacacaccttgagtagaccaaagtcttgttcattaaggatgagctaatgtgatattccaactagtagactggtgtggttagtaggcagagatatccattatgaagcatgcaatttgctctaattaatgaattccacttgccacctttgtcaaagcctcaaaagggagaaattttgcataccaaaatacttctacattttgcataaattcatcagtgcaaaatgcagaaatctctgcacaaagttcagtttccgggggctgaatttaaactgaacataaaacgcagaaattcttttctccctttcagagcaatataaaaatgtgcaaagatccaatcagaggatgatcctgaaaaaaaaaatttagccaagaacaaaacaagcgtcggcataacaaaaattcattgcaaaaatatgaaccatttgtgccggcacaatcatatccacatgcagcattattatgcaaaggaataatgtactcagtagtatctcttctccaagcagagagcatcttcttctgcatctcatcatcatcatctgcttgtgtttgtgccggccggctgcagagtgtaggcagtgctcaactgcataaccatacttaattatgcatactaattatattatatatgtagtgctaattaattaatcataattaaactatagtacataatatcaatcactcacacttacaaaaacaggttattggcttaattacatgtaattaacagccatcatcatcatcatcatgatcacaagcaccccaaaggttaaacaaaaaagttacaaaaggtaaaaaaaaaaagaaaagtaaaaaaaggagggtaaaaaagagaggagaaaattaaaagttatttggatctctagctaaggtgaaagaaaggcttccatggctcaatgcaccttcttggagaagaaccccttgatgccgaagagcccgccgccgccgccgccgccggcggaggcgcgggcgactccggcgtcggcgcggcggcagctcacctggtggcggtacccgatgcaggagttgatgctcaggttgatgccgcgtatcccgccgccgccggtggcggaggtggtgtggggtttcttggcgccgccggttggcttgtccttgtggtgcggcggcctcctgtccgcggcggcgtgcttcgccgccggcgatggcgggcgcctgatctgccagaccgggctagaccggcccaccggcacgccgccgcctgcgcggccggggctggcggcccagcggcgaggaggaggaggaagggacgacgccaccgccgccgcctcgccgcgggagttgctgcgggagcacggggcgctactggccttccgcggcggcgggcggggcttcgacgaccccacgccgcccccgccggcggagcggctccgggagaacggccagatgttaatgttcagctccgatccgcctccgcctcccgccggtctccgccgcctcgtcggctgatccttctccttctcctccgccgccggctgctgctgcttcttggcgaatatatccgtccaccttttcgacccaccaccaccaccacccgacgccgccaccgcagcagtgggcggcgccctggacgcgacggccgcaccaggctgcacctcctcctcctcctcgtcctcatcatcatcatcatccgcgacggcgagggacatggagaggtcggcgtcgcggcgggggtaggggaggggttggagggggaggaggacgccgccggagaagagctcgtcggcgcaggagggggatgcggcggggtcggcgtcgaggggccagaagcggaactccggggaggcgctgctgctccgccgcctctgcgctgctgcggccatctcggatcggcgtggagactgcttcttggagatggaggagagatggttgggggggaatggcgaggctttgtatggcgtggcgtgcggggagggagggacacatggggaggtgggacccgcgcacgccctcccatttttctgatgcagttatgagaggtgggggtgtgggacccaccgggaagtggctctgtgggtggggtagagggaggggaagcgtgagggcattttggggaactttattaaggactcgttcgattttcatgcatgcttaggaagaaatatttccacttcatgtaaaaatgaagaagtttattaacatataattaattaattaagtgttagttatgaaaatatatttatttattttttcttaaacaacttctatatggatttttttaaaaaaaattacacagtttaacagtttgggaaggtgaagttgaagttgggctagtactactttaaaagaaagttgaaataaagttacacaaaaggaacaaaatagcaaatagtgctctttgtttttaaggccgagtttagttcaaaaattttacttcaaacttctaactttttaatcacatcaaaactttcctacacacaaacttttaacttttccgtcatatcgttccattttcaaccaaactttaaattttagcgtgaactaaacacaccctaactaacattgtcaggattcactttaggtaagtgtggcatgttatattttttaggcctataaattacaagctatacttgtatacttgtggtagagttaggtaaataattaagtttatgatacgtgaggctaggtgctcagaacgtatggcaagccatcaaatacaacgctaaggaggtgtggcaatctaaaatgtggtgtcacaagttgaagaagtgaacacaaggcttctgctctgttttttattaagatatagattttattttggtttttttaccattttttaaactacaaaactgtgtactttgtgtgaaaacattttatgtaacaattactaaactatcatataaatctatttttatgtttaatataattaaaacttaattacactaatgcgtgtttaatctttcatctctggtaaactcaagcagcgatattgatagtcatggtttcacttacctactcgactgcactaagcggcggttggccatcactcgaaagtttaaccaattcgtgtcgttgaaaatgtctgattaaggatctacgaggggctgaacatattgtggtcattatcagcatgtcttaccagtaattaaatcccatgaaattaacattaatatcatatcatccacctctatctccggtaccatgtccacggagtatacggtgtatacttgctaccactggtggagaaatcatatttggtcggtcgactaaatttcacaatagtctcggttgcaataaaaccgggactaaagatcatttttagttccggttaaaaaaattttgatctttagtcccggttggtaacaccaaccgggaataaagatcatttttagtcccggttcaaagaggttggtgggtcgagtcaggctccaattatctttagtcccggttggtataaacaattgagactaacgatctactaggaccaaaataaactgccgagccgtgcgccgatcttatctactcggtatcccctccccctttcttctctccttcattaagactcggtatcccctcccccttccttctctcgatcagagagaggcctccttcccttcctcccccttcccctctcctcctctttcccgcctcctcctcctcctccccctctctgtggcgaccgggcggcggtggcggagcgagccggccgcgcgacaggcggccgtgcggcgaacggggtgcggcagccggtcgggcggcggcggccgcgtggcaggcgaccgtgcggcggacgggtggcggcggcggccagtggggccacgcccagcagcggcgggcaggcggcgggtggccggcggggccgcaggtggcggctgtggtgggcggcggcaaaggcagcccgcgttgttttctttttttattaatttgtgattcactaagatgtacttttgtatggataattctgtgatttattgcacatttgtatggatctgtgatgtatttcatttgtttgtattttttaggatttgtgatgtatttgatttgtgtgtataagtaactttaagatttgtgatgtagatttaggatgttactttgatttggggtatgtatccaggagaaaataaaaaagaaagaaaaagaaaagggaaccatctgactgccgctaccctctctttagtcccggttggtgactaaatatctctctctttagtctcggttggtgttaccatccgggactaaagatcgatctttagtctcgggtatttgaatcgggactaaagatagcgatctttagtcccgtattcttactctcggttggctatagaggattaccaatcgggagtaaaaagggtttctccatcagtgtacagttcacgcttttttttagtaacgaataatgtagcctgccatgcatgcatatagggtgtgcttggttgcttgtattcccggagtacgtctggctcatttctcttatccaggttgatcagtttatcctggtttaacgtatacatatgcaagtgtttagttgtagcacagggctgatggaatggttgtatgtaggagatgtttggttggatagatatctattcttgtgagtggtgaagttaccatataaagtttgtggagcgagatttttttcaagtccctaaatctgtttatgggtgataaggttaatccacaatagatgttatagattaaattgtgttactctgggtctatgcccacctactaatatttttgagctcatgtttctgttagagaatcgatgtactacgtatgtatgttttactaagttgctccggtccataatggaatggcctggcttactagatcaaaatgcaagagagtgattattatagcaaaaatcatgtacataatttcatcggcgacactggtatatttgacaattcaaaaaagcatacaaatatacgtgctcatggcaagtcatttttttaccggatattgattacaaccgggacctatagcataggtgccgatttttaccagcggccgacattaattttgttggtgggcattggcggaagggtaataggtgccggttttgaattaagaccgatacaaatactcatctctcagctggattttggcgaaaaacgtttaataggtcccggattttgtccaaccggcatctttaaagccggtccttatacattttttttaaagtagtgtaaccacatatacaaaactaaaccactggtttggaacaaatgccgaggagagaagggacggtggtgaccccatccacgggttctgcacgcgtgggtgcaaacagtgcacctgtgagtgcagcctcacagcatgagacgaggtaggctgagttgcgaaggttgattcgaccatttcctctcagcctggctccatgggtctttttttgcatccatcgggtctggctctaagatagttgcacacaaccaaacaggcacaaatctaatctgctggctaggtgcgagccaggtgcataccgggcaatcaaacacacccatatactctttccattctataaaaaacaaacctaggatgagatgtgacttcctccatcccaaataaaaacaaatctagtacgagatgtgacacatccttatacaatgattgtaacaatatcaagtaaaaaaatcaaactaaaatttaaaattttaacaaattttggtcgaatttcaccgtagtcaacggctttcatgaaaaccaaaaaacctcaggagtggttttcagaaacgattcagatttatgaaccctgtacgttatatcttctttgaaccttttttttgatgatagtattacagatcgctgatgagaaatttgacatagcactgtcagtagaaactatatataaatatgccacagatcgcagtgcttgtgaattattgttagtttctttcatcggcataaattcccataggcacgcacggattttagttttatgtcgaaacaataggacactgacaacatacggatccgtttaattgtctgaatgtcttatcaatttcaccataactggttttagatatgcacgactttattagtgaaggtcagtataaccaatcaacaacgctttctttcaaaagaaacatatatatactgtagctttgaaaacggggtgtttcaactaaagcatgagagcagattagagaaactaaaaagttttcaaccctttgtggggaactctcatggatgtaatggatagagaatacacgagtatattccttaatatgcacctagaaaaagttgtactctaaactttctatggtttactcaaaacttatgccctacaaacttgacaacaattgatggtattagatgagctaccaactggtctattgttacctaagttggtcctgggtcctggcctatatgtgcaacatgtgcctaggtaccccagtttgtctctccatgatactaatgaatgtggaatatcttttagtacattaatctacctagctccacctcatgcattcttggtgaaatatatattgtgaaacccatatttcattctcggtacggtgccctcagtcacgctccactactacaaaatatcaaatagatgctggcattatatgtgccagagtaggtaaaaccagcacctatagcgcctttctccgtacatgagcccgtcagcccgccgaaatccaaagaaccgtcacctttattctcaatagatgccggtttttaaaaagaaccgacacctattactggtgtcagagaaagatgtcgggttttattgaaaatccggtaccttgtagtatccatcccatcagagtagttggcgcggggcccaccaaaaaacgagcatctttgttgtaaaaggaatatgtgtcagttttttttttaaaaaaagggcacccagtaataccgagctgagccacacgggaagccattcttgtccatccatccaccatccagagtcaacagagtcacgttcttatctctcatctctctctcgaactcgtctcttcgcctctttcctccgcctcctctctcgcctcgtcctccccggtggttgcagtaggtggcggcggcagcggcaggagacggcggtagcaggcggcgatgggaggagaggcagtatcggcgggcggcacactcccctcagccagatccagcgggaggggagacagcgataccggcagcagcgggaggagctaaaggcggcatcggcgggcggcgccctcccctccgccagatccggcgggaggcagcggcagcggcgtcggcgggaggtggcggtggcgtcggcgggaggtggcggcagcgggcgacggcaggaagagaggtgatagtggcgggcggcgccctcccttccgccagatctgacgggaggggaggtagcggcggtgccccacgagtgttttcttgttcttgttcttgttcttgttcttgttgtcgttttctccctacttcccgctctccctcgccatcctctctcgccctcctctctctcgctgatctcgccatcggcgattgtctaccatcagtagggcctctcggcggcttggcagaacggcagcagtggcctctccttcctctcctttgattgattgtgaataaatttgtttgatgttaatgtatgatttgtgattatctatatgaacaagaacttatctcattttcttttagatttttcgattattttttttggcttggaggcatcggctcgaattgagccgagctgtaacatcctcaaattttaaactaaaatttgactgcatcatgctggcttttgattaaattagtgtgttttttaaaaaaatctatttgattcttaaattggttcaagtattacttctttagaaccctactaacttactctaattatttcctttattccaaaccttagtaaatttgagcaaattctctcaaatttcaaattataaattatttctttagtctaccttaatattagtgaggatttgctacacttcaaaccctagtgaaatattcaaaattcctgaaaaacactgttcattgccttcaaggtgtttgacagaatgcctagcccaactaacttagcccaatccccacccaatcttgtgcaaagtctagaattgatcctaggggaccacatcccactcaaaaaccatggtttagttggccttctcctccccttgcgcgcaccgtcctggcgtccgactttgccacgcgccgagccgtcgcgcgtcggtctccggattgatcacgcgtgcccgaccgccttggcgcgctgtcgcctgtccgacgccctcagaccgtcgtcgccgcaccaatcttgacgacgacaaagccgggacgacgactgccgcatgaaatcactgctcgacgccatgcgcgcccgtccaaagccgccgtcgagtgcaatttcgcttctacccggggtgaatcacgccaattcttgccgcacggttggattgaagatatacggtggtatcccctctcacaattcaaaccattcactccctagtcggccgttttcaccctcgccgccgccgcgcgtcgcgcctggattggcgccaacacgtcgccagccgaattcgcacacggtcaagccaatccttcgacggtaagtattcaaacgtggcctcctgccactcaaattgatcttggccgccctctcacaacctctgccgccccagccctatccaaagattgagctcatccatggcgatgacagtgcccgagctcatccactccttctaaccctataaataggaccccaatcccttgcttgttcatcatcgatcatcaacaaccataaccccacaactccgaagctatgcttccccaaacattccttcaaccactctcgcccatcggtcgaacaccttgtgcgcgatcgactccacacccctccatccatcctccgccctaaatatcccttagagcacctatatcctaccatgttctagcatactaagtcctaaccaaagccctacatcaagttttacctcaccacatcaagccgagcactgccgccctcgcgctgctctgttcttcgccgccgagaagtttttccggccgcaatttgtcatttcaaccgatctcggtgagttcttccgtttcaaccatctacatactacatagattccattttaacaatccttttgcactatcatgccaccccctgagctgccgacgtgagcacggccgccgccaatggaggcgctcgtcggcaactattctccgtgccttgccaaaggtcggcaagctatcggaatccatctaggcactctatagatgctctagaacccctcccctagccatgtctaactcatatcatcttgatcaccatcacggcctagccgtgccaccgccgccctagccgccaacccatccacacatcaaattaatctctccgccgccgctcgccgtagccagagaaccctagctccctcccctctttggccgcaaccacttttcccctccatcaccgccgtaatcgccaaccctagcaccgctggccgcttttggggaacggctagaggtagaagaagagaagagagagagagagagagagagagagagagagagagagagagagagagactgacaggtgggacccgcacacagtaacatttcacttttatttgattttcaaactttagaagcccatatcttttaaaatatagacccaattccagtgaaacttggaccaatattcttctaaaatcattctctatcttttgatcccctttttgctatttttgcattttattttattttctctatttttcatatttttggattttatttgaattccttttgaatttgaattttatatatgtctaaccctaggtcttgaggattcttctgacttaatagataatatcaatcaatctcaggacatcgagcaaggcaagttaccataaaccttttgatcatttaagcctatattttacaaattatttatttatagccttctattcaatattctattttatatgcataaatcaatcatagaaacccagataatttagtattgcttactttgcttacaatttggttaaaataccttatacttagattgggacagtacgtaagatttggttgatttccgggtggctagtactatctcaatcgatataagttttaccaggtacttatgtcgaacgaacgagtacgccgcagtttctagaatggggacagacctagttattatgttaatcagcaatatggctcctctgtatagtggttcatatttttaagtcctcgcgcaggaggcaacaatagccgcgaagggcaactttaaccattaccatgtataggtaaatggtttgtgatactcgagtataaattatatggtatatttctaaaccctgatcgagatgacgtggtgtcatacgatcagttccccttaaatacctcgggaacgccaaaactcctcttgctgctgttaacaatacgttcagagcatatgaggatataagttcatggaacaggtgccacaattgttaatgacttaatactgggccatgactaaaaccgatgattatcagcaagtcgtggattgcgggtaaagcgtacatctgctggagtagaatatctttgaaactattcgaatagctgtactcatggagttgagtaccgggactcatgtggtaccctggttagaaatctaaagtctatatgttttataaatttttgctataactctttcagattgtttattactgctttttgcaaagaaccctactatatgttaatgcataacatatttccatgataacttgctaagtattgtgaatactcatccttgctcttataacctctttttcagatttgggtcaagaggatgacccttatgactattactacgatgaccccgataacttagagaatccctaaaggttatacctcccagttagaatgtatagaaacttccgctgtgtattaattagttaggtgagtacctattaatgtaaaacccttagtattgtaaaactttaacatatgcaatgaagaaccagatatattgtatgtatcaatatttactgatccagggattgatacattaatcatagtcggatccaagttgttagttcccggctccgacacgagccaagccgtattttttttcttgcgatccatacaactcaaaggtgccggtttttgaaccggcaccattgacaatactcataagtgccgcctgcgaggtgccggttgtcaaatccggcacctatgtagggctggcaaccggcaccaaaagggttttctatagtagtgctcgtatgtatacaaacctttacatagagagacaggggtagagat

SEQ ID NO: 8746 - DNA, 20962 bp, Oryza sativa
ggcgcggaagcgtgctccgtcgacgggtgccggtcggacctcagccggtgccgcgactaccaccgccgccacaaggtctgcgaggcccaccccaagacgccggtggtcgtcgtcgccggccaggagcagcgcttctgccagcaatgcagccggtaatcacacccccaaatcctctaaatccatccactttatgtgatccattaatcaagaaacgatcgatgatgtgctctcgatcgatgagggtcatttgttaatagtttttcacctgctttatttgctgcccccaatttggttcctcatcggggaactgtagctatggggatttggtgcttactttggtggtgcattctctgacgattttgggggggagaaagggaaaaaagaaatttaggtggtctgcttgggtccccaaggcctagctgtctaaacaattgagttggtaatttgttaccagttaggatctgatggctcccgggattatttaatctcacctatgctatttgtcgaggattaaacaattgggttggtaatttggtggcctttagggctctgatgtcgcggataatttaatctcaccgggatactattttaagaaggctgttggtgtgggcagatgacatgctttgcttgcttgtgtagggttttttgttttcttcctgtattattccgcaactcatcgccgaatctttcttatgattgacggggtggagcgggtgttgaaattggcttcatgcttagagaccatgcaaattaagttttggttcttcaaactgggttgtgtttcagtgagactgaacaggaagcagtttcagttcacaagatctggatgaaactagttaaggtctagtattgtatagtagtgttgttcagtgggtactcccgttagcgttcgggttatttcatgggttactcgctagagcgtgggcatgcaaaaccgaaagctgttacctttggttgtgttatactctctcctccctgattctcagtttctttgctgtgtttagcgtagtaaactattctggagtttcatgacagtaggagaaaacaaatagctgaacatatttttgggtggattatatggtttctaaaaatatttggagttctattacaggcgtgtatctgactgaaagtggtacgagaaagtaaaacgtagtatcatttagtgaaatcttgactgaactgttaaccatttgactgcatcataactgagttggagaggttcagacatccagtttaatatgcactgatgatttccgctttgttctcagataataattctttaacagtttttcaaactagactcttgtgtgaataaacagtgattattatcttcttaggccatataatttctcaactactaaattaagcaatgacatagaatgataactccacttctgtatcaaaagagatcttgtgatattttatatcagaattcagaatatgacaatactcttctaactcaagattcatctcattgtaaaaataagcgcagtaaggttttgattgtgctgaataggattgttgctcaagccaaataggtcctctattctattcggactttcctagatattaccatctcatctcccacacaacaattctattttccaattggtgggatgtgctaattccaagagcttgatcaggttcaaagcttggggaaacaggctaacaaactcaattttgagataataaagatccaattgtcatttccattccatgttgcgatcccctcatccttcttccatcattaccaaacctcaagagaatgcaaaatacattatcattgtgtatatagttggttgaggacaacaattataatcatttttacttatactgcaaaattggttttccactcatcttgttcaattcctggaacctacaaatgatcattactttatgggtttattttacctcttacatgtctcatccaattaggctgtgtacatattgcattctcatgtatgataccagaatatatctgttctagctggctgtattttgggtgttctatgatctgtgcttgacagtatagttactgagagaatcaccacagttgagtcatcttgtttattttctgggtataactaagaaacatcttgtttgttaaatcaaatttctggcatgcatctacaatatttatgtctttgtttctctggttcaatcttgttggtctacagttactgaagacgccaggagataactctagttgagtaatcctgtttacaaattctcctgtcatatttgaagtgtcgttatatcccttgtagtctagaatagataagtcatgctgattgatcaaagcatccttcaatgacacattaggaaggaagaaatcatgccataaccttgatctcctaattattcattcctgtatgacactggttagtaagataacaccgaattggagcaatggatggcacagtacaaactgcagagacctcatagtaacccaatggaaaatctgataattgttgtcatcctctttttactggcatattgtcagactcatcagtaagaaaaaagaattatttacctcagtgatctgttgtgctcaacctttgtgcataaccacaccttatctgtatttgagttagcagaaatttatcatgtctatgaaggtgaccttgcattagaataaagtattaatcttagacaatctagagatgtaatcaaactaatcttatatgcaattccatcctcccaactataagaagatgccgtacttgtccatttccttctgttaaaaccatcagcatgttgtctttgcttactgtggtttctgttagcacgaccatcagagctttaagaagatagcacatctgtcctctgtattttgtttttaaaaatcattgcacctacatttgtattgttcttcttggtatacccaaatcatttgattttaatgacactatgaccaatttatcgccccaccatgggcatttagaaaaagggcattaagccggtaactagtctagtcaagttgccatgctacctcctagttgactagccaatgacaattatcaactaactgaccactcatcggttgcttcgattacttgctgccttaagctacgttttttttggatgtttttctggagctgcaaaaactcgaattcttgtgaaaagctgaaaactcctttcaagatttcaaaccaaactttgaatcttaccatttgaaatcaaggataaaaaggttatcaactatactatgagcaaatgagtcttgttaccttttgaaatcaactataaaaatgtttacttcaatttccatatgagtaaggtgcttgtttccactttattttaaccttcctggcctgcttgtcaatatggaattagaaaaaaggagcgtccaatgttgagacaaaggatcgtgcacatgagaacttgcaaacagttcactatgaaagctcctgtaatttgttcttaaagactactatcacttgcgtactatgatatagaagattagaacatggcaaaagttcaggtaagtagactaatgtgatggcccaaagaacaaaaagagaaatggaggagcagactaactaggaggtgaagttcctcctcatatattaccatctccatcgagagcccattcaatggtccttgttgtgtgtcttgacaaccctttgaagcttcctcttgagcttatggttgtgtcatttgctcacgctaatgttataaataccttttagatttctcaagatccaacctcctgattgtcactactctctcctcatcacaccatgttgcagcaattttgcagaagcaggatggaagtaaatgtcccctctgtttgagggtatggtataatctctaccaaagtatgaacaactcaacatctcaagttacattggtaatgaagcgtgtttaatcattgttagggaagagtttggtttactgctactactctctctaccatcaaatttatacttttctttttcacaaatccacatgtgcttaactagtagatcataaaataaatcaaaacaccatcgtcatccgcctttgctttctgatctggaatcctcatgataatctaaaaggcaccctatagtttctctcgtaaataggaaaaagagattggtctacaatgtttattttatggacctaacaaatggtgaatactagcatatatcgataataacattatattcatatgatacgcattacccaaaaaacaaaggaactctacttttaatataagggtatttgtatggcagacagctaaatatagctttgtagcacatgtgtagaagagtaagtttcacaaaactacatatacttctgcaaactatcatcaaactatagatttaagccacaatatcagaaaactatacattttaatgtcaaatatatatgccaatctagcacataatttaccacaaaaagtacatttgagagttccaccttaggatggttatctttgatggaacttttaaatctgcaactttgtaatgaaatcagttctaaatctgtagtttgtcaaaaaaaattttttttgaaaagggtatactttagcaatattgtggtttaattctgtaggtttttttttataaattcaattctaagtctacagttttgcaatacaacgttgtgataattttgacattgtatttgtagtttgtgaatttttctctttataaatgattatgactctttcttcaaataaatataatgtgtttgatgccaaggaatttcttttttctagttgtcgttatttgattcagctcccacacggaccagactcaaaaaaaggtacctttatttctttgggtttggtgagctcttactcttacgtgcatttatataggcaacaattgttataatgtgcgaagacatgaaaaggttagatttacataagaattgcaatgataaatttcatattaccttgtactccaactaatggtacccctgtcttttctctcatttagtttttttttttttattgagggggggggggggggttgggaatggggggcatataggacgacgaaacctcgataagaaatcgtgctgtgtttgggggcatggtatctcagagtagaagggagcatagaacaaggaattggaaccaagaacacagaaaacttgatcttgctgtcaagaacagacatacagaattttgctgaacagatgcaaagcttttaacaagaactttcaaagtcgataacatgagtctaccctaagtccctaatggtcaatggtcaacacacagtatggtggcttaattcatactgaaaactcagatcacatgttgggttaacactgataggacttggctgaaggctctacttgacttggacttgacacaaatactcatcttctattaatcagagcgacatagttaagctagtaatataaaagataaacaaccaagtaagcaaatggacttggtagataattgaaggtgtgttccatctaactaggagtctaggactgtttgtcgacctgagcccacaccatgtcttggagagacataaactaaggcagaattttccttggatatcctgggctgccagtcctaggcatgacattagcatcctgaaaagcagttctgaactccatattttttagcttgcatgatctttccttttatcttctagacgattgtttttcttattctttcctcttggatcccatatgtgcgtttgtgcttggcttaatatgaatacatggattcacaattgacacgtttagattgccaatttcatgcataaacatgtaagtttgatacactaattggcagtagccaagcagatctgcatatatacaatttaatgcatgtgaatccaaccagcccgtgtaagcgtgtcatgctgagatgcagcagccatgagcaccctctgcccctctggtgcacgcgaatcagccaaggtttttctgggctacaacaatatacttgacagcatgacattcatcaataacgctacccaatgcccaacttgaccttgagtagctaggaaactgtggttgctgtgcagagcacacatgagagccaatagtttgatatatgttgtcccagttaagtacaagatcaccaatctaattttaatgtggcatttaaagaaatgccactctaaagattgactttgaggatatgccacttcaagaatacatttttttttaaaaaaaatctgataccactttgtaacctacaacacaacaacatatgaggctcttcccattcactgaaactaaatttgaaatcaggtaaaccctgagagttcctaacttgctgtagttatttggcatgaccttttgtaacggtcttcaaaggtacttgcatctgtatttttgggcagcatagtcatgccctttttcttaccaatatgacaggcaaacaattatagataatttattcttctgttagttcaggaaatggcatcaaatacagatgcattgcttagagtgaagataaagcaacatttctgtctcccatattgacatgtaaatataaccagagatactaattataaccacacaagtttcaaagagacaaagacatcaccacagcctaacagaataaactatatcaactggtaaaaaagacttcagcagctagcaatttgtagactttcctgctacattgctctagcctcatgctctcagatgcaaccctccatcctttcctccctgatatatctacttgactagttcactcgttctttttctggaaaacagaccacatgttttttcagttatacgcatagaacattatcttgtgtacgatgaggcagctgcccctgtaccaaacacatgagccatacttgtccttagtgagaatgatccctctaataaaatattcttaattttcagtggcaattcaccatttcgaatgatcttgtatgaaaaagttgtcagcagaatttattaaaaaccagatatataaaatgaactgaaaacggtttatttggattcagattccatcttccaaccccctcattaaaaaagttgatgttggagcatcccaacagaaggtgctaccaggcattgtagtctccatttatcaacgggagaacaataaacgagaatagccacaggataaagtggtttccagctaaattacatggatctgttcgatatatttttaaatttcacattacatggtgattaaccttgcaaattcaatctttgttatcaatcaatattaggaactaattattgcgatcagatagaaccacaaagacatctgggccggtacaatttctactacattccatgagagcacacaatgtgacatttacaaagataaatattgtaaatgccgtaatatcaacactagagtgaacatgtatttcaaaatttggcaataattgcctgagaatttcaagcatagctcagagcaaagaagaaagtgaaactatttgcttccatgcttatcataattttcttgaacacaaaatctcatggtccgtgtctttattttgtccatctctctgatattggctttgtattattttgttcatctttctgatgttggctttatatatgaaattacacttagtagctttttgaaacaaattacacttgatatctggtgtgcattctaaagctaagattaactcctagtataactgaatttatattacctaccactggtttatacatcatggactagaggacaatcccaatcgaattgcagaactataagtagtcagttttatattttctacttttaactttagaattgaccacgaagtctatgctgctaatcagcagtgcactataagcatagtgattaagggacagtcagttaaaataatccatttctgttatgactactacttggctaaattttcttctgtgaatcctacatggcgtatgagaactatgcaaatacaactgttagtgtgaatttgaatctgcagtacaggttcagtgtacatgttctgaatatgttgagggccatgtaacaacaatacaacataactctgtatttgcagatttcacaatctggctgagtttgacgatgggaaaaaaagttgccggaaacggctggatggtcataacaggcgtcgaagaaagccacagcatgatgcattgaaccctaggagtttccttccgtatcatcaaggtttgtacattgcaactactgagttatatatgttgaaaaattgtagtgatccttttcctggctgtttcttgattacatttcgatactgtattaccgttactgtatgtagaattggttagctgttcattctctgtctgcagttataacaaactacatctttacctacttatattgtcacaggaaataatgtacatattatgtatcttttaggtctggcagaaaaaggcatgcttactgtgcttgaagaattgaacattgcttcgatatgcttgttaggttgttagaagctgaaaataatcgatgtcaaatggaacccaatcatgctcagtctttccccattagcttattagaaaatttctagtaaaccatagcacaataatactaagtcaagatgagtagatttcgatggacctctattaaactaagatttttctcatgttcattcactagagctatcaactttttcttgaattgcttgcacaagaaatgtatccaatatattctcttgactaaaactattttgtctttgcagcgaatcagttttcagtctacccgcaaacatttccgatagctgatcagaacgccgacgccttaatgcgtccgcttgatcgtcaccctcccttctccatctcattctcagggaccttccgggaaccgaagcagttcccctttatgcaagatggcgggagcggcctcggcgcagcgcgccacgatctcctgcggcccttctcttccccagaagatggagccaacattaccacaacccgcagcgcatgcaacggcgtcccccacgggctggacccggagtgtgctctctctcttctgtcatcgtcgctgcatccctcccccgctgccggcatctccagcgcaacagctccaccgcagttcgccccctcttctttcagcagaatcgccgcctcgtcgcaagccgtaaccaccgcattcgcatcagatggaggatcagttgccggtgaccatgtcttggttcctgctgtcacatatgaagatccttcccaagcaatgccattctcttggcaggtgtagagcagaggctgtgattttgctgttcctgcagagttgctggtgaaaatgactgaggctttttttttgattgtgtgagcctgcagaattcaggctggtgaaaattgtagataaataacagctcaggtcctctggttgatggtggtggtggtggtggtggttgtgcagattatttatcaactaattgtgccacgtcagtattcttctacatatctgtgattattgttcttgaggtgtacatatgtatgcattgtttagcatatctgtgattgttttggtcgagtcatcggagaaagaggcctctgtccctcatcttggacaccaggcgacattgttatcaatgggccgggttgtgggtggcctattttgcattgcaattgcatgtaggaactccttgcaggaaaaagtccacattgagtccctcaatataggttgaatctgattcttatccctgaagtgcaaaaccgggtatgataataacttccctaattgttaaaactggtagaaaaatgatttctagagtaatattgatgatggtattggctgatgtgatatgtaatatgtaatatgttaaccacgataaaaaaacgcttagaaatctaggaagatggggatattctacagagcctgcatgtcagtcgtatggggcccatatgtcatcctcactcttcctcctatctatcctttttcctctcgctcctcttctctacagcaataaggaccccaacagggccctcgatttagcgccgctgacgggttcgttagtcttatggatctttgtggtaacacctaatgcagttgcagtgcaaagctcgggtcaacttagttggcggctccagaaacctactccacacttcaaaatttcaaaacgccgaaaactcaatatacatatgcaaaattttcttaaataattcactaaaactaccttttctttttagtttaagaattaaaaagtacaacataaatagtctaataggtcatgtctatatagtggatttgggccagaaccacctcctagaacccacccattgtagttgagccttcttcccgaccccttgtacgacaatctccctacactgcgttgatcactcgccatatatatatatatatatatatatatatatatatatatatatatatatatatatatatatatatatatatatatatatagcatgtctcttttttcctgttagttaggaaagaaagccgatataaacagctccatattagcgaattgcctctgactactcttcccaggctggtcaaactataggattaccattcacttagtcaacttattggacagacgggtcaaccacttgaccgaggagagtaaggttcgtcaccacagtcccagccatacatataagaatccgactaatccgataaatatagcactagcacttcatcttccagcacctcatccactcggaccaaggactctctctatggctctagaagtcctgtcggctgacataagacggaacccccagtggtttgaaggcacgtagccacagtgtctaagattgagcagggggtacggtttcggaaatgacatattgaataggtctatatatatatatatatatatatatatatatatatcctggtgattaatcagatacaacaaaatggatttaattagtgttcttgcttgcagcgagatttgcaggagatgatggatagatcgatcttacggttcgtcaatgaaaggttgatgatggtgctccggccgctcatggtgttgtagaaccgcctgttgtcctagagggatcgaaatacccggttttgtggttgatggatacgaatcagacccgagagagtctaattggactttttccttccttgcatatggcgaggtgtattgacattgaaggcctagaaggcccaaattgtagtatgggcccagaagtgaaagcctggcccagtttagaaattgttgagggcaatttaagctggaaaacttggatggaacatataccgaagatcatgcagaatggtattgacatatctgtacaaaatactttcaaaatccctgaaaaaagattttcataatagagtgatttatatatctaactaacccgtcaacaacgagacgcgcttatgtagcttcgttaatcttaagatgtaatggtctagttaattcttggacatgcatatataagggtataggatgcatacacgcactcatatgggtgattgtgcacattggcgtctgcagttgtaatctatttcaaaaaataatattgttttcagccaagaattaatataaaaatgattcttaatcccggagggcatggagcgtgcaaaaataatcttgctatcaaaatacattcatttcttgagaggaattggtggctcgagttggccgttggtttcagctagagcaatgctaaccattggagattaacagtttaattaagcaagcaggaggttcaccaccgacatgagatcaacaaatcaaacgtggcagggccaatattaaattagagtagcagagaacagattggcatgcttctctgcaactcgatccgggtttgaattgatatgatggacattccaacaacttcatttctttagtttatggagtatgtctctttttgaaagagaaaaaaatattttgtgtccctacgttctcttctcaatcactggacgcctcagagtttatagaggatataatcatgagttttcgtattaattaatccccacatgccaattgtacgagtagccgttagatttcttaggaacaaccatacttaggctctgttcgtttcctgtagttcccaactcccccatcttattttccgcgcgcacgcttttcaaactgctaaacggtgtgttttttacaaaaagtttatatacaaaagttgcttaaaaaaattatattgatccatttttgaaaaaaaaattagcaaataattaattaatcatgtgctaatggactgtttcgtttttcgtaccggagggatgggttcccaacttaaccaaaagaacagagcctaagtataatttataagcaggggcggaggcaagatttcaccgagagtaggactgagctatgctgtttcaaaattttccactgagtttctatctaaattttggtattttgccattgaaattctttgccacgtgtggggcccaagcccaagctgcccccacacgtggctccgcccctgactgtaagtaattagttagccttctcaccgaaatcaaagccctcgctaggaagaaattccgttagcctcaagaaaaaaggggaagaagaaattctgtttgagaaaaattgtagggctggaattaccaaagcacaagaaagaacagtttcacccaaatttgaaaagaaaaaaaaactgaattttcaaataaatttaaacaaatcaaacgaaatttcaaatggaaaaaaattaccctagtaaccaatttttgtttcctcaaatgtgaaaccaaaattttaatatttgagtgaagttcaaaaattttgaagaattcataggtggatctgaaattaacagaatcacatataagaaaatggtatttttcaccggaatttttaataacaccttttgactgaattaatttaaaccaaatttgattaaatgaaaaccaccacatttttaagcaaattatacaaaagttcaaatttagttgttttttaagtatatgtcaaagtgggtaatttttacttcctttcaaaagaagttgacataactaaaattattttgttgctgtaattgtttttttttgtggggaggcttatcaattatagttactggcgagggcaatattacatttcaaaaaatatatatgtttggtacatagattaatgtataaaagcagcatttaaagatggaacaaaatttaactagggacacaggaagaattggacggaaaggcgacagggcgtaaggaagtttctctttgttaaaagtcaggcatccatgtcattcttttcgttgagatgtggacatagtagccacttcccctgctatatttgtatagtactcccttcgtccctaaatataagggattttggttgaatatgacataatttgtcatatccaaccaaaatcctttatatttagggacagagggagtagacaactatacatgcttgatgaagatatatctagtgcttgggcgatcccactctagtagtttaattaggccctataaataatggattaagattctgagaaacggttggttgatagttagttttttagaaaactaggtttcacagtttctgagtttaatttattctctagactctatattttatattttaagaatctgagtgaaaatcttgcattgtttgcgggagctgaagactttaagagaaattacagctgctagaagctctctcaaacagagaattagactcatttctgcgggatatcgcacttagtcatggagtaggtactactacaattacatcgaactaaggaacatactgtgaatggtgttatttcgcactttccatgcaagatgtgaatcatcaagaaagcgacggccaaaagcaaataaaacccaacaaagctaactttcttgcaacaaaacactgcttaattacgaaaagaaaattcatacttcaaagttcaaacctgtgactacgaaccaacaaacaaaagctaggccattgatcggtgctaatcaagcttatgtgtgcagcatattagcgcagtagctagactagctaggtttatgttctatacgtgttccacactgatacaattccaaattaatctcgtctgcagagtttggtagtagatgccatcccagcataatatactataaaatccatccatgtgtgtgcctgcagctagactcaattaaagaattaattccacattacaaaatttaagaacatttggatggtacaccatggtgtagtagtacatactgtactgtgctagctcgaacactgcatttcaaatgggctgagaaatagtgcaagtgaatggtaagtacaattcttaattaatttgtgctcaaggttgggtgaaacatcaacaccgggaatagtttctatatgcaagtttcgtacaatgttgattaaatacaagatgaaagaaagaaaaaaaaacatattctcatttgcccatcctccttggaaaaaaagttaaccccagctcaaaatataccatctatttccctcgaaatgcagaaggaaaattaaatccaaggtaaataaccaaattccagaaacctgaagcaaacattgaaaagagaaaacaaaaaaaaacaaatcagaataattaaccacatttttcatatgaacttatcatgagtaattaaccatcttaagctacaagctcaagtaagtttacattatataaactaaaactcagagaacagtagtaatcaaattgctagctagcccaaattaagaaaatcatatatatatataataccattcttgcataaatgctagtaattaatttagctgatcgatgaacatttcacatgccagagccagcatggtacctcctagctagctagctagctagccgaggtacatgtggacgttgacggcgaggaggaagatggcgatgagcgcgaagtagatgatggagtggacgaggatggagaggccgctggtctggaagttgccgaactccacgatcctccccttccccgggatctggaacagcagccccggcgacagcaggatgaacagcaccagccctatgaacaccggcccccaatccgccatcgatcgcctactctctctctagctacctacctttctctctctagttcttgatctctctctctctctctctctctctactgacagaagagaagaatgagttgtgatccttcttcacacggttgcagggaagatatgcagatgtgattcttgtactaagtaggtctctctctttcacacacacactcagcttggaagacttggagtctctctccttttgttgtggtaggaccaatggcagtggggagggggtgtatatatggccttttggagtgagggaataagtagaggagagggcaaatggggttgtggggatagcaaagggaggatgatcctctatggaagtttgtttgattggtcatggtgtgggtttgtttttgctcttggcaattgatggattgatggtgttggttttattttattagaggggtacggtggtgctatatgtatctcgcgcgcatgtgtttgttatgtatatatatatatatcgaatataataaaatacacttatatggatacgtcactatctttcattaaggttacacatgtacaatgttatctcgcatatatatatatatatatatatatatatatatatctaagattaattagtcgtgtaactaggacactctgttatgctttgctatgtgcgatattattcgtttttgtttaaatttacgtagtatatgtgccgttttagtttcgattgtggcattttagttgcatgaatcttacatacgtggaaagatggtggatcaatcgtgctattttgtcgtcttcaatatgggtactatcttgagtgattgatattggtagtttgtttgtcctgtcagtttgcaatcggatgtaacaatgcatcgactttcactttagttgttcccctctcgatcgagttatatgaactcttcataattcatcatttatgtgatgagtcttgtgtgtgaccactaaaagaagttgactacatctgtgtcagctatttcagattgtcagtcgtttgtactagagtttttaagtaaattattctagttcatctagtttttttaaaaaaattaaagttaagaggtatatattgacaaggctaatgcatttattgtattattatctacaaatattttagtagaatatccatcaatacacatgtccaatatttgctggttaaaatactaaggatattctaaaatcaatccatttgtcgaatgttagaaatcaatcagattttttctaccattacatttacatccaacggactacaaaagaaaataataaatacatatttacttacagattatttttatcaaaattatagtgcacttatatgttatattaactgaatttacaaatgtaattttagttatataggactgtagttttatattacaatgtaaatattattttatctatacagccaaattctcctccatgctcaattggctaagcgttgtacatggtaagcatccgatcgtgagattgaatcctaccaccccaaggtttggtggtaagctgcctcagtttttctggatgttgttagcatgaatctcaccataaattggagggttgaaaatcaagtgatttccaacgaaaaatctgttgacaaagatttagcaaaatcgaaaaaaaaaatcactactttgttgaactctctataaatatgaaataaaattaaggctttctaatcaaagacaagaacatataaagtacacatataacaaaacacacattctaattatcgtaccagttgatctacagtagcacagtactaaccactttgggtttatcaaccaattgatctgaacacaccaccaattaactactccttgagcacccaatcatattgagccatagaagatcacaacaaggtgatgtggaagggaaggtgatactcagtgctcaactgtagctatggctatagcagatggaatcaaaagcagttgatgacagattccaaacccagtcatatggtcaccaccccatcttcttcctctgccattccatgcaagcaacaaccatgtcttcttttttttttccccttttttttttcttcacacaagaccctgtggctacttgccctcgtcctcacgtgttgtcctctacctctcattggtgaaaagcatggaataaaggtttcagaaagagaagaaagaagggccaaaagaaactactcatggtataatggtggtttgattcaactctctgaagaaattttgcatttgcatgaggatggttgttgcagtgtctgtttcagtgctgagcctgcagatttggtcagatggtgcaagaggacaatgctgaacttaattgcctacatggtttgttaggctcctcgtgatgatcacaccgagtgtgtacgtgttagtttttggaatgtattagacaactaattaatgggattgcccttccatgccaggcagactggtagccacggcaaaatgggtcattaatcctatgagcattttgtgcatattctgctaattaatcccattaatgttgaattatatatgctctctttcataagtagtttggcttgctactttttgttagagaacacacatgggtcatgtttggtggccacaatttttggaccagggacgacgagacgtctagtttactgattcttattttaagcatatctaaacatatatagataatttgcatcatatcatgtctatcactttatgtatagtttattaggtcctcccttttcggtcgtttgtgggtgaaagaatatttatgtgttcacaagcttggtttggatctcatcaagtacctcttctttttctttttaaacgaagattagcacatgtaattcagtataacttggagtatacggtttttggatctattgctgcctaagtgaaagatgatggaatgagttccttttgtgtgaaaagactgaagaaacttgtacaggagaataaagcaagtggtagctttttttttttgtgaccttatcaaatgttttactccatgaatagatttatcaggacttctcctttcaactagattaattaatttccatttttttgaccttataaaatgttttactccatggatctgtttacctgggtttctatttcaaccagattaattaacttccatttttgaaagattatgaaaataactattgaagtaattttaagcgcatcgaaaataaggactaataattggtgcagacattccaggccaataggacgcattgtatacgaagctggctaggatgtctcaatatgcttaatcaaaacagatttctgttttttcttttttgcggtgaaaacagaattctgttggaatacctaaatttcacaaacaggaattcggattcaaaaaaagaaaattctgtaattgacaatagaccaacattatttcctttccttatgtaaatctaagttgcaaagtggggttgacaggatgaagcggacagcaaaatgcgcagctcaaacatacaaacatattggtaatacacattcttttgaagagaagattctcaagagctttacttagtgtagtaaaacaagcaccaattaataactgaaccacttttagtttgatttcaatagcaaaatgaagtttaatgaaagggataaccttgctagtcaacgacagactattgatctacatggaaatgacgaactagctagctagctctagatagtgatggcatacatccacaatcctgatcgagcaggggcccatacaattttcctcaaattatggtgaaacatgcagtgactttgtttctgcgcaatctcttataagcaactacctaaattaaaacttttaggtggtttattgtttttctccggcgtctgatagtttgtcaaaggttgctgataaaccaatgcaggtttgtgcgcgggtgctattggctcagttccagcttaaaagccttgatgatttcaaatgtcacaatttgatttttttagttacttttaggagcttctaatctgtcattatcctgatctcttttcatgattgcaacgaagacaatgtaaaaaaaaagtctacctgaaattattccaaagaatcaaatcttaaagttagcctccaaacctgagcccaatcatgcatcaagctcttcatctacaacaaaatagaaaaaagaacacttggatggaattgagacctgtgttctggtctccctaaaatatggtatgtgccttgtcatctcatgacaccaaacatgcaagtcatacacaaagcatgagagaaaataatttttgtgcaaataattcctttgcagctaacatacatggggaccaagtaggtgcaacagtatacagaagcttcctgcatgtgtgttaggtgcatgggctgcatcaacagtataattggccattgtccctgtgtgcttggggtgacaagctagaggtatggctttgaacggctacatatgcatatatataatatatatatgtatgatgttgaacagttgataattccagccaattatttgttgtttggatgcaagtttggggtttggtcctcatgtgcactgttttgcatctgtggaagatagctgcactctactgtgttgtggatataggatggaggagagctcactcattccaagaagggagaaatgggttggtgtgcttttcaatttacataacacatgttctttttagcttattcaccgtattattgaaataatgaaatttattagttgttggatccacactttctgaaatatgtttttttttaaaaaaaacaattttctctactatactattgtttagacgatttattttaagctattgttaagtttatttcttaaaatatctaattatctctataatcaaatcgatactttcctaaaataacctgctcaacaatctaggttaaacagggatatgctgagttggatactttttttttcttttttaactcatatactatggcatgctagatcatctctagatgtaaaaattccatggaaaacagttcagttttattgaaattaatagtgaaaaatggtcaatcatttcaaatggacattgggtcctagcaaaagtacatggttttctttggactgcaccaccactacagaagatacggatgattatgtcttcgaaaaacaaaacctattcagaagacttatgattgcacacccatgtacaaacatgtctttatacataatttattagttgtcttattgttttttctaaaggacacactgtgtgttaggagacgtattcgcggctgtacatttaagtatggtgttgcatatgtagccatgcgcatgtaattgaaaaacacttgaggcctaaactgatgtaattaaggccaggcccaacacatgacagtgggcttcttgggcgttgttcacttgggcccaaatacgcatcactctcccctaccacaggttataattgggcagggcaacgaattcctagcttaattaattctgcgattaataaataatccaactcattaatgataaacgagcaaatttaattggccagcgaactcggagacgcgcgaaccatcgcaatggccggccgccggtcgtcgccgccgcggcggacgatgtcgatgggtagcggctccctcccccgccgccccaccgccgcagccggcggcgctggctccatgcttcccgggctctcccggtcaatgtacgaagaagaatttggttgagtcgatcggcggcgcgaatgcatgcgacgttgttaattctcatggggcgccatggatttgacgcaggacgatgggcggcggcggcgtcggcggcgagcggacggtgaggcggctgcggctgtcgaaggcgctgacggtgccggagagcacgacggtgctggaggcgtgccggcggatggcggcgcgccgggccgacgccgcgctgctcaccgactccaacgccctcctctgcggcatcctcaccgacaaggtcacgcaccataattatttttggcaaaatttacgttcaatatatgagaaattactctactaggttaaaaaatcgagataccatgaaccgtgcaaaaaagaattaaaaaaattgcaatttataaaatttagaacaaatgtcacaaatctagaatgtcctagagcaaattttgtctaaattttcccattattgtgaaaaatacggtgccacgttttttcttacgtaattactttctctctatcatata

SEQ ID NO: 8747 - DNA, 4691 bp, Oryza sativa
cactacttcactcattcactcgcaagtcgcaaccctttttatttctctttgagctacattgctatggattatacacgctccgtggcttttttgtttccgtccgataccagcatcattgtaatcattttcagtcgcgagaaaaaaaacctgaatttatctctaaataatccaatactattcgacaatacgtaagacaaacagtacggtccgtttctaaatatcactcggattggtcgatggctatcggagccactttcacccaggatttataatcccaatagctacgaatgactcgaaatatatccagatttattggatcaagttcaagataccaaccaccccgtttttcggtttttgtcaagttcaaaagaacccaaactgaaatttagttttttctttgtcaagatttgttataattttatcggtttatgggcggtttttgatctggtatcagaagtgtgaacccctacgcatgggcagacaaacggggtggagcgctacgaattgccgtcgagtaaaaccatcgtctctcgtaccgtgcgcgacgacggagatcagggcggacggcagctgccttgcaatgcggatcgatcggaaagtgggtgctgctggctgctgcgtggatgcaatgatagagggaagagcgtcagcgtcccagcttttcggtcgcagtcgcaggctcgcagcagcggcagccgggcaggtcgcgaggcgagagagagcacatgcgtgcgcccgtgccggtggcgtcgtcctcctcgccgcgctaccttttttcttcgcggagatgggaggggagggatagctagctaggcgacaggcggaatattagcccactgttcgtgcgcctctcgcgcactcgcggaccagcgagcgggggcacacatgcgtccgtggccgagagagattgagatcagtggcagcagatcactgttgttaaattaaacgccatgcaagatgcaacagtgagagtgtgacacaatcatcgccatcggtttatttggttggagtttactagtaaaagcatatcggttttgttaggtttgttaggttctgatcgggagggaaaggcccgtttattcgatcgatctgaagtccacatctactagtagcagtactagtaataatttcccataaaaaaagtactagtagtaatttgccattttttgttttaaataaaagtacgtaatttgccattttagtattttcgttgctcgtgctgtcatgggcggagccatttggactagccatccaatctgggcctctaggttacacggcccaattgctcggcccgtgcgcgaggcgaccgcaatgcacacacgttacacgtttcacgacttcaccccggcgtccgggatgcacgtacgtacctgtacacagcacacgtaaagcaaaccgtactctttcttgaaattaaacacgacggcatacaaccgtactctattatagtagtatatatcgtttctatatatatatgttctagttctttttaagtcaaacttaaaaggtttttttcatctctctactgcctctacattattaatatgttaatcccgcgcagccatccaaccgatatctagatataccacatgaaacaaattaaccacccaatcccatgagcctgtgtttccgctagtctctgccagggaaggtctttaggaaaatcaaggtgcttttgctaggacactgctccttcaagggtgttgcgccggtctggcttttttttcttttgtttttgttgttgaactctttgtactcatcgtatcgtttctagtaatggaaatgtgggctctcacaggctcacagccctagttaaaaaaaaaaaatcccatgagcaccgaggccgtctgccatgccgtcatcgacaacgagctccaaggcgtagcccgaagctgcgctgctactgcgcggtgtgcacggagccattagagtgggtggcgatcggcccgtgcggccaccgcagcgtttgcgcgaggtgcatcgttgacatccgcttcgtcagcaaggacaggcgctgccgcctgtgcagagccccctgtcccttcctcgtcgtcgtcaggggagactcactgtagagaaatcatctttgtgtggagattatgggtaccccatacccacacggcatggttatccgactagttataggggataacttatatatatatatatgaaatatgtaacagatcatgacttgggtattacgtttccctgtatattatggaacggcctaaagtcctggtttgataagattgtaaagtagatttaggaaaccgataccgtattggttaaggtttctatcttgtaaccctgccccccaacctatataaggagggcagggagcccctctaggggcatgatgagacaacctgatcgtcagatcaatacacactcggcggattcaaatccccaaacaggagtagggtattacctctcattgagagggcctgaacctgtctaaatcctttgtctccgcatccatccacttttaggtctcgtgcgctaccccgttttattattgccgaaatcaagtttcgacagttggcgcgccaggtaggggtaaacgccgagtttcctgacgacgagtgcgatggaatcaactttatgagttgccggcttcgtcttcgctttgggagctccttgattcctcgccgccgacgacttcaacaagacgaatcgtcgctgctattctctgcctgatcttgttcgcatcagcacgacggcaacgacggggcaacgacagttcgacggatttgatggtcgtcctcgtccaccaccaagcctactggtccaatctacccaacgaggatgccatggtgttgcaagatggatctacaaacacgaagcatgccaaaaccgatctaatcggatgcataggagacggctgcagccacgccgatgccttcctgccgtcctgcgtcgtgctgatggacaccaacgccgcccgcgactgcgacctccgcctcctccgctccgtctcagaattaatctctcttggtattttctgctgtttgcatgtaacgccgcggcactactcttgccgactggtgtttccgtctgcatggctggcctattaagccgccgctgttgggcgtctacgacttcaccaccggcctgcctccgtcgccgccgactggtgtccccgcctatacggtcggttggtcacaccaccgttgatgggcatcgtcatcttcaccgccggcctgcctccgtcgccgccgagtggtgcctccgcctacacggctggcctattatgccgccgctgttgggcgtctacgacttcaccgccggcctgcctccgtcgccgccgagtggtgcctccgcctacacggctggtctattatgccgccgctgttgggcgtctacgacttcaccgccggcctgcctccgtcgccgccgattggtgcctccgcctacacggctggcctattatgccgccgctgttgggcgtctacgacttcaccgccggcctgcctccgtcgccgccgagtggtgtctccgcctacacggctggcctattatgccgccgctgttgggcgtctacgacttcaccgccggcctgcctccgtcgccgccgagtggtgcctccgcctacacggctggcctattatgccgccgctgttgggcgtctacgtcttcaccgaccggccgcctcgaccgccgccgactggtgtctctgcctacacggctggtctattatgctgccgctgttgggcgtctacgacttcaccgccagctggccttcgccgccgccgactggtgtctctgcctacacggctggtctattatgccgccgctgttgggcgtctacgacttcaccgccagcctgcctccgtcgccgccgagtggtgctccgcctacacggctggtctattatgctgccgctgttgggcgtctacgacttcaccgccggcctgcctccgtcgccgccgactggtgtcttcattgttattgatggacgactttgttcccacattggccacttctgccatcaccaaggggaatattacaaagctaagtcatcatttattttattctttatatgatatttttccttttcctctgcctcactacaccaattggtcttctattgagtagtgagtcgggggctacagatgttatatcatattttttataatatttatcttgattgcttgcgacataatctgagtacaaaagtacctatcgagttatggagttctatcttcctatgctttccgtttggtttgccaatggatggttgcctttgggccgattcctagcacccgggggctcgttggatggaccgagtaacgcaaggtgctaagtattattcggaataaatcaaaagcatagagatgagataaatttattttctgctcttaataattgcaaaagtacctaagtagtaaattctgatccgtgaaactttgttccattaatgacgaactcatgtcactcatatgcatgtttgggaaatgcctaggccgactcccgatgcttgggggctatgactagtcggacagagtgtttaaacgtacagagtcatctgctcggggaaatcaaaattgacaagaggagaaatacatatttatcaatattttaaaatacttgattttttctcgagtattatatttatatcagatactactcatcctatatgtttgttctgcaggatccagatccagatatgcataaaagggattcatggcttt

SEQ ID NO: 8748 - DNA, 648 bp, Oryza sativa
agaggagaaatacatatttataaatattttaaaatacttgattttttctcgagtattatatttatatcagatactactcatcctatatgtttgttctgcaggatccagatccagatatgcataaaagggattcatggctttaagcttatctcttacgctctaggaatggatcagtcagaacatcaccaccggccgcctcgtccgccgccgactggtgttttcgcctgcacggttggcctattatgccgccgttgttgggcgtctacgtcttcaccgaccggccgcctcgtccgccgccgactggtgttttcgcctgcacggctggcctttatgccgctgttgttgggcgtctacgtcttcaccgaccggcttgccttcgccgccgccgactggtgtttccgcctgcacggctggcctttatgccgccgttgttgggcgtctacgtcttcaccgaccggcttgccttcgccgccaccgactggtgtttccgcctgcacggctggcctttatgccgccgttgttgggcgtctacgtcttcaccgaccggccgcctcgtccgccgccgactggtgtttccgcctgcacggctggcctattatgccgccgttgttgggcgtctacgtcttcaccgaccggccgcctcgtccg

SEQ ID NO: 8749 - DNA, 4258 bp, Oryza sativa
cactaaatggaagtcaacatacctgctcatatgatctaaggtaggaatagtattcatttgtcatataaaaagcaagggttatcagattcaagttctgcatcgataaagcatcctgcttaaagaatccatatgcaaaattctaataatccaaatgatgcttcatatgcaaaactctaagctttagaattgagacagtattttcccagcacaagcaacactaataattcatggaaagagtagtccagaatcaacaaagattactatggtctattatcaatagattgcttgtcaatggacaattattgtctgctgcagtgaaaggaaaaggaaaccatccatgcaccatgcatcatatagatatcaccattgtaaatactttttcttgtgagtaggtgatttgaatatagcagtgatctgaaatgcagatctaccaaacttctgaagtaaagtgaatgcaagtaaattagtttgacactcaaattgcaaatataatatgatggggttgacagtaccttctgatgagattgccaacgaacatcatccagaacataattttgaagtaattggaagatgaatttggatttaatgacacatcaagaatcatctgttagaatctttagtatttccagagtgacacaatgcttcattcagtataaccaaaaggctgttgaagagtagtacaaaattccacaagaattgaattggtatactagttacatcatttcaaatgaatgctacacaagttaccagcctccaatcactgccaaaaacttgggattggttaagaacacaacccatcatggatctcctattctccttcccgtcttctctcgtgaatccgccatagcatgaggagtggggaatccaaatgcttgcaaagttctttcaccatcaaaatcaaccattcaaacacaatgcattgtatagtcatggcgtgcgatccaccaccagtcattcttcgccgaaagcggacactgcccacctcacttattccccagtatgagcagatatacctatgactctgagaaattcttcatcacctgatgactgaattgctacccaccatcatctcaagctcctcaatcgagccgccctcatcatccaagatctccatgctcgatgatcggcaagtgaagtagaacacgacactcatcatcgagtcgatgagcatcacgaaggagtacatgaggacaagcaatggcccctcccagagccttgatgagccatcaccatagctcagtgtcttcaccctgtgctcaaacagcccctccacgaaggcgaggccaatggtggatccaagaaagatgagcaagccgacatgcgtctgcccgcgcatcagctgcactgaccggcgcagcgcgctgactccggcgatgtcctcaagaacggcgatgacaccgccgaggttgcacactatgatggtgtgcgcgtacgccacggagaaggcaagaacggtgaggaggccggcgcagacgacgatgtcgggcgggtagagcatgaacttgagcgtggaacacgcggtgacgaggagagcgaggaaggaggagaggcaggcgatgacggcggcgcacgcgagcgcgtacgtggcggcgaggcgcggccacgcgcggcgcgcgaggagggagagctccgcgccggcgaggagcggcttgcccgcgtagacggccgcgaccgcgtacgcggcggcggcgcgggcggcgaggaggagcgtgaacgtcgccgggaacgacacgacggacgcgacgagggtggcggcgaggtggtgcgccagctgcctgacgaaatgcgtgagcgggagccccgacgccgccgcagcggcgagcagcctccgcgcgagcgggagcacggcggcgccctacaacgcggcggctgacagcaggaggcaccccgacgccgggcagagcaggaagaagagcaccgacgtgaacgcgtgcgggtcccccgcagcacccgcaccgtctcccgcaggatctccagcgcgttcatcggcggcaaccgcaccacccctcctccccctcctcccccccgcgccatcctcgccgccgccacaccaccctctctcacttcttggactcgccgcctccgccgccaaacgcgacgttcctccccggtcagatccaacgcaacggctcgagctccaccaaaccccgtcgcccaatgcgaggctcccgtggccgccctccgagttggttccagtgagcagaggcgagatcttggagagcggcaatggcgtgggaggaggaggaggtcgaggaggaagagaagtttcttggagcagagatcgaggtgggttttttgtgaagggagacggcgacgccgcgagctcgcgaggcgagggggagggtctgactaccgacagttcacatgtggtactgacatttggggcccaccaagttgaggtagtttaggtttgttaggatgacatgcgggtcccaccaagtggaggtagtttatgtcagttaggatgacatgtggggccccctggaaacccatccctccggtacggaaaacgaagcagtccattagcacgtgattaattaattatttgctaatttttttttcaaaaatggatcaatataatttttttaagcaactttcgtatataaactttttacaaaaaaaacacaccgtttagccgttcgaaaagcgtgcgcgcggaaaatgagatgggggagttgggaactcacagtgaagcttccacgggcacgcttgcatatgatttttcttgggtcgtgcttctgcaaattcctcttgtcgtaggttccattaaagatttgaagttgataatagcgcattgacaatgagttatatgttcgttttgtcaacctactaatgacaatgtgagattgtgattcatgtttgtactattgccatttggtttattggttgccaaagtaggaagaaacaaatactatccatcaccattaagaccattttcgaatgcaaattataggaggacaagcgaaactcaattttgttgaaacgagatccttcgcagtgacatactatcacgcctaacatgtaggatccactttctcatgggaaactcatgagcatatatgtcagcgactctaaggcttcgttcgttcctgggcgatctgggggattgagggagaaaagcatctcgttttctgcacgcacgctttccaaactaataaacggtgtgttttttacaaaaaaaaatttcctataaaaaatttgctttaaaaaatcatattaatctatttttaaaatttaaaataattaatactcaattaatcatgagctaatggctcacctcgttttacgtatcttcccaatctcctcgatcaccttctcctcaaactcaccctaagtgcataaacttcccaatctcctcaatcaccttttcctcaaactcaccctaagtgcataaactgtattctcctcaatcaccttctcctcaaactcaccctaagggcatgtacaacggtgtgtaataacggtctctcttcgtttccatgtaagtaaaattgatgacgtggaagagagagagtggagtaaagggaaacatggttgctacgcatgacaacgggtcagagtcgactcttaacgtttattaaaggaaattttgttgcatggaggtggagaaaaggaaagaatggtactaaaaaaaatattttggtgcattaatggttaagagtttttgttatcttaactattgtaggagaatagtctctaagtgatatgtattaacaaagagaccattctaagctctacctttatacatgccctaagcgtataaactgtactgtagaggaggataccaataaggtgcattaggacacattatgtcgtaatcgtccgagtcatgatcaaggctcagatcaaattattacgatagtacgtgtttcacgaattatcctctaacttaagtaatgtgtttttagagtcactgacatgttcagtgactcaaagtgatttgactttgagcataggatctcaatcggtgttttgctccacaaaaaactctgaaaccttgttgctatgtgttccctgtactctctccgtcccaaaataaaccaacattatacgtgatgtaatacattctattactacgaatctagacatacacatgtccagattcgtaatattagtatgtgtcacatcacgtatgagggttttttttttttattttaggatggaagaagtatacaacaactacagtaacccaggtatattgagttgcatcaatacagagaaaagagggtcaaacaaggccgagcaggaaggaacaaaa

SEQ ID NO: 8750 - DNA, 4366 bp, Oryza sativa
aaaattagcaccatagcgtatgacgcagattccatatatccccatcatgcaaaccccgcagatcctggatatatcctgtactgccagacagcccgttgatgctctcaacgattttcacccgttgttgcccgggactttttgaattaccctattcaaatcagattcaaccaatcggaacacactgtcaacatgaatcatgaacagtgtcgagccatgaacagtaccaccgtgaacagtaccgggttgcaaccaaaaccgacccagacactgctttctttgtcggtgaaaactccaactgccaccaccgagtacaccacggcgaccacgctgtctctgctcaccgataacgccgtgtcgcctctcctgcaagcagctgcaccgctgcatgttccaacagagtcaccgctacctccgatctgaactagccggtaaccgccgcctcctcaccggagccggcccgcatcgaactcgccggcacctgcacaacgactacaccaagtcatgctcctgccacccgacgttcgtcgccccaaatcactgccgccaagaggtcccagtccgatctccttttgctttgatgatttggttcgattggaatatctgcaatcccgtggattaattcctgttgctgagtcctgggaatttgttgtccgattttaagtccaaaccgaaaccctcttccttttccctttcgtgtgtgtccaactaggcctcctctcctggactacttgccacaaacgccgccgtgaacgaacaggatacaactcctgtccgtgttcaactccaacactgtggctccgtcctgattggagtcctgtgcaaccatgactcctcccgagcctgcttcctcttggcgttgcttctatcaatgccgctagcctggtctcaacgtgcggtgcacgcacaccatcgcgacatggacttccaagccttaacgtatctcacggcttctgcaccttcgcttctgcacttccggccaactccgctaatgacgcatgccatcagtttgtaaccaatgcatacgattgtgcaaagcctctcggttgaactgacatttccacgatacagtcagcccaatttgccgatctggtcgtcctcagcccgatccgcacgtacgccgccctcgaagcaattctgttgcacaccttgtcgaagacacatccaaaacagcctctagcatccacgcgtggcatgcgccaccgttgcggctccacctcgagcccgcaacccgctccgacctccgattgaccacctgtcaatatagtcgcgagccgaagccgacaaatcacatgccgtcttcccagccgccgaacgacccgagcgctacgtctagccgtctccctgtcgaacgcaactcatcgaaagacccgggacacccggcccagagtgttcgattccaccgatcgagaacgccgatcgcctccagcttcaatcaacccgagcgtgcggccgcacgtctccctgtcgagagtagctcaccagaaagttcgagccacctgcccgaagtgtctgacccaccgattgattcgccaatcgcttccgccgccaccaacccgagcaccacgtctggtcatctccctattgaagtagccatcgaacggtttagaccgccgcctgaagtgtccgattccactgatcaaaattccgttgatcgccgccgtgctccactttgcgtccatgtctgtccctggacaccctgtgtattcgtcgcagcgtggagcacctctctcgtacctctaccatggatctcccgcaggctttgataccacttgttataaaactggccccgaaatcacattggaaaccaaacgcggaagaaaacgccataggagatccaaacacgatgacgacaccgaggcacgatatttgataacggagttcagccgaggcctacatctccggggcactgattacgggcgctcctccccgattcagcatatacagcgtatcagagttacaacgactcacggccggtcgccgccggcagctgctccctctcgctatgctaagtcgtcatgcggttacaacaggcacgcccctctatttatgagagatcgtaggacagagtccgactcttactctagtcctatacctagtacaactccaagtcctaaactgtaaccgactacgtacacatattcgacacaaactctaacatcttccacgtggcggcaggaggatcgatcacccatgcacccgcgcggcgcgacacaaacgtactccaacatcactaacatactccaacatcgacagggtcgcccaacatcgtaacgctggcacgtcgtcgtcccctcccacggtgcaccacagccgctgccgcgccggactcgacatgctaaaatgcttttatgtgttggcgtctagagtagtggtagtggttaggggtagatagaaagctcgtgactcgttagctctgcttggctcggctcggctcggctcgtttgaattttctaacgagccgagctgacattttagcttgtcagagataacgagccagctcgagctagctcgtgagccttaatgagctaggactccatcacagcccaaaagcccaatacaacaaaaaggcccaagcccaagacactgcaaaccctagtcctcactcaattccccactctcccccagccaccgccgccgccgggagatcgagcgcccgtcgccgccggtatctgcctctcccccgccagctcccgccgctgccggtctcctcctctcccccgccagctcccgtcgccgacggtctcctcctctcccccgccagtgcccgccgatgttagatcgggcgcccgccgccaccggtctccgccaatccccccacgcccgccgccgccgggagatcgagcgcccaccgctgccgatctccgcctctcccccagcgatccagcgcccactgccgctggcgcccgcccccagcacccgacgctgccggcgagctcgagctcgtcccctccaagtgctggcggagctgcgtagagttcatcccctccactgttgagctccttcctatggtcgccggcgagctagagctcatttcctccgccgttaagctcctcccctcctccccgtgctcgccggctacgtctcttgccctagctcgcgagcttaacgagctggctcgagcttgttgacgagccgagccgagctagttttctagctcattaagataacgagccgagccgagctagctcgttattctaacgagccagaccgagccgagccagctcgacatccacccttagcagtggtcctatacgagtatgcgactcgtactcctaattgtctccatatggtagtggtccctagtgggcagccaaacgtctctcattcttttgcagccttaccactgttgcaggtagagcgtcctccttgaccaagcatctctctcggcgtttctcacccaccacaaaaatcgcttctttccttcctccctcatagagaaatttttatttttactactacttagtatatgcacaataattagtactaccaatagtactgttttagttgtttttttattggagaacattaagtgctctatattcgtcattatgggccggctgataaagtttttttaaataaaacgaaaacgattttgctaaacatctcccgcgtgatttttttccacatttgacgtacatttgacgtttttttgccacatgatctttgcacaaggcatagaagcccacgaacagcccagcagcccatcatcatgcctaaccctgattgctaactccaatcccggtccactcactgccccacacgaccacgcccgcactcgttccccgttcacatcacatcgcacacacgccacgccgcttggatccgggtccgtggccagcacccgcaccgccgcagcacgcgatgcatttgataaaaaaaaatatgtaagtaaatatgtacttattattttctttaaaatataaaattacagttctatataactaaatttatatttgtaaattcagttgatttgacatgtaagtgcactgtaattttgataaaaatattgtgtaagtaaatatgtacttattattttctttaaaatataaaattacagtcttatataactaaaattacatatgtaaatttagttgatatgacatgtaagtgcactgtaattttgataaaaatattgtgtaagtaaatttgcattagttattttatttcaaatataaaattacagtcctatataactaaaattacatatgtaaatttagttgatatgacatgtaagtgcactgtaattttgataaaaatattgtgtaagtaaatttgtattagttattttattttgtagtccgttggatgcaaatccaagagaagaaaaaaatctgggtgattttttctcaaaaatcacccgagtgat

SEQ ID NO: 8751 - DNA, 4080 bp, Oryza sativa
gaggattggaggggccgatctccaacattggacctaagcgagttattcttgagatgatctccatgaggaatgaaataatgactgaatgagtgatgagttaaaatatttgttgaactataggaattattgaaaccatgaggattgtttccttactttccttgctactccctccatccattttaagtgttgttatgggtttcagtgtcaaatgtttgactatctgtcttatttgaaaaaaatgtgtaatgtttttttaaaaaatcatgcataaagtactacttatgtttatcatctaaaaacaacaaaaatagtaataacagaaaaattttaaatgtcaaacgttggacactaaagtctacaactacacttaaaatgagacagatgaagtagcatgcaattgattcccctcattgtccttggcaaaggtattataattctctctcgcttcctagagtcctaatagtaagaactagtatccttgtccattagatttaatgaaattaacggctgcgcgtgtgcgagctccaacttttttcttgacgtccacgactgccgtgccgatgtgtgaagccatgagagcaagtttaatatagtatagccaactattagcttcaaattatctatagttgatttaatagccaatttatacaataattatctataaatatatactacactattactatatggtcccacatgttatacatacattgtgtcttggagtccgtcagcaatgtaggtgtcgtccgattcatcatcttcgtcaggtatgtcatcgtcatcaggttcaggcatggatgtagcacgcacctcctcaattacagtagcatcaccactaataccttctgacggagcgtggggctcctcaccgggagaccgcgtaggcccccctttgccggttcggccggaggcgctaagtgaggttcttcgccctcgatctgaggaacgtctgcgagagaggaagtgcacaagacacgggcgacgtagacaggttcgggccgctgagaagcgtaacaccctactcctgtgttctggtggatctgtgcgtgagggaatacagagagctcgagagcgagcgagagttcaggctctagagcccttttttctttcctccttttaggcctgggcctcctttttatctgtcaggggtcaccataggggcctctagctgcctaagaagggaaacatgctttttacaatgagggctagtctacagccggaagtgacttctgacaagcagagcccgcgcctcctgccccgctcgcctgcttttccggtggacgcccatttcaaccttcatttaatggccagcgacttccttgccatacttgcgctgaagcctggaatggatctgaccgggactgacataccaactccaggagttagcacgccggctccggctagggacgagagtcaggaagctctcatcattccgacgggacggggcgaggcgtgtgacaggccgcctgttgccacctaacccgcgatctaaccggtctgtgaccggtcacacaccgcgactggtcacggaccggataagcgtgcgctgcgccgcatgaatgcggcgtggtgcgctcgtccaacctgctataaatgcggttaggtgagccccgctgggctcacctaacccacacacggggcgccaaaaccacagggggtcggggcgccccagccctcggggccgaaacgggagcggcccgacccctcggggagacagagggaggggtggccacgtcaccctcgggcccgacccccccgagggggtcaggccacgtgggtgaccgcggctacccaagcctctagtcacgatacccccggctccatgtcaccaacaccttcaatgtcagaccttctccagtttgtgaaatcgtcatgtcggtgttgtacattcatctgctccactcctacaacaagtgagtcaacatcagcatggtcaacattattatcaccgtcttccctttcaggcatggcaaacaggttccgaggtttcattctaagaacactgcaccaattatttttctttgcgcatttcacataacacacctgttgagcttgtgacgccagtatgtaaggctcgtctttaaagcgaaaccgagtggtgtcaatatcaataatcccatattgatctttactgtaccctctggatttgttcgtggttgctcccggaacatcaaaccagtcgcactcaaacaacaagacttctttgtcgttggggaaatcaagggcgatgatttttttaatcactccgtaccagtccatgccttcgccctgaacaacaacaccactgttctgtgtggttaggtttttctctacattggttgtgcggaagagaaatccattgatggagcacctgttagctacatgaactcgatgatctggaccacgagatagagaatatacatcttcatctgtttttccatctgcatgaagaatgttcatctgcactcagaaaaatttcgatcatatgatcagtcacattttcaattagtttgatgaaattaataaaaaaacactcactttatgctcaaaccatgatacaaattgttccttgtgccttttatcaacattacccctgttgggttttttttcaatttctccatatgctcactgcaacaacattgaaaatattagcagaatgatgagttccttagtcactctgcactcataacagacataaatatatcttactttacccatggcatggcctcatcacatttggatattatgtagtgcctcatcctatgcaagtctgaataagatgcagtctcgatatgaaatttgttcttactgtactgcatgctcccaaaaatacttaggccagcaggtggtgcactgacttggctattttcttgacgttctggcctattcacctttgtactaacatctttgaagaaccgagcacagaaagtaaggcactcctccgatatatatccctttgctattgatccttctggacacgctttgttcctcacatagcctttaagggtacataggtacctctcaatgggatacatccatctataacaaacagggcctccaattctagcctccaaagcaatatgaactggtaagtgcatcataatatcaaaaaatgatggagggaatatcatctcaagccgacaaagggtctctccaatcgaattgcatagtttttcaatttcagtcacctcaagctcctttgaacatagttcgttaaaaaacctgctgagctcgattaatgggatcacaacatcttcaggcaaaatatggcgtaccaccaatggtaaaaatttttgtaataaaacatggtagtcatgacttttaagtccactaaccttccaaccattttcatcaacacatctcctgatatttgaggcataaccatctggcatcttgacatgttgtagaaatctgcacagaatttccttttgacttggacttaacgtgtacaaggctgccggcaaagtgtattttcctatatggaccaataaattttgatccttcctaatacccaattcttgcaaatcaagtcgagccttctcactatccttagatttacctgttaaatcaagtaaagtacctagcaagctctcacatatgttcttctcagtatgcatcacatctagattatgccgtataagcaatgattcccagtatggaagataaaaaaaaatactcttcttcctcctgttgtgccatctagtatcttcatctcgttgcttcctcttccttgacgtcatgccaaatttgacttgctcaaaactctcgtactgcttcaatacttcgtcaccattgagtgccactggaggccccctcatttcaaccttgttattgaagctaaccttgttctttcgccacctgtggtatgaagccaaaaagcggcgatggcctatatagagtgcttcttgccgtattttaaccacaagtattcagtatcattgtgcaataaggacacgcaaacttgccttttgtgctccaacctgataacatggcatacacaggaaaaccgtttattgtctagagcagatttgcacgtagcgtaaaattctttttcaccttggcatcccatgtttcaactccttcagtccacaactgtttaag

SEQ ID NO: 8752 - DNA, 8298 bp, Oryza sativa
  unsure (1)..(8298): unsure at all n locations
taccggtgctcggcctgcttgatcaccttctcggcgacatcgggcatcttgcagacggagcagacgacgtcggtgatgaaggtcagcgtgtgggggtgttaagaattggttgggctgtaaatgggctgggttgctatgtttccaatcagggcccaagtcagctcatgatgcatcacatatcaacagcagagcacgtgaggactatcgaacagaacagaacaggcaacggcggcggctggcctcaaggcagctggacgaacggcggccgtgacctagcagcactctaaagagacatacacttgtactacggaagagggagatattatgcgcaggaaggcgaaatggctaccgggcgaacgttcgccaacttataatctcgcgaatcactcggaaaggaggattagaggacgtgtgatggagcgatatccgttcttcctttctaattttccttttatttacccgattttccgggtaatatttccttctttttagatttccttttttttccctagtcctttctatagttttattaacggaaacttttctatatcaattattcacgtggaaactttccacatataaactttacgtatataaaagttcaatatatagactttttatataaaaaaatctttatatggagttaaaactttatatataaaagatttatatctagaaagttcatatatataaaatctatatgtagaaagttttcacggaaataattttttaaacaattctgcatatgaactttatatagaatttatatatgcaactagaaagtttggtttataaatttcaatgaaaataaaaaaaaaatatgttaatcaacgctggatatttttggaaaaaaacagaaccttattatcaaagcaaacctcgtaaccgaaaaaggagaaagtacgtgtagatttggttttttaacagaagatcaacgctaatcatgattaggggcgtaattagacgtattaggcatggagaacgatggaaacttatcggttcgtgagattgtcttgtcgcgaacattcgtgggctagacccacccgcaggaaggcggaggaaaacaagaaagaaattgctagactcgtagctcttgaggggcttgagcttatatacagatgaaagtgagaagaaaaagttctcaagtaaaatgtatgcaacattcttttagagattccatccacttttttcccggcatatacttcaacgtttcaccgaagttccatataattaagaagattaacagcacgaaacgtagcaggcaaaaacagagaattgagttaattaattaactaaccccaaccaaacaacagagagaatagtagatcctggatcactgctaaaaatgtatccagataaggtgcaacagcattttatcttgttgcagtcaattcacaccagaatcgatcgaagcaaattagaggcaatcccatactggcaacccaacaaaatctcatgaacagtaaaaactcggtcgagcaaagagaaatatttgcaaaaccgaatctcttggattggaatactagatatcttaaaggtgctagattaaccggcctcccagcgatttggctactgttgaccaaccgccttgcgacacgttgctgttggctgggcgtcttgcgggccgtccgattctgcgtctgggcttcatccatccgtccgtgcctccctgttggtcgtccttgccgaggcgtcgatttggtggccgctgagcctcccacgtcgcccattcctcctctctcgccgtctcgcgcaatcgcactcgcacacacgcgccgcctgaattaaatttaaaaatatactgttcattcaatttttttcccataaatatccgggatacaaaactttttgtgtaaatataccgtcgatctcgcacaaccgttgcgtgaaaccgaggtgggtgtgacgccatgggcggtatctcgcggcgaaggcacgagagcgcgcggtttcgcgcaatggaagagcgagaccggggggnctttttgaancagacagcgaaactgtccaccggctccatcaattagtgcttaattacttaattagcaattaactaataataattatcaactaattatcctaattaataattaattaattgctatcaagataattagtccctaattgaatcagcatggcaccggtctcgctcagtgcttgcgcgagaccgttctgtctcgctgtaccattttccgcgagaccgcgcggtctcgcgccttcgtcacgcgataccgtccacgacgttattccccgtcattctcgcgcaacggttgtgcgagatcgacgctatatttacgcaaaaaattttacatcctaaatatttataagaaaaaattgaataaacagtatattttcaaatttaattccgcgccgcctcacctcctccctcgcgcgcaccgcctcgcccttctcctctcctcgcatgtgccgtcatcgccgccgtcgccgcagctccacgctcttctagccatcttcgctgcgctggaagatccagccacccggacaagagtggtgctggccgtcgcttccctcttcccccctttcatctccaatcgcccaccgcttccctctccttcacgctctccactccgcttggtgcccgatctggttcgagggcggctggagctgatggtctaggcctccccaccggtggatctggctgcccttgcttcgggctccggcatcggggatggtgctcgtgctccctcgacttctccgtgcacccctaaccctatcctctgcacgatgcggtggcggcgggagggcgggtgaggcgcatgtcaaatccaccaccggtgctcccctctttattctctttccctctgtggcggcggtgacgggggacctacgggggcagcggaacccgtcgcgcatccgccgccgatgcccctccccttagggcggcgtcggaccggccgccggcgcgggactgtcgtctgccctcccctgcctcgcgcgagtccatggacatcgcatagccacgggagccaagggcgatacatccaaagaacagctggtatgccaggtacgtgcatcactgcgtctcctctggttcgagggctgtctaagctgatggtctaggcctccccaccggtggatttggctacccttgctccgggctctggcgccggggatggtgctcgtgctccctctcgacttgtccgtacaccctttaccctatcctctgcacgatgcggtggcggcgggagggcggagagaagcagctatgccgcattagctcttcgctggtttcagaaactcaacttgttccaggtatagttccaggtgctccgtgctcgtcaggactgaaagagattatagatcttatttggtgattcgcaggtatgataggctttctcccacttttgttttcctgtcatgacatagaattagtgaagagaaaaataatgcatggcggataaatgattgcaacttgcaaggcagcatgctgaacatgcacagctcagctctctcttgcctaggaaattcttggactaggagatgtgtttacggtgcagttggcacatgcgttcagttgtcaacgcacctaaactcttcacctttcgtctggatcaaatgaaggattgaaaatatgtgactcttcctatcttaattccatcggttggctagctccttctagccaacatatttttaaaaaaaaaaaattcttggactggcgttcccagccttgagtacactgaatcgcatagaaagtactcatctcatattttcatgtcatgtagcatcaaatcctctctatgactttatggatctacggtttttgtttaggtttcctgttggtacttaattagagttgtttcttgcatattttacttcagattcagtcaagatttgaagagatcttatgtgataattaacaggtctgatgaccttgctcccagttttgtttttgtgtaatccgtttactgaaaagtaatgcatggtggatgaattgttgcaagaaagcatgctaaatacgcactgtactgtgcagaagttctgcagtgcaggacattcctgccgctagtcgtgccttggacagccagagctctcgaattctcagccttaagtacattggatcacatacaaggtactcacctcatgccatgtatcatcaatcctctttatggacctggagttaggtgcaccttatcagcttaagctctcaaggttggcctgctcctcatcagctttctatcttctatatatgctgtgcatgttaatttcgatggtttgtctcgtgcaggtctggcttcttggagtccatatgggcctcgtgccattctctctttgcactgaggtctgctgagcgcctggatgcttatagcatactctctctctctctctctacttgtcaacactgaaatatgttttctcgggacctgacgagccccaagactatgatcttacgaattccaatgaattttgggatgaaattcgcaggggactggtgggcctttctgccccgactcaagtttctgttagccttttactctttatactcatcctgttgattgtgctgacatgcttagcctcttcacaccaggttgacaaggattctttagtgaggaagcaggctttgtacatcttgagaatatcacttgacatctttccctcatctgagaatgatgccgctcagcaatgctccaggaggaggtccgccgctctgcctgctcaagacaaaccaaatactgcaatgacaaagagagaggtgggctcagaaagaggctagatcccttggcatcagagaaacgagccaatcagatgaaaactgctcaagtcgtaagaccggtcgaaagttttcctgttactctatgagatgcttcaggagtatggaacacatttagttgaggcggcttagacgcaccaggtcagttggttcctatgtgcttttttttaagacctgtatatctgtatatctaagtgtcaacgcaatatataccaggaacagcattcatagcacgcaatgaagtaaccacatgcacgttcgattagatgggttgataaatttaactattattcccaggtaatgctgctttttgagtccaaaccgataaatgactgaataatcctatttgttgatgttagccattctcagctcatatgttgtgttatcctactttattactctctccgtcccataatataagggattttgagattttgtttgtattgtttgaccactcgtcttattcaaaaattttgtgcaaatataaaaaaggaaaaattgtgcttaaagtactttggataataaagtaagtcataaaaaaaataataattccaaaattttttgaataagacgagtggtcaaacagtgaaagcaaaaactcgaaatcccttatattatgggacggtgggagtagtacattatttgttcccttttggttcatgcgttttgccttgggtttgatctttagctaccccagcttgcttgggactaaaggcttatgcaaatttttgtccgtgattattacctcctatcaagttttatccttgggcaggcgtttcactatttatgtttgcctcttctgaaacattgaatttgaagttgaaattctaaaggatgctagactgccacatcaaaaatttacaattttcgtctattttnnccccccttggntngcccccaaacccaaaaaagttgatcatgagtgcgctacaaagggtgattatacttgatttgttaccttgttcaatacacctgagttgctcttacttctttgaaaaggaaaaagtgagatactaagaagaaacttagcatcatgagattcttattcttgtttgcaccgttctcttctaagttctaattcttttatactactcctaggagttacattgaacttctcatccttaccctgctctagggtttgatgtgtgctcacatagtatacttatagtgatttatatgtatcattgctaaacaatacccatatgatggtgtaattcaaaggtttgatataaatcttggttgcccactaaataactaatatgatttctttataaaacattaacaaatcacaactgccttggtcttatgttattctagagcacaaacactttttttagggtttagtatgtcacaggagcatggcaaaacgatggtgatgcgtaccaataatcattcctgttcttacaaatttccatatattcttcttttatattcattctatttggtttgatgttctgactgttcgattaagactgctttgtaaagaaattattatgtgagttatattttccaacgtaggtacagccctttcatgtttgcacgaccaagcagccattcatgctactgtgcttcttttgtggattgaaataggataagaaggatatgactacacagctagtggtaaaccatctaccactccatctatgagagacattatccacctatacttcaaatacaattttctcttaaactattcatccgatctacgatccgattgcaccgttgtgtttgtaacaattaaatctttataacaagatctcacatgattatattctgatgaaaaattataaattactttttaatatatctaaattacttttagatttcactaaattacttcttagacatgtaaaagtaaattcaatgaagtctaaagtagtaacttataacaaaaagaaagtaactttaatgaatgttttttttaattggatgtgactacacggtagtggtagctagtttgtactccatctagtatctcctttcaacttgaaaaatataatagtatcttcttttctcattctacatgaaaaacaaaaacaaaaggaaaaaacaatcgatgattaaacagatttatagagagttacttttgaaccatgcaaaagttacttccaattaacattgaagttacttttaaaaattgttaaacttatgtgtgttgatctgtgctgattaaatttaatttctagataaagtcatatttttatacgaatgtacttataatgtcgtgacaaaattacttccgttttattttaagttacttttataatatatgtaaattacttttagagactattaaatttacatttatatgtctaagaagtaatttagtcaactctataagtaacttatatatatatatatgataaaagtaaattacatatataataaaagtaatttacaaatataaacattttttcatcgtaatataatcatgtaagatcttgttgtgaagatttaattgtaacgaacacaatggtgtaatcggattgtaaatcgaataagtaatttgagagaaaactttgtttgaagaggaaaaagacgtacacgtatattaaaaaagcatgcatgtagtaccatgttgtttgaagatgaaaatgacgtacatgtatattaaaaaagcatgcatgtagtaccatgtagtagctggacttctccacatttctccgtatttaggcgtcgctagttaaggtaaaatcgagaggcctctccaaatagattttacgggataagaagcttgcacatggacttatagtggggtcagtactgtatgaatgggttcttactacaattattttcccccctctgtgtcttattttatgtatattggtgctctatgaaataatataatgtaccatgtaatcgataaatcatcattgacatatcaaagtgcatctatgtatgcgctatatttctctaatctttcctgtaatatttattgttctctctaatgttttttttttgccacgcagcgtagcgcgcgaacccattctagtatagtaatcccacctaggatccaacatggctacgatggagtgggcagagtaatcgagagagagggcaagcatagtattagcagtaatctgtaagaagattaattagcacaccaaggaaagacacaggaacaattaatagtacgagtagtagcaaaatattcgcttgcatcaaacgatccagtagttcaacgattgaaaaggatacaccggtgcatagatgcacgaacgcaaggtacgcaacgccagccgattcgatctgaacctactagagaacctacacctgaagatgccaggatcgacatgctgttccctcatcactccagagttacatggataataaagctagaacactaaaatactgatagacgatagacacctatgtctgatgataactaaggacccgaaagttagctaggaaactactgaagaaccactagaactggacgatacatggtaggccctccgcaccgcacgtcacctcttgacgctttgtccaaccacagaacctcgagctcctcttcttggcggcaacgcgcggacgtagagacgacctactactcggaggcagtcaagcca

SEQ ID NO: 8753 - DNA, 13965 bp, Oryza sativa
taggggttgcgtcgagtttcctatcaacgagcgcgatggaatcaatttcatgagtcgccgacttcgctttcgctttgggagttttcacttcctttccgtcgaccacttcttcaagctcctcttctctgacttgatccaaatcagtcagggaaactcaatctgatttttatcattatttatcatattgatttttaatctcagattaatttcttgctattttttgttgttgttcgcatataactacgcggcactattgaggcgattgatgctggtcatggactcgaggcgtctcagctttccggtcgatcggccgcgagtccactccgccggcttgtcctcgccaccgccattgctgatagcaacaacgacttcaccgccggcctacctccgtcgccgccgactggtgtcatcgcctatacggttggtcggtcacaccaccgttcatgggcgtccatgtcttcaccgaccggctggccttcgccgccgccgactggtgtttccgcctgcacggctggcctattatgccgccgctgttgggcgtctacgacttcaccaccggcctgcctccgtcgccgccgactggtgtcctcgcctatacggtcggttggtcacactaccgttgatgggcatcgtcatctacaccgccggcctgcctccgtcgccgccgactggtgtccccgcctatacggtcggttggtcacaccaccgttgatgggcatcgtcatctacaccgccggcctgcctccgtcgccgccgagtggtgcctccgcctacacggctggcctattatgccgccgctgttgggcgtctacgacttcaccgccggcctgcctccgtcgccgccgagtggtgcctccgcctacacggctggcctattatgccgccgttgttggatgtctacatcctcaccgttggctcaccttcgctgccgtcgactggtgtttccgcttacacggctgacctattatgccgccattagtgggcatcttcgctttcaccgtcgaccgccttcgtcgccgccgactggtgtcttcattgttattgatggacgactttgttcccacattggccacttccgccatcaccaaggggaatattacaaagctaagtcatcatttattttattctttatatgatatttttccttttcctctgcctcactacaccaattggtcttccattgagtagtgagtcgggggctacagatgttatatcatattttttataatatttatcttgattgcttgcgacataatctgagtacaaaagtacctatcgagttatggagttctatcttcctatgctttccgtttggtttgccaatggatggttgcctttgggccgattcctagcacccgggggctcgttggatggaccgagtaacgcaaggtgctaagtattattcggaataaatcaaaagcatagagatgagataaatttattttctgctcttaataattgcaaaagtacccgagtagtaaactccgatccgtgaaactttgttccattaatgacgaactcatgtcactcatatgcatgtttgggaagtgcttaggccgactcccagtgcttggtggctatgactagttgggcagagcgtttaaacgtaatgagtcaactgctcggggaaatcaaaattgacaagaggagaaatacatatttataaatattttaaaatacttgattttttctcgagtattatatttatatcagatactactcatcctatatgtttgttctgcaggatccagatccagatatgcataaaagggattcatggctttaagcttatctcttacgctctaggaatggatcagtcagaacatcaccaccggccgcctcgtccgccgccgactggtgttttcgccagcacggctggcctattatgccgccgttgttgggcgtttacgtcttcaccgaccggccgcctcgtccgccgccgactggtgtttccgcctgcacggctggcctattatgccgccgttgttgggcgtctacgtcttcaccgaccggcttgccttcgccgcctccgactggtgtttccgcctgcacggctggcctattatgctgccgttggtgggcgtctacgtcttcaccgaccggccaccgcatccgccgctgactggtgtcaccgcctgcacggctggcctgttataacgccaactgatgctatcttcttcacggctggctacatcgctgtcactactaataggcatcagtatcttcaacacaagctgcctacgtttgccatggctgccgactggtttcttcacttccatggctacatgattctaccagtgttgattagccttatcttcttcaccgccggtcatctcgtctgctgttgactagtgccctcgcctctacgtctggtttatacagctaccactactgatggacatcatcgttttctgccgccgactcgtgttatgccgccgtcgactggtgcttttatcttcacaactgcgtcttcactaccagtttgcttctgttgccgccgactcgtgttcacttcatcacggcgatgcaactttgtcatcatggtagagcgacttcatatttattatcttcggcaccggcaaactctattgctgctacttcgcaagttttactacttcaccaaccacgacgtctttgtgaacctcgacatctcggcatgcaatgccatgttattttactacaacaagtggctctccaatattcaggatttctacttggacatcttcaacacataccttcaatcaagtaatgactattcgacgacaagaagctacagttctcgactctatgttcagttgtttcccaactaatcaaagagtcgggggctacacaaatacaaggctcaaaatttgacaaattttatgtcaagctgaagaaatcaattcatcaaccaacgagtcaactccaggagtcattatcttcatctttgcttcggaacagacattctacttcaacaacttcaaatatttcggtttagacgagttgggcaataacatcaactctcctccaattatttgtcttcacggttggcctactacgcaactgccgatagaggatctcatcgttatcatcggctgctacatcgctattgactggatcaccgacatcgtcatcttcatcaacatcttgtcaagcctcatcaacatagcatactctgctgccgttgatgggaaacttcgtcatcatagtcggctatctctgttgccgctaatcatcattaccgtcggatgcgtttgtcgccgccgattattttcttcatcttcatgattggtggatttcgccatcaccgttgatgcgcgtctacgtcttcatcgtcggtttgcttttgtcaccaccgactgttctttcgttgttgttgggcgcctacatcttcactgctagctgacctgactgttgccgactggtttcttcgcctccatggttatgcaacttcattacatttgattggtggcatctttactaccactgacatcttccgttacttctgatgagcaatttcgtcttcatgttggtcatttcatctccatgccgactgcgtcagctattgccaatagacaattttgactatgacagaaggacaagctatatgctcaggggctcatcaactcaagcgtgaggattatatctccaatttggacttgttccggatacattccacatggattcatagtcatgagtctattttctatgctcaaaggctggaccaattattattccccgtaagggctatcaaccgaatacttgcgccagtcgggattcaattattatatttattttggagtatcccataagggataatcattcagatcagaagctattcatatgagctacacttggtctatattacccggaagatttattacttgggagcatgttacatgcgtcatcctttaaagggtgtcgaaggcatattttttggcctaggcctaatatgtctgcagcccatattttcaggtgtggcctgtcacgttcttttagggacttaggcactttttgcttaggccaaagtgcgcgtgatcaagtgcccaataccttaaaatccttttataccgcagttactcaactttttaggagttggtacaatgcatcttaaaaggtgtcaaacagtaaagctttatatagctgtcccgctgacttttttatataagtcaaggtgctgtttgggtttttaagcaattgattggatacaatatcattgctttttgccacgtaagtgtgtatttttattgaccaatattatggcttaggctgattatatattatggtcattttccaggcggttggtaaatcctttatgagtttatttactcggattttacaccacatatgccatatatttccgggtgtggtgaaaccatgtgtcttttagggacttaagcacatctgttaaagcagtgtgcgcatggcgtatgcccaatactttggaaatttctttattcacagcattcaagcttctttatagttgttttgctatgtgaactttcaaaaatgttgtcaactttaggttgtacgcattatattttgccaagcagtcggtatatcacttggatcatattattcggggattcacaccgcatatgctatatgttgatatcaagtcacttggttgattacaattatcaaaaccactcggttggttagattatttattccttgactatatgtttggttggttcaattaaccacatagtcgggggctacacctattaggtgcatctattcgatgcacctgactttatttttcagccctccacagtcttcaaatttggtaaaagtacccgggagaccatggcgaagatgattgaagcactcggctttggagtaatctagttcgagagaagattatattttcgactgtgaaggtctcaggggctactgtggagattatgggtaccccatacccacacggcatggttatccgactagttataggggataacttatatatatgaaatatgtaacagatcatgacttgggtattacgtttccttgtatattacggaacggcctaaagtcctggtttgataagattgtaaagtagagttaggaaaccgataccgtattggataaggtttctatcttgtaatcctgccccccattctatataaggtgggcaggaggccctctagagggcatgagacaacctgatcgtcagatctatactacacccggcggattcaaatccccaaacaggagtagggtattacctctcattgagagggcctgaacctgtctaaatcctttgtctctgcatccatccactttaggtctcgtacgctacccccttttattattgccgaattcatgtttcgacactatccgacctactagagtcgttctgaccgagcctagccggtctgactgcaggtcactcggcagtgaccgttagccctaaaaacagcctgataatgcttctgtaaaaacttgatttctcttaaaccaaccgttggatcgaattgcaaacttgacagaataaactagacaaaccaaggaacaattccaccggagggatttgcaaagtaataaacggtttaagagaaaacatcctcgaaagtcagctgtctcggaattttagcaaatctaaactaaacctaaaacttaaacaaattcaaatctaacaagaatcaatcaccaaaactttccaaatctgatctataaagtattagaaagattttgaatagattaacttgaacaaaatcgtagcaaaacgaacaatcacaagctaatgccaaaaccaaacataaacgtaaaacttacaaaactggaatagatcgtctatgccttgatgattaaatatgatatttattgttcaagtatattgttcacaaggtgcagccacaacacctcttacaagtttctcatgaaaccctctctaatctttcaaacttggcttaccctcaaggcatagcctctctctctatttataccgacaacatcctacacaaaataggaatataattcctagttccacttagactctaacctcaattaccaaatcacctaaaacctgcggccacacctgccgctatagatggccatatggcccgaggcccacggcccggcacgaagcccgcaattttggcccggcccaagcacggctcggcccgactagggtcgtgcccgtgccggcccggcccgacagccgggccgtgcctgggctgcaccctcggcacggtgggccggcccggcacggcccgatcaaataaaaaaaatatagggacaaaaaatagacttatataatcgtataaggcatggcccaagaaaataggtatacaaaatagacttattttccagccatttaaacacaacccacagagttgagggaccaaaaatagacttatttccagccatttaaacacagcccacagagttgagggatcaaaaatagacttatttccagccatttaaacacagcccacagagttgagggaccaaatataaactctttctgtgaggcagcacaatagcccatcgtgccttcgggccggcccggcacggcccgactagtattgggccgtgcctgggccgtgtatgccgcccgtgggctggcacggcacggcccggtgcatcggtcgggccgtgccggcccgacaagcctcggcccaggcacggccgggcttgggccgtgccgtgccgggcggcccagatggccatctatacctgccgcagaaaaccagtcggattcccaccaaatctgaccttgtcacgacatcagtctagccgagcctgcttcacctcgtctactgccgccgctgcacatgtaggccatcctcctgacgacctgctcctgagccgactcggcttgccacatccaccgagccaacacacatgtatcaacagacatgcatgaataccacacgtatatgcagacacactacgcacacatgcccatactgcatgatacagacatacagtaccatcgctacagtacatcgagtactgtagcaccatatcctcctcaccaatttctcaaccaatttccttcgcgaacaccgcgcacacctcgtgaagcccattacgaagatctctcccacacggtatccatccaccgtatgtcatctcgtatccaacttcgtcacccggcatccttgaccgtctggatctcaactcctccctgagtctagtcccgatccccaccgttgaccgaatttgacctccaagaatcctaactctagtcacattctcacatggtatcccgaccacactagacctctactcctccccaagcatagtccctgtcctcaccatgcattgaccaaagctaacctcaagtcacctgcacacaatcagacaaaacaaccgttcttgagtacatatatcacaacctgacccacattagtcaaatatactcacaccaacatctatatatcttttcaaaaccaattcatcgaataaatcatttttcaaagccaattatttatcacataatattaataatattaatcatgacaatgattttacagcatagctagagatcggttggatgactgtgctagagtaacagattaatctagaggcagtaaagagatggaaaaaaccatttgagtttgacttaaaagaaccatattcatacactccgtagtatatacagaagcagtatatagagtacggttgtattgtatgccgtcaagtttcaagaaaagagcatggttgccttacgtgtgctgtgtacacatacgtacatctcggacgccggattgaagtcgtgaagacgtgtcacgtgtccgtgaacgcgccgccgcagtgtcgtcctgctcggctgctcctctcttcatcacggccacgcggacgacatcgacgggcgcaataccgtgagatattgaactatatgccacttttagacgtggcaattaactatttgccactgaacccacatgtcatagacacatatggacccacatgtcattgagataggtgtggcaaatagttaattgtcaaatctataagtagcaaatagttaaaagccccaataccgtcagagggcttcggaaggaccgcccggcacccgtccgcctcctctacctcctctggctttgggccacagccgtggcgcaaatattgtggaagtggtcaaccgcaacctcgatcgtctacccctgtgttagagcaggtataataactggcgataggggttccacttaaaatttttcggtgacgtggagtggaggagagagtagggggagagagagaacgaatttgtcgcccggctctacgcatgacccgaggtcgtgggcctgcatacccacttcgcacgcgtccgtcgggacggcgccctcgtcaccacggtcgttgcctgcgtccgccaccatcgtcctctggcgccgccgccgtcacttgcggccaccgccgtcgtccgcctacgtcgaccaactgccctcgtccggctcgactggcatcgtcgcgtcgtcatcctcatccccctgtggctgccgcctgccaccgtcgccctcatccccctgtggccctcgccgtcgtgccgtcgcttgcatcctcagtcgtggctctcgtccaccgcagtcgcagccatcatcgccacccacgtccgcgcagttgtggctctcgtccaccccggccatccccgtcgccattgcttgcatcctcggccgtggctctcgtccaccgcggccgcagccatctcgtcgcctgcaaccgccgcagctgtggccgttgtccaccccggccactgccgttgcgccgtcaccatcacttgcgtccacctcggtcatggccctcgcccctgcggccgccgttgccgtagctctcgtcccgccgccatcgacgttgctgctgctctcatcccgtcgccgccactgctctcatcccgcatccgtcgcacaacctagctgtctttgtctcccgcgttatctacagggtcatcagcccaccagcttcgtcccgttcctctcaggcgtatcctcacagccgccgtcgttcggcccaactgttgacgtctcccgtgtccgccgtatggatgccctcgttctacacagccactagcgtctcctgtacgaccgtatgcccatctccatctccctcacccgatgggaagacaaacacaggaacggacggatggggtaggaggaagaagagaatgagataagagaagatggtgggtcccccgaagatagtaaaataattgtgttacagtgtttctattgtagatattagctatactacttactatagatgacatggttattttttttggagctggcagcgggttgtattataaaccttgctcttaagaggcaatatatcctatgcacacatgctctcacatgtacacacatgcacaccaactaacaaatgtcactaaaaaatctagaaaaattcatacatgtattttcaatagtattatacttagggttaaaatcttaacttcaaattcattatattttatccataacgaaaaaaaaaatctgacagttttaaggttataattttgtcagaattttatttttttgttactctttatgtagaatgaatttgaagatgtgactttgcacatagatgtaatactattagaagtacatgtatgaatttttttagatttttttatgataatttttagttggtgtacacggtgtgtacacgcaaaggcctgtgtgcataggatacgctcccgtgttgggatcctgcaatgggcctgcctagctaagtgcatatgagctagtttaaccactcttcaagcccagcccaagaaagcactcttagttaatgtcaaggaagattggccaacatcaatatatatacagctgtagaggatgaggaggacatcgaagaaacatgcaacggcggcggctggcctcggcggctagacgaacggtggcggtagcttggttcggtcaaacctcgtcgatctctctatccttcctcttctcctctatcatagaaacttctagtacttgtctccttagcagcttcttcttcttcttcttcttcttcttcttcttcttcttcttcttcttcttcttcaattccaccatcaaacactgagagttgagtgaatattgttgtgattcgaattagggattcgggttgctaacaatctggtatcagagctgtcgattcgtgggatttctagcatggagtcgatgggggagtattgcagcaacgccccatgcaagtggttgccagatttgggcaagggtggtgctcatggcaccaatgcccacaacatgttcgatggaatgcctagccaacctgagatgtccaaggaagatcagaggatatctgaccctattcccattaattccaccatgaacaaagaggaaaaatggctagacgatgctctagattggatattggagaagtttgaataaatggaggccaagtgcatgcaagaggaaaagatcaatcagatatttcaaaagttggaggagatcgaggttcgtaggagcaaggctttcgaggaaatgattgtagctatcagggcaaccaccgctatcatcaagggtgcatcatctccaacacccatggcaccacctcctccagcgcccaccaactgtttgatggaatgacccaacaacaacatcagttgggtggcaacgaattcaagtctcattggtgaggtgctttatctgacagctacctgggagctaggagacagaaaggacatggaccaagctccctacattgtcaccaaggacctccccaaggtcacgcccaccaagtgttcaacgctatgttctagctccgacatcaagcctgatcttatcgtggatgtggtgcttacgtgtgccaccactgctgtagcctccagggagtttgtattggctgatggtaccatcgataccatcaacattagcaccccagttgttccaaagagatgcacaccaagtgttcgacgttgggccttgacatcaagggagactctaaccaagttgtgctcgcgttccagaccatgatgggtatatctaaggttgttccatcatctgttcagccagtggagaatttctcatcaagaacagtcaccgacataaagctggatacaccaatgctcaacacgtgttcgttgaaatgccccagtagtgataagaggccgctgatagagcatactgagagaaatccatggccacctccttggtcagctggagtgactagaaggtggaggtgtggcatgtaccttggtccgtattcaatttcttttggaaaagagtatattttttgaaagaaatttgaaaagagtatattggaaaccaccatggcctccacctaataggaatgatattatgcacctcctgactaattcacacacatttgtaaattagagaaggcaaatttggctaaatttaaagcaagggaatgtgaaatattattagtgactgagctgtcttaatctgatgagcctattcaagttgggtgctgggaacattttgcatgcgctgcaaatttcagttggcaaggtaccaactaactacaatgcaaggcaattacatgatcttgtcagttatcctctcaagacaaggttttctgtagtgacaagaattgaatgccaaacacactgcacattgggactagcaaatggtaagattaaacatgagtgtttttgtgatgatgagagatggcttcatattttggtactcctaccattgattatggctacatggaaggttgacaacagtgcaattctaactagaaatgttgtccggatggcttttccttttgtgcaactccaaacaaggcaaggaaagatggaggatgatgtcaatatggacataaattcttcaactcaagctgtcaattctctgttctgttgcaaatcatctattaggagttcctcaacttgttcttccatggtacaaattcatgccagtaaattgaaaccctgtgatacactcactacaaggttttcgggctaatgccacaaaattttgggcaacaacgtggttttcgttgcaatacataggggttattgctaccgaagtctaatttggttgcgataggggggcatattaccactaattgcgtagtgttgcgattgtaatttgtttttgttgcaataagtaggaagtatcgcaacgaataaatttgcgttgtaagtagggtgacaatattgccgcgctttttgttatcgttgcaatagttatccatgccgcaacgaatttggagcgttgttattagagtcatgtatatagcaacacgaaactacattttgcaaatgagtcagtaggtattgcaacgtaaacctgaatcgttgcaaattagaatataggtattgcaacgcaaacctaaatcattgcaatcattcttagatattgcaacaaacaccggaaatcgttgcaactaacaaggttctctcgcaaaaatattttgtcattgctatagtttaacgaatcgttgcaataagtgagattggtggtgccacctgcagattgttcatgggcctttgtattgttaaactttaagttgtttacatcattgtggctcgggtcggggtcatgaattacgtaattaagtcgacccggccaactagatgggttgaatcgtgtaaaaaaacaggtacgattaaccctacccttagtagtcgatagatagataaccatgatcatagactagctggcgccgacgaccctattatatcttacacaatcgccggcgacgctgaagcactcgacgctggcgagaccacaccctgtccctatctcccaactcgatatctcgacgccgtccgaatcgatccctatatttatatatattcaggtacctcttcgatcacgagtgcaatgaaaactgttgattctttattttctatatatctatgtaattaaaatgagttagcaaagaatttttttagattaatggaagaagcttggaaagaattatacccagggtgcaaggaggctaccaaggtatctttcattgtcaggctatttcagattaagtgcatgtatagtatcagcaacaatgccatggagcaaatacttcacttattctgtcttttgctccctgagggacattgtgtcccaaatactttggataaagttcgtaaggtactccaagatcttaggttggactaccaaaagattcatgcttgtgtcaatgattgtgtgttacttcgtggagagtatgataagatgaacacatgtcccacatgtggggagagtaggtggaaaaatatagattcaggagaactcggggaagggagtggcattggaggagcaaagaaaaaggccttcgtcctcgtaaaatacttaggtattttccacttattcctcgacttcaaagattatatatgaatgagaccacatcgacctatatgcgttggcacaaggaagaattggttgatgatgggaaagtgcggcacccagcaaactcattggcatggaagcacgtagatgaaaagttcagggatcggtttgcatctgatccatgcaatgttaggcttggacttgcatcagacggcttcaatccatttgggatgttgaatgtgacttacactacatggtcggtgatcctaattccttataatctgcctccttggttgtgcttgaaacaatcttattggatgatgtcgatgctggtacctgggcctagatctccagggatgaacattgacgtatatttgcagccgctgatcgatgagcttaaacagttgtggactgaaggagttgaaacatgggatgccaaggtgaaaaagaattttacgctacgtgcaaatctgctctagacaataaacggttttcctgtgtatgccatgttatcaggttggagcacaaaaggcaagtttgcgtgtccttattgtcacaatgatactgaatacttgtggttaaaatacggcaagaagcactctatataggccatcgccgctttttggcttcataccacaggtggcgaaagaacaaggttagcttcaataacaaggttgaaatgagggggcctccagtggcactcaatggtgacgaagtattgaagcagtacgagagttttgagcaagtcaaatttggcatgacgtcaaggaagagg

SEQ ID NO: 8754 - DNA, 23297 bp, Oryza sativa
gatataacatctgtagcccccgactcactactcaatggaagaccaattggtgtagtgaggcagaggaaaaggaaaaatatcatataaagaataaaataaatgatgacttagctttgtaatattccccttggtgatggcggaagtggccaatgtgggaacaaagtcgtccatcaataacaatgaagacaccagtcggcggcgacgaaggcggtcgacggtgaaagcgaagatgcccactaatggcggcataataggtcagccgtgtaagcggaaacaccagtcgacggcagcgaaggtgagccaacggtgaggatgtagacatccaacaacggcggcataataggccagccgtgtaggcggaggcaccactcggcggcgacggaggcaggccggcggtgaagtcgtagacgcccaacagcggcggcataataggccagccgtgtaggcggaggcaccactcggcggcgacggaggcaggccggcggtgaagtcgtagacgcccaacagcggcggcataataggccagccgtgtaggcggaggcaccactcggcggcgatggaggcaggccggcggtgaagtcgtagacgcccaacagcggcggcataataggccagctgtgtaggcggaggcaccactcggcggcgacggaggcaggccggcggtgtagatgacgatgcccatcaacggtggtgtgaccaaccgaccgtataggcggggacaccagtcggcggcgacggaggcaggccggcggtgtagatgacgatgcccatcaacggtagtgtgaccaaccgaccgtataggcgaggacaccagtcggcggcgacggaggcaggccggtggtgaagtcgtagacgcccaacagcggcggcataataggccagccgtgcaggcggaaacaccagtcggcggcggcgaaggccagccggtcggtgaagacatggacgcccatgaacggtggtgtgaccgaccaaccgtataggcgatgacaccagtcggcggcgacggaggtaggccggcggtgaagtcgttgttgctatcagcaatggcggtggcgaggacaagccggcggagtggactcgcggccgatcgaccggaaagctgagacgcctcgagtccatgaccagcatcaatcgcctcaatagtgccgcgtagttatatgcgaacaacaacaaaaaatagcaagaaattaatctgagattaaaaatcaatatgataaataatgataaaaatcagattgagtttccccctgactgatttggatcaagtcagagaagaggagcttgaagaagtggtcgacggaaaggaagtgaaaactcccaaagcgaaagcgaagtcggcgactcatgaaattgattccatcgcgctcgttgataggaaactcgacgcaacccctacctggcgcgccaactgtcgaaacatgaattcggcaataataaaagggggtagcgtacgagacctaaagtggatggatgcagagacaaaggatttagacaggttcaggccctctcaatgagaggtaataccctactcctgtttggggatttgaatccgccgggtgtagtatagatctgacgatcaggttgtctcatgccctctagagggcctcctgcccaccttatatagaatggggggcaggattacaagatagaaaccttatccaatacggtatcggtttcctaactctactttacaatcttatcaaaccaggactttaggccgttccgtaatatacaaggaaacgtaatacccaagtcatgatctgttacatatttcatatatataagttatcccctataactagtcggataaccatgccgtgtgggtatggggtacccataatctccacagatagactggattacgtgtgttccattggtttttaaggttggggtgtgttttgatctattaagattcaattatttgacttccgctgatgtaatctaccattcaacatctctctcatagacttggttacttgtgttcgatccaacatataccacgtgaaacaaccacccaatactatgagcaccaaggcagtgtgccatgtcgtcgtcgacatcgagctccaagacgtagcccgcggcggcactgctgctactactaccaactgctgcgcggtgtgtgtggagccattagagtgggtggcgatcgggccatgcggccaccgctgtgtttgcgcgagatgcattgtccaggtccgcttcgtcagcgaggacaggcgctgtcacgtgtgcagagccccctgtcctctcgtcgtcgtcatcaaggggcactgcatcaacggcgccgatatcctcgctgagctgccatcatcaccgtccatgataactagacagggtagagtggacaacttctggttcaacgtcgacacggcggcctacttcgccgatgagcagcaattcaaggtggcgaggattgcttgcgttaaaaagtccttttataagcccaaggtacgtcctttaaattgttgttgagatagtaattaatgaaagattaatcactaattaatctttgtttagcacttctgctaactaataatatggaaaagttaatcacttcgatttgtggtcttgttatacaaaatatacgataaataaatgaaatttatgaacctttacagtataataaacgccattactgcacatcctttacaaaataaataaaataaattttccgaatctttaatttacaaattacaaatacacaaaggttatctaatttatgcgtggccaaacttcatgacattatttttttttgtctgtttgtaggagtggtggtatttcctactcgtctatgttccttttatgtttgcaggagaagccataggcgcgacgtgtgctggaagaacgagtcatatgtggttgaaagtgataatctatctcgtgtcaacatgtgttgcactgttgtttgctagttatttttggttcatggcacggttttcaagtcaggctgtaaaatcatgagtatactagtacatatacgtgcaatgcacgtttttctctatatattactattaggatgcaaaataatcaccttcaaaaataagtatattcctataaaatcataggagaaaggtatattttaatattttttttcctcaattctgtatgcgtcattcaaattccccagcgacgctgatggtttagctgactttggtttcgtagtttaccttgttcattttgtggcattttactcttctttaccaactatagttgatattggtgtaataaggagcaaattggtatggccaagggaatcattttttagcacggtatggccaaggaactggtcgaggaagattggtttagcattcagaagcctgaacacgtaggaactcaggtctttctgaaactgatacattctgctttccactgatgtcagtatcctattatcctatatacgttgtggtgctgatggattagttgatttttgatttcttagtttaccttgttcattttgtgatatttcactctattgtttctcaattatactattatagttgttctgtgcgacaaaagattcatgcagaaaagatcgaattatttgcgtagaaaaatagaaactcgaaggattctagaacgtcatacagtaaaaaaatgaacggtaagtcagattgattctactgaaagtcatatggtaaaaatatgattctactaaaagtcatttggtaaaaacatgaacagtaaaaatatgaacgtcataaggtaaaaacatgaacgtcatacgtagcaccggaactgaaagcttttgctactcagtaatattcccgtaggatgacctacaaatcaattactagcaatcaaccaatcgtgcaatgagcatagccatatgtacgatgactaccctctctacccattaacaagcaagaaagtctttctagtttctacgaacaactgggcaactggcgagcgtagtaacgaggtctttgaggcagggtactggtagcagagacacaagattcacataccagcagcaccaacgaatcacaagctaaccagaaaaaaccgcatgtatcgctctaagtttctttggaggtgacccggcatcccttggagtgatccagctccagcagcaaagcgacgatcacaccgggactcgtcttcccctgaacctagtgatcagctgcaaatttgtaaacaggaacaaccataagaacagagactatgaatctacgacgacaagcagggagtttaagcacatccggtggtgacttatagccgtaccgaagtcacaagagggtggtggaatatccaaccgaaggtggggctcttttgcaggtaaacagcagcagttggccagaagcctctgtgatgaaaattcagaagcacacacagtcagattcggatacagactccaggtgttccatttcacaatgcacatgacctagagacaggtgattattatgatcatgtttcagaatggaaacaccatagagtttactgacctgaagagcttgacgaagccgtatgcctctgccagcatgccaaagaacggccaaccaataaggaccaggaagaagccaattccaaaagcaatcgagccctgtacaatgaggtagatttttcatatcataatggacctctaatagaactgggaactgaaatagcacagtcttcatgatgaatggagtttgcaatggtacagaccttgtgattcttaggcttggtgaagaactgcacggttgacttcggtccaatggtcagtgaaacaccagacacaaacagaatctgcaacatggcatacgcacaccaattagtgatcaggatgaggttacagtgaagcatcaatcaggattcagccattcaggaaagtgaatcttacgtttcctattgcaaggaaccccttgtcaaacagcatgatgatcccaagaaacgagaacagaactccgaacccagataagcccagcccaatctctgttgaaaacaaaagtgatgaaatggttgagctagtgagatgcatacacattgtacaatacgtcaatacctcacagttgcaagaaaaaaatgtaaaaagttaaattaggcaggtaaattgaagaacgtgtattgtattatttagctactattagatggacctcctgttcaaaaacatgacgcgttgcgaatttgatataaaacatatgaaatgataaactgacaatatgctatctcagctatggacgaccatgaccgaaatttcatctagttctgaaaatatcgacacctgaaactttcccaacctgaatagatttcaagttgctaaccggaacttatttgctcagaaatttaacttcggtgtgcagagaggcagtgctaattatttgccatatacaatagtagcacaacaaattgcttctacttaaaaaaaacagtaatggaaaattcaccacagtccacagtaaccaaggacattatgtttgtaaacaaaacttgaagcgaaactccggaaatttggcgaggtttgtctcaccaaacaaacaccgattaccggtgatttgaacccaggagtcacagattcgatcggacatagtttttttttttcagcattttaaactatcaaacacgaccaatcatgctgcaaaaatgacagcatttcgcaaggctatcgacaggggaacagattagcgcatgatcgagcacgcaaagctacaaggagacacgcggcatatgcatcttccaccaaacaactcgtagagaacagcgggaaaacgtgaaagcaaatactggagtactacgttcccatctcccaccaaacggttcataaatcgcacgggaaaaaaacggaaagcgacgcaaacgcgggccaaatcctacaccaaaccgctcacaaatcgcgcgaaaaatcaaagggagaagaggaggaggaggagggtggttgtcgagtcgcgtactcttgagttcactcatctcgaaggaaaccatcccacccgccgctgagttcaacttcaacccgcgccgtcaccgtctgcaagagcaaaacaaagcacccaaaaaaaaagttaatcgaactactcgcgcggaatgccgctgcggcgaatcgcgatcaaccagcgcgatcgagcaggacgacggtttcccgagcgatcagagcgcacgcacctctccctcccggatggatcgccgcgcactcgagcgaggacgcggagcaactggcgagagaggaaggcgaggagagcagagagcagagagagaggcgaggaagagattttgattttcgaatgggggcgccgtttgcctcgaactcgctcgccgaccagggtcttattgcaccgggtggtggtgacgtggccgggtcggcgcgggcgaggaggtcggaagcttcgatcggacgcgccgggttccgagtttccgacccgacccgggcggaggcggcggcgttggcgacggttgcgttggtgtgtccgcgcctactggaatcttccgggatgccgagtgacttgctcgtgaagtttaggaccaggattagagatttcttaggcctgaggcattttgcgattgatcgatgagggcacctggccaatggcttcagtccacgtggaccactttcttttttttttgcttgtttggaggacgacgccttttcccacgtgtgcttagctccggcaatggaatctgggtgatggactatcttcgtttatgcttatgcttatcattcaaaatttgaatttttaactttaaatttaaagctgattttaaggtttttttcatcgaagtttatttttcagtctttatttttagatcgctgagaacacatatataaaagttttatttacaaattactttccgtttataaatatgtcgtttcgctaaaataagcgaaacggtggctccgctgaaatctaaagtaacacctgaactgtcacctctaatgattagtaacagcgacagaagagtcgaccaatttggttttcgttcacggtcaccgggagatactccctcccccaaaatactccctaaaaaaatagagctatatattcgtattttatggataaagcagaaaaaatacaatataataactcgggaaataaacagtcacgccaagcgtctacaacacgaacacccaatactaggaataaacaggttgcaacatccaaacgcactattctccatccacgtgaagtactaagtactcttttcgtccccatatataataacctagaataaaattggttaggacatatcctaagttgctatattttgaaatgaagggagtagatggtagttatgtgcctaatacaggcttatttcatttaatccctttatgaggtaataacaagccctttgagagttaccacggaggtaaccactgcagtaagtggaatagctaatgcaaatatgcaattgtcttgttttatcatgagctcacacttgtggaaaaacatggcagaaatgaccggaatgccattcaacacaacataacaactgaagatttcaagtgttatatcttgctcagcacagctgagaacttttagaggccttcaggcatccagatcagcacctttaaatgagcaatgagagattggtgactgaaggacagatgtgaccaaaaatgtgtttttcagagtaatatatatatatatgcactgcataaatctaaaaatagccaaaccaaaagaacgcacacagctatttgagctaccaaacatgtgaagtgagaacaacttcgacatgactgctggcatttttccttttcctttttttctttcttcttttcaaataccatgttcttcatgaatatgacacagcaccaggtaggcaggtagtacaatgaaagaatggaccttcaagtaaatataagcagtgcatgcaaataagatgtagccatcatcagtatttacaggtgctgatactacatactagtcccattgcagcaaacaattctttaagcaatgcaactgcttgaaagtctatcagaatatcatgaaaatggataccctacactcctacagacagggaaaattcataatatcaagtaatttaactcagatcatccaaagtaaatacaagcagaataaataccattgtgctttatggactctagctgaaattcataacagatagtcaggcccacagaattggttccttttccaatctagtaatgcaatctaggtccatgtggtgaaattcattttgctggtggtacgttccacatttcagacagcacaaaaatgggtgaaaagaatagcagagggtaaaaaaaaagagatggcaaactgtagttttcatccaggacaaaccataagcccaaaactgtcttataatttcaaatcctcattatgtaatctaactttgcaaatgagagtaacaatcccctggagagagaaatgtactatgccttcatgtccttgcagtttgatattcttcattgaaatgccacccgctgcatagcttaacatccaatgctcgttgaatcaacttcgataaacacctcttccaatttatgaaggaccacgtaacttgttataagatttcataggcctgtttagatcattaagattgaactaggtagttccctttcttctgctaccagtctacaactacagatccagataccaaaccaaatcatagtaagaagtaagaactggcagagttcaagtacccaggtttaaattaaatgcacaataatactgcatactcctggaactctggaaccactagtattacatttcaactgcattcagctaaataatcagaacatatgagctcatgcaaccatgcacaaacagattcaagaatagccttatacatatcacatatgcgagggcaaacatgcacctatgatatagcttaaacatttgtaacaaggtaccaggttcaagtaacaaacatcaattcatcatctcaagcacacattcctaatacttatataaaggtactagtgatcataagcggaggaaatcatgaataatctccaaggaaatgccaaaatagcagcagttctttggtggatctaagcgcagggccaaaccaaacaccttactcctccgctggagcaggagcagcagcagcctccgactcggacgcggccccctccgcgggcgccgccgctgccggagacggagcggcgcgggacttggcgagctcgaggaggcggcggctgacctccttggagtacgcctgcagcacctcgatcccgtcctcgacggaggccggggcggcggcggcggacgacgactcggtgacggcggcgtaggcctcggcctcgaccgcggcggcggcgcgcccggcctcggcctccgggacggccccgtagcgctgggagaggatgctgggcgcgaccagcgtctgcacgaggcggcgcaccacggcgtcccgcgtgcgctgcgacgggggccagatgctgagcgacgggagcagcgcctccgcggccttggcggctggtgccgcggaagctgcggcggcggcggagcctccctccgcggccgacgcgtgctggctcccctcggcggcggcggcgctgggggcgtcctccgccatggctgcgggtaagtgggagatggagaggggagagatctgtggcgtggagaggggagagaccgagagagagaaaagaggctgtgccggtcggagacttggagggtggggttcgatttggttcgcttcgcttctagaagatctccggaaggtgaacgcgcatttcgagatgggcttaagttgggccatggatgggatgggcctggcccaatatgcagaccttacaggaagaaaggaagcccagtatcatgccaggctggacttgggctgatactaccttgaactgtgctactactccctccgtctcatcttaagtctagtttcaaatttccgtgttcaatctttgatcgtccgtcttatttaaatttttttaaaaaacaagttacacataaaatattactcatattttatcatctaataacaataaaaatactagtctaaaaaatctcaaataagatcaaatgttggatatggaaattcacaactgcgcttaaaatcggatggagggagtacacttttcttctctctctcgttttccaatagcattggttttttctttgatcacgtatacttttgtgttgtttccgttggaggcagcccaaaagaattatcggtctatcaagtggagtgtagttcaaaggagacccaaactttgcaataccgtagctccctgatctgccgttttactgttgttcggtttcattaggaaggacacttagttaaccttcatttcaataaggatggctctttgctctcagttcttatcattcggcgatgtaacgggatttaatcccatcaactttgtccttgctttataaaagtttatgtgtttcaaaaaagaaaaagaagataatgcagcattggcaagctgaaaaccccagtgattctcaatgcattatctccactgataatgcaacagtgacataccgtcactctaatcacgtactactactacaagcataataagattcagcaaacaaaacttgtgacaggaccaggcattcatgtgttcctgtctcctctccgctctccagcagcagtggacacaatccaacacgcacaagtgcacaaaacaactcccagcgttagctgcccgatgcaaatggaaagctgagccctcggtgcagcaagcagaggaactgcccgtgctggttgtttggttcggtaaaagttgagaaaaaagaagctgcaggcaatggcagggcaaaatggccatggcagtgcagcagcatgcagggcataggctttggagctcaaggcctttctcttgtggaaagccgtgtcccctgtttcccgggccaattcacctgctcccaattactactaatcatctgtcgctaacctccaattctgcactaactaacccccttctaaaagtaatgacacgccaaaaaggttgcgtcatttgggactcagatgcctcaatttctgaagattaatgtatatgatcagtttgttactagccaatttctgaagcttagcgtgtatatgttctttgtgtttttcagaatgtgacagaaagaagaagcagatgaaatgatgaatcttctgctactgtgtttctttctttctctgcttctgattttttttcaaagatggcactgctactgctaggagtagcatgcagtttgtcttttcgagtcatgcggtgcaaagttgacaaaatggcaaatgattgtgcattagctcctacacctcatcactagggcagaaaagggcttttcacctttgaatttttttgactgttgctctaatcaccattactaatcttcaatgtgccaatgtgagcaccactttgccaagttgttaagcttaaacatcccagtaataaaactctctctctgctgctgctctctaatcagtaaccagtagtacactggtagtagtacttcagttctgatagatagactgatactgctactctgcattagaagattcagacaagtgcagcttctctgatagatacagtaaactctgtccctccatgcaggagatggccagccaaaggctactgctcctcctcgccgtcctgctcctgacattgctcgccgcgacgacggcggtcgtcgggggacacggcggtgacgacgtcgccggcgccgaagaagcgaagccgccggacgacgacggggcggcggcgaagctcgacgtgcgggcgaggaggtggccgcggttcccggcgacggacgggcagctggtccgtggcagcgcgcggcgagtgcccaactcgtcggaccctctccacaaccgctgatgtgattacggcattctctgccgattgccactctgttcttagcgtttcttgcgttagattctccatgttttttgtcataacatcggttatgatgtagatcatggcactatgtttgttcagagaattgaaatgcgtatagaagtacatgattttgatttttttttatctagcttcgattggcacctcgagtgtttgtaatcagaaattaatcaagatttttgcgtgttttgtccgcttttgcattcgattttctttgatgaactgaactgccctgacatggtggagcccacatgtaagtctccatccttcctctatcactgcgtcaaaacgtcgaacaccttgcgcgcgccaccgccaccgcaaccgccgccgcaatgtccgtcaccgccggggtcgccctcgccgtcgccgacgcggtgtgggcggagatcaggtccgcgggccaagcctccgacgagcacctatccatgtgagtaaaaccaagcgcccgccgcctcgctccctcctcttccttgacctcggttgcttcgaaacagcctcgaggccttgttcggcaagaacatggtgcgcgcctgcaagatcctcgacgagggcggcgtccgccgcgtcaccggcgcgcccagcggccgctcgctcttccttgtcagctcccccatctctcgattcctcctgttcttcttcgtgtcacagccaaaagtgagtgagtgaggatttgcctgacctagggttttgcgtctcggcgattcaggtgatgggggagtcgaggaggaaggaggagtacatctgcttcccagagcacctctgcacctgctactccttcttctacgacatcgtcggccgcggcgagcagctctgcgtaagtgtggcattctgacctgctgctgttactgcatctgaatccgtacatctttcaatcaggcacactgaatttcatggacacaagaaacggataacctataaacacaaaagaaacatggcaccattgcaattgcaattatcagctactactgaagtactgagtactgaaatgctttttttttactgttttattttgactggttactgaaatgcttgttgatctcttttgcatagtaattgctttaattttgtttcttcatggcgctattacaattgcaactatcagcccgcggctactgaatattgagatgcttgttgatctctttttcatggactagttgcttttgtttcttcatatggtgctatcgcagttgcaattatcagctcgtgactactgagtactggaatgcttgttgatctctcttttcatggagtaattgcttttgtttcttcatcgcgctattgcaattgcaattatcggctcgtgactactgagtattgagatgttcgttgatctctttttcatggactaattgctttttttttcttcagtgcaagcaccagttagcagcccgacttgcggaggccgtcagtaagcaccaggacattgaggtaaccgatgaggagttggcccacatgcttgctaaactctgaaagtttcagaatttcggtacttcagcaatgcacatgaagtttgggacgaattgatttttaagaaggattctaacactagtaccgttgtgcaaaatgactgatctcagtgcaaagaactgaatgatgcttgctatataatatcagctagatgagttatcctcgaatattaggcgttctcatgtagctgacaggtataatgtgaggcgtcatggttttatcattttgttgttatgcttgttgttgtattgaatgttaattagcttcaagaatgaggggaaatgtgtgatattcttcattcttgtgaagagatttataaatttgttcctttgttactgagttaccctgttgccctcctttttagttactatcttatcttattttagacaaattgttccttctctctagtattgctttagtaacaggggaaatatgaaaaggtattacacaatgccgcgtgattatgaacttttagttttttctaacaatattacacgtattgagaattctgactgtatggatcttcatgaatagatatcataataacaacatacgtagtacaaagatatgaatgctaaatcaggagatcctaattgtccaagtcttaggccacaggtttcacagtacttaagcaagtacgttgtactagttagtttcagaattgaacatttcatgcaaacaacatttacgactagcttaagaataaatactgatgataataaatactagtacaaagtataaataacattttgatggccgtctatgattttataaatcctggatacaatagcgctgcaatccgcagctcttttatatttgctactaattgattagcttcgatacaatttaaaaaccatataatatccaagcatctaaactagatagctttaaagagtatgtgacatattttggtctgtttattcttatgcctttcttttttaaaaaaagaaaaaagaaaaaaaaaaggatgcttgttcttcagctttcagcagaggattttaatgctatgcacttgattctcagcaatgaaagaatatggattcttcatctttccgtgtacactttcatcagtatgtcgctgaataacaatttcgttctttcacattccttttcatgggtacatttatatgctaggaagaaagaaaaaaagaaagaaaggcaggagctccgccagtgccactagaatccatgtcattactagtcacagcagtactatggtatacacaagagtggaggtatcagccattgtatgatcaatataactggtgttgtgataggctcctaatatcaactctgatagtgcagagcattctgtcaattttcttgtgaaagatgataatttattgaccggaatgcatgatgtgcatatacagtttggcttacctgaagaacaacagtaatgacctttcatgatactctgtcctgttcatctgcagttttactttgctcctcctgatcaggcataacaaccaaaaaaccaagtactggtatccatgattgctgcttctgctaggctaaaagtaacaactgaaaacaagccacgggattcgatattagcatcgcaatttttgtgaatatgaacatgtattatttcctaacatattcttcttggcactccaaaaaagatcaaaataaattgctggtgtttaatccggccaattgcatggagacattctgaagtaaaatcacatcgaaagactgaatttgcaaccaacaaaatggacagcagtggcgatgaacaaaacccaaacctaacccaaccatggccgatagtgcgttagacggctgggctcccgttcctcgcatgggccatataatgggctttcgtgatggatgatgggccaaacaagcctaaataggacaggcagcagcgtgcagcgagtagcgaagcagcgctagttttagtaccacctcgccaattcgagccgcagccaggcgggaggaacgctataaaatagggcgaggttgcaccattgtaacccatatctttctcagccttttggctatttggctattggctaagggtgtgattagttcgcgaaaagaaaatattaaacgtgggaactaaacaagattaactgttctcatcagtttaactaatatctgatgtgtgggccatatgctcacttcgatattaaatttattatttgtgggggagggcttcgatattaaatttattatttgtgggggagggctcatcacagtggcaagcccttgccactggggccctcgcgcgtcgctcaggcgttgcactgctgcccgggcctggcgcacccaaccaaaataagttgaaatttatttaatttaactagcaaatatgaaatatgactgctttacaacgggatttcgttgcactctattattatatgtttttatctttttagtgcaaaagaaaaaagataaaaggcatatgtaatttttagtgcaaaaggaaaaaggtaaaaggcagcaatggaaaagaaacacgcaccttgtagtatcgaaataaaatatgttcgaattttagaaataatttaatatttaaggaaataataattattttgacatgaaaaaatctactgaatctattgagtgattaaataattgattataatttcctagcaattttaaatggcttaaaatagttccaaacaaatttttgtagattttttaaaaattaaatcagttgctctgaaaaataaactgattagggccttagtaagtttccgggacaacttgagggaccaaaactgaacttatctgtgcgaagcgttcacatgtcccaattgtgtggcggcccgggaacggcagcccgatgcgggagaattcgcagccgtccgatctgatcgacggtcacgattgatccgtacatatgtataaaaagccgtcaaccctaaccctaaccctaaatcatttcccctcccccctctctctctcacgactgcatcggcggcgcgcgcggcgccttttcccctccgccgctccccctctccctccccaccggctacgccattccccttccgccgctccccctctccctccccactgccgccgccgctccccttccccctccctcaaccggcgccgccgctccccttcccctcccctcatcggcggggacgttccacctccctctctccctcccgtctcttctcccttcggcggcggtggaaacggccgatggccgcggtggtggcggcggcggcggtagctcgctccgccccctctcgccttcctcccacagcggatccgtcggcgtcgacatagaggcggtgggccggacggcgtggaggcggccggcaggagacttctccccctctctctctgtgcggcggctgcgggagggccggtgacggtggtggcgggtcggacccagacggcgtggaggcggccggccggacctcgtctccgccagatccggcggcactgtggccaggacggcgtggaggcggcgggccaggcgtcgcctcctccagatccggtggcatgggggcgctcggcccgacggggcgagagggcggcgtggaggcgggcggtgatggcgtcggcggccgccgatttttttttttttttgcaattttttccatcgttattgctaacctaatcggattatgtcggtgatataggtccggggtatcaagtttagagggaggaggctgcccccaatgccacgtggccctcccccgagaggagtcaggcccgaggtggggtggcggccactccttccccaaagactagtcagaggaggctgccccccgatgccacatggtcctccccgaggggagtcaggcccgaggttggatggcggccactccttcccagagactggatggaggaggctgcactccaatgccacgtggccctcccccgaggggggtcgggcccgagatagggcggcggccactccctggccgagactagagggagaaggccgccccaggctccacgtggctctcccccgaggggggatcgggcccgaggtcgggcggcggacgccccctcacgtgactaggggtcgggctcccccgaccacctctctaggtcaccacgtatggtgggttaggtgtccgcctctaggtgcccacctacccgcatttatggcgtcccgagcggtcgcgccacgccgtgcggcgtgcagtgcactcaaccggtctgtgaccggtcgaatgaccgatgggactggctagtgcgcctgtgcgctgctcgtgtgtcaggcggcgtgtagcctgacatgtcccatcaaatagtgatggtgagaggttctcatcctcttatcccagccggagtcggtcctcccgctctggtcaaagcaaggctcccgtttcccggtgtaataggagcccagaagtcttcacccattaaatggtgactgacaggggcacccctcgtgtcaggcggcaagatttgacaggcccaatcatcaagacgacgtgtgcttagcttcccaaccacagagacaagacatgcatttaatgcaaagattataatacttctccaccggagctaggttaggttgttgtgcccatgtggtaaccccttgaggtataaaaggagggccaggcctagtggtggagggggaacttccgagcgaactagcgcttgggtctcgcaaccccaagcacttgtgttctacattcaatcaatcatgcacaggagtagggcattacgcttcttagcggcccgaacctgtataaacctcttttgtctcatcgtcttgggggggctaaccccctcaagatcacacagctctgctcaccaagccctcgaatctcacccgctgcccccggccgaactcacaaaggggggcctcacggttccctgatggaggagttcattctccgacatctggcgcgccaggtaggggacacgttcgtgatttttgaggttctttcgagcgccggcgtggtgagtgtcgcgccgccgctactggggaaggcgcagtatcctcaggagtgtcgcgccaccccaggcagggggcaaggccccccacatccccaccaggtaagcttggctaccaggtctttgtggcgagtcttcggaatgtccgagggcccccaaagctccagccctgcctcaccgagaaatacgacgatggcaccgaccccttcgagtccctccagatctgcacgacgatcatagaggcggcgtggggtgacgaccgggtcaaggcgagtttcttccccattccctccagggccaagcgcggggatcgctcatgaacctgccacttgcctcggtctactcctgggaggactcttgcagttgagctccgggtgccgtcgaagcccagaaccccctgtgctggctcttccgtagcggctagctttggtcccgctggctggctacggtgcccggcccggctcaactaatcgtcctttcaagcttcaagtattttcagtttttcaattcatcagcttaatatagcttgaagtcttatatttattttccccctgttcttttctcatggccctgcgacgctcgcgtgttacgcatttgtttgctccctcggtggtaagagcccaacctctctcccatgtacatgaacgattcttcgctaagtgtgggggctaagttttctagccttatcctagccttaagttgagccccgggtgccgtcgacgcccgggaccccctgtgctggctcttccgtagcggttggctttggtctcgccggctggctacgatacccggcctggctcaactgtggacggggattgctggctctagagttttcggctctcacactcatgcgaaagtaattgtccatatagaaggaaaagagattggaaggaggccaccgaaagaaaagagcaaacagaatgtgtagcgtggggacataggctcgtgggaacctgatctcgtttgctaagtggtcacaggcttcccaagatggttcggaacccatggtggggggccctcttcgagctaaggaaaataagttcacaacctaaggtacgggctagcgagtcgccctcaggctgggatgaaaaaggcacatgggtcctagtgccagcaaagaaagaataagagatcgggcccacatatcatcagactagaaaagtggcgtcaaccctgaccacctggggaaggttttggtcagggctaacgccgggggctactgtcgatgatatgggcccaggggtatcaagtttagagggaggaggctaccccccgatgccacgtggcccttctcccgagaggagtcaggcccgaggtggggtgcgggccactccttccccaaagactagtcggaggagggtgcccccggatgccacgtagccctcccccgaggggagtcaggcttgaggtaggacggcggccactccttcccagagactggatggaggagactgccctccaaatgccacgtggccctctcccgaggggggtcggtaccgaggtaggcgggcggccactccctggccgagactagagggagaaggccgccccaggcgccacgtggctcccccccgagggggatcgggcccgaggtcgggcggcggccgccccctcccgtgactagggtcgggctcccccgaccccctctctaggtcaccacgtacggtgggttagatgtccgtctccaggtgcccacttacccgcatttatggcgtcccgagcggtcgcgccacgccacatttaatgcggcgtgcagtgcactcaaccggtctgtgaccggtcaaatgaccgatgggactggctagtgcgcctgtgcgctgctcgtgtgtcaggcgacgtgcagcctgacatgtcccatcaaatagtgatggtgagaggttcttatcctcttatcccagccggagtcagtcctcccgctctggtcaaagcaagactcccgtttcccggtgtaataggagcccagaagtcttcacccattaaatggtgactgacaggggcacccctcgtgtcaggcggcaagatttgacaggccccataatcaagacgacgtgtgcttggcttgccaaccacagagacaagacatgcatttaatgcaaagattataatacttctccaccggagctaggttaggttgttgggcccatgtggtaaccccttgaggtataaaaggaggtccaggcctagtggtggaggggggacttccgagcgaactggcgcttgggtctcgcaaccccaaacacttgtgttctacattcaatcaatcatgcacaggagtagggtattacgcttcttagcggcccgaatctgtataaacctcttttttctcatcgtcttgggggggctaacccccctcaagatcacacagctccgctcaccaagccctcgaatctcacccgctgcctccggccgaactcacaaaggggggcctcacggttccctggtggaggagttcattctccgacagattgcatatggacgaaaaatcggatgaaattagacgtgacgaccggaaaaatacgaatatttatattagttatagataacagcattttgaacacttgcttgttcaaaattttaattttttttagttgattcgccttgggcctttgtctccgtattcgaaactttcgaacttctgcagttacatgggctttgggccgagtaggtcggcccatgtttacgaccggtcaccatttatttcaagctcgctctctctttgctgcagctatcgcacaagcttctagcttcgatagctgttcagataaatgataaacaaacgccttcttaaaaaaaattgataaataccataatattctactccctccattttataatccgtttgactatttttacaaacttcttcaacttcgaccaaattcatagaaaaataaagtaacattttttttacaaaacaaacatattatcaaaatatattcattttttagtataataaaactaatttagtgttgtaaatgttgctaactttttataaatttaatcaaattaaaaaactttgactaagaaaaaaattaaacgacttatagtataaaacggaagagtagtattctatatttttttgtcttaaaaaatgataaacgccttgatattttagtattctatcctcttttgtgtgctactgttacagtgctctcatcttccattgttgttcttgctcttccattttgaaacattgagacctgaatgcctgataaaatatttgataatttttcgtgggagctcatgtctcacctattccttgtccctctgtgactcgatcagcttgttcttatgctttcaccaacggattctaatgctatgcgcagtatgcactttgcctcacagcagtagaagaatagattcttgaatgaaccaatcaaagaatgcgtcatttttattagaatcctctgtcagagtgtcactagaatccatgtcttcacaattcacaactagcagtggtgctatatgacatgcacaataatagagctaccagccattgtatggtcaattcaaccggtgtcctgcaatctacgggagcaagtgtcttgcgtgtaatttcgctgtgaaacagcttttatcgatgagttgaacttcatattctaaatcattcaaaacggtagcctatgccctatggataatcgtaattatgaattccttcatgatagattgatatccaagttggcattcgtttgtcgttccaactatatattaacattgttgttatggttctcaatcattatattaaagactaactatagttcaaacattttcctcttcaacatgcatgagtttgttcgcttctgaaattacctcaccatagaaaacatatgacaaaaaaactgaagatcatatttgccaaaatgcatacttaaatatatataatgaactatctgtacactacaaacttataaccgcaggctcaagtcaagatcttcctccgtgcgcttcttctgctcctgagagcttgctttgaagctcccaggccagactgaccctctaccatgttcaaccgcaaaaggcacccagctgctactcatctggcctccatggaatttcgccacgacaacaccatcagcagaagaatagccacggttcaccttcaggatcgtggcgtgagggttaaccctcatgtggtgaagaaacgacgacggtgcagtcggggagagcccaaccatgagatgctgctgctggaagccgtgcgacttcctcggcgcgcacctctccctcttgtgggcgttctggtgcccacccagcgcctgcgagctgaagaacttcctcatgcagtagttgcaggagaaggttctatgcggcgccgccacggccggcttcggattcgactcgggaagcttacctgcttctgctgtcagtgcatcgacgacacccagctttagccatggaatcgaggtggtgtgatcatcctcggcagctcggtttgctgccttgtgttgcaccacttcaggtgatctctccattcctgtctctctttgtgtgtgtgtattaggagtagaagaaagagtggattgctctcaaggtttgtgctattgtggtagcttcttctttgctataaaaagaagctgggggtgtgtgcaagtggcaataattcaaggggaaagagcaagtgatcagcagtttgaagtggaccaggatattctagtttgcacacctatctatacttttttttgttttgagaaacctatacttcttttttttttttttttgcctagctagctatcaattttcctatagtggtggccagcatgctcccctcttaacaaagattttcttatttatacctgttctaccctttttttttctagttcttgatatttgataagagtaaatatttcataaggtgtgcctctcatgtatactgtccggttacaataaagttcagtttcttgtccagctcatccctgcatcctcatcaagtctgaacctgctttggataacagttctgtacctctctatccagtactacagttcagtatcctcatacagttccatggtttgtcattttcctgttcttttgcaccaatcatatgggaagctactgtttgtgtgtctgtagtgtccttgtcaatagaagtacaagaatatatgtatagaaagaaggacatcctttaactgaacaaaaaaaaagtcacataaagaaaccttgacttcaattctgttatgcgttgcaagtgaagttgtcttcctcttttgc

SEQ ID NO: 8755 - DNA, 29573 bp, Oryza sativa
gagctgacttgggccctgattggaaacatagcaacccagcccatttacagcccaaccaattcttaacacccccacacgctgaccttcatcaccgacgtcgtctgctccgtctgcaagatgcccgatgtcgccgagaaggtgatcaagcaggccgagcaccggtacgggcgtacggcgtgtcgcggaccgggaggtgctgcgagctgctggtcgtaggatactgccgcgtggagatgttctctgacgcttgcaggcctgcagggtatggaacgggatggagaggcgcgggctcgagccggccgccacggcatacaaggagatcgtggtgacgttgttcaagaataaccttgtcgcggacgccatgaaggtgttcgacggaatgcggttgaggggcccgggcagtggtgtcatggctgtgcaaggaagagagaatgtggggcgcgcagatggtgttcgctgaaatggtgaagataggtgtggaggtggacggagaggtgatgggggatttggtgtatggactagctgcatgaaacttgcaaccaagcagagaaaacatataatttggggccaaatcattgtttccattgcaaacaagagatagatggagcagttcaaagtcactgaatgactgcaaataaacgatcaagcaactcaaaactctgttccttgttggacaggatgcacggactcaagataaaactattcgatctgaatctaccacagacaccatcaagatacaggaacctacaacgacgactacagctattattctatcaaaatgcgccaatatgactcaggcctcaggcagcgccgacctcctgcttctatgctttagctgttcaccttcgtcttgctcttcttcaccttcgccttctcttcctcttcttcgccttcctcttcatcgtcttcctctttatttgcctctgcatctttgttttctttatctccaccttcattgccttcgcgttgcttcttcttgcggtgcaaaaggtccttttgcttcggtgagccctgtgaatgaaaaaggaaaaggaaaaaaaagagtcagatagagattacaaaatggatcaaaaacaaagaatgtgaagaagaagaagaagaagaagaagaagaagaagaatcctcacccagatgaggatgaaggtgaaaaagaccaccacgacagccgccatggcaaaagcaacccgctccttgacaaatactccatccgtttcgaaatgtttgacgccgttgacttttttaaatatgtttgaccgttcgtcttatttaaaaaatttaagtaattattacatcttttcttatcatttgatttattgttaaatatatttttatgtaggcatataattttacatattttacaaaagtttttaaataagacgaacggtcaaacatgtgctaaaaagtcaacggtgtcaaacatttcaaaacggagggagtattttatacctcgagaggcacaagaactgcaagaagtaggaaagggtgcatagagcgaaaccggtcggaacgaagcaagaggccaccttggtaagttgaaacacatcacggggacgcttgaggcagagatggccaatgatcgcgatgtgaaagaagatgacgggggtgaactgaagccaggtggatgcgtagtcggggtcatctccggtctcccagcggtcgggaccgtggaagttggttggggtgccggcgacgtggtcaggccttggcctgatcagcgacatcttcgctgcacgcccgctgaggctgtaggcgatggcgacggagtagccgagggtggaagtgacgaaagtagatgcgaacacaaatttggtctgccaagaacaaaaaaacaacaagtagcttgaatcagaaaacgccgagactgcctggatgggttatagcagcaagaaagaagaataactcgccttggtcatgatgtgaccttccatggcgtgatcttgctctgcatgaagagaactctatagttgtgattggttgagaggagagtgtaggtagagaaatagcttcattttaggataagttactgtgctagaaatagctacatttttggataggggtagtagctggtatatatgcatattttctgctttcatttgtttacagaacacctgcttagttcgttattggttcatagagctgttaaaacagttccgtgcgcatttgtaatgattcagggtgatagcaggaggaccggaggaggcttgtgcatgtattatcaactattaggatgaatctgagatatgttttccaagcttcaaaatgataatatagcgacattagttaagctgatctttagcaatgtatgagtctatctgaaggcagcataattcagttttatgtatggtaggagttttagaatccatttcagtgtgataattctctcctgtacctttcttttaagcacatattcagattatttgtaatatgatgtgcactaacgtgaatattaagtattggtgtcaatgttcaatggggaaccaatctttcatgtaatatattcactcgcgcatggcaaagccacgcgtgttttctagtgttttctaaatgttaactgcagttaaaaaaaaaactctattcttatagttcatctaatggaagaataccttagccagggaaactggatccttgctcacaaatgcacaaggtagaaatactggattaggtggtactgatttactgtactccagaagttcttgcagctgcgatgaattctatggaaagtaaattaaaaacatgtaagaatcaaatccctgaataaggcgttcagatttttttgagcacaaggtgccattgccagcaaaagcaataactacaaaagatgtaccaaaagcaagtaagcaaattcctatattgctagttagcatgagcaagcagatgcccaaaaaatagctcaccaacactaatttttcgtgctgaacgagtagagcttttgttatgaagtttatggctatagagtttaatgacctctgagaataacttagtttccatgtcttggcatgactagatttagtgcccatattttgacatgactaattgatgtcaaacttaatcaattaattaatcgaagttagtttttttttgtccaaaaacaaaatcaaagacagattcctctgcattgagtacaaagaaaagaaataacaaaatgcaagttctgagctaggtactgacctttggcaccatatgcttgctgatcaaatactttatttaagtcaacctgacagcgtacagactgcaccactgtaacaagagcgttgacttcaagaatctgcctttccaaatcctcaagattgtcttctactaagtcaactttattcaatatcacaacatcctgttaaggaaagtttgacgctttctgttattatggttgtttgcattttggaattcatcagcaggacaaatttcagcacagcagaatcaacacaaaggattccaaattttgtagcaaagacaaaatggtacaaatatgataacaccaaggaccaagttaccgaaaatgcaatttgatgaaatgcttcagggaatgatgatgactttttgtgctcatcaatttgcagcctgaaggcttttgcatcaataacctgatcagtaaaaaataaatataagaaaaatgtccaatatacagtccttcaaacttttatccaaagagtaacagtaaggagcaaagaagcaggcacattttccgaacttgtgatacagccagactaacaaataagaacataaggttgaactaaccataacgatagagtaaaatttaattgatgactccaactggtcgtctagccacagaatagggacaagaggtgacaagaggtgcaggatcagccaatcctattgtctctagtaatatgtaatccattctgcagcacatagaatgattcctaacaaattaggataataatcttcaatccgtaccgtcgtaatttacaaggcactatagtataataaactagtaatattattaaaaaaaaccaatatttttttaatgaaagatcaaagtaagagcatgatccactttattgcatcagtgcatagcgtacacaggtaagtgcatcaaagttttgaatcaaatttttagtatttccagaagaactagaacaaacaagcaatcacatcaactaacgaaaaaatgccacagggtaaacatagttttagagctaaaaccagaatgtcggtagcaaatcagaacatgccactaaggctttgtacagaaaatatgagggaagaaaacataatagtaggaccatatgttgtatgctacatatccatgcaaaacagcaatattcgtacttacctttcctttgtctgcacaagctgctcaagtgcttgaaccaggctgtgtttcaccgtgcaacaaacatatccatttgccagctctacccactcttcaacaagcgcgccaccttgccccttattgatcattgctctttcaagtccaatttcctctctgaactcattcaataccactgcaattctcttcccatgttgcgcactcagaatgtagttgactaactgaaaagtgatgcgcgggagataagctatcccataacataccaattaattgaacttacaaactgaaatttcacagaacacttggttaataagtacaggtgctgctaggaaaatggtaaggtgagacatagtagaagcaatgtcaacataagctaaatagtaaatgaccaactgacagaaggactaatggtctgatgttagaattttttttgaacgtaatctgatgttagaatttcaaatcaagatacggaccaagatagatcaaacaaggaattctgttgtgagataagaaatatcctaaaaatatggcttcattctgctaaaaagcacaggataaaattgtaaacacatgtataaatcctaaatatatcatcaactgtgtaaaaggttatccatgaccatgagtacctcagtaacgttaagtttttttgttcaagaaactagtaactcaacagttggggatataacattcaactacaggtcaaaattgatagctaactagctcggtcgacgaatcatttcttatactactacaactacaaataaattgaaaatgagctcctatgagaaacagagccctcgaaacgaaagttctactcacaagaccgctcttaaatagatacggggactgctccaaccaacacagcatgaggcaaactacctaaacttaagaaaaaaaaaacagcaagagctatggcgacaggaaacccgatcggatcaaacttccagtcacaagtgcccccaggctccagtcctccaggaatcttccattgagcaatctcgtgagtcgtatcctacttagcgccagcaatctttcggcctcaattctccgagcagagtgttttccagaagtggcagtgggtgcggaagcggtaaaggcgtagcctacggagaaaacctcaccgtggacttgccggcgccgaggtagacggtgatgagtgatgacggtgacccctataggcgatgacgcggagggaccgggcggcggaggactgtgcagcgtctccggcgaggggagggcactcgtcgtcgttctccatggccgccgccgccgccgccgagagagttcgagaactacggaagggttggtgttttgaggccgtatagaaaaggaaaaagtgcactggaggtccctcaacttgtcatcgggacaatgaaacgtcttcgaaccataaaactagatatgtgaggtccccttaactgtataaaaccggtcacccgaaatcaagaccgtaaaactagatatgtgaggtccccttaactgtataaaaccagtcacccgagatccttcagtggttttgaccccgattttagtctacatggcagctgagccagcatgggacccacatgagccccacatgtcagcgggccacgtcaactctctttcccctttcttttttctcttctttttcttacttattcacagcaacctagttcggaataattaattatttgccactcttacgtgctaaatgatttaccactagatccatatgtcataaacacatgcgggcccacgtatcataatgtggcaaataattaattaccacatttttaaagtggccaaaagttaaatgtccctaggtagttcgctcaccgacgttcatgcgccggcagcctaggctcggcgacggcgacgagcggcaccttccggcgtgtggacagcccgaccagctcctccatgctcacgtcctccgccgccacgcgaacccctgcagcaagctcgccacgcccagcgccaccatcttcttcgccaggttggtcgccggataaatctgccgccctgactcgaacggcagcagctcgaagtgctgcccgtgcacgtccactacgtcgtcgcagctgccggcgccggggaggaagcgctccggcaggaacgcgtcggggcggtcgagccacgacgccgggtcgcgtgcgatggcccacaagttcaccagcacgcgcgtgccggcggggacgtcgtagccagcgaccaccgtgttctccctggcgtggtgcgggacgagcagcggggcgcggtcgagctcgtcggttacgcctgttcatgacgatgaactggaacctcggctgagtattcctactagacaaaaccacccccgaagcaatcagatccctaaatcacaggctcacacggtatcaaaaccccaaccaaaaccctaaacaatcacctcttcacaacgaagagcaatccctccacatccttccgcctctgaaacataaaaaagaaaaagaaaaaacacagcgcatgagtgagctcacaggatcaccaaccaagcaaacaaccgaatcggatccgcgaggagggagggaggagggattgctcactcattggttgaggtcgatgttaggatgtccttgacggcggggtcgaggcgctgcagcacggtgaggttgagcagccgcgtgccctcggcgtccatcgtcaggtttggggtcacctccccccaaacctcaattggatgaactccatcatcatcgtcgtcgtcgttggctgcggctgcggaggcggcgacatgccggcatcccgcgtaggcttgggcggtggcaggcgctggatctgagggagcgcagcaatcaagttgggaatcgcggcaaagagagagatgacgtggacagtatgacatgagggcccacgtgggtcccacgtaggcttaaaaccattgaaggatttcgggtgaccagttttgtatagttaagggaccccgcatatctagttttgtgatttaaggacgtttttttatctcgacaacaagtggagggaccttcggtgtactttttcctatagaaaaccgtatgagaaacccagttgtccgatctacatctgacggctcaaaaaagcccaatctgatggcccaaaatgcctcctcgttaacacttggcccatatcatttgaatcccagtatgaagatttctgtcttctcagactcagtttaggccacacactgacaaatctgaagtctttcaggacaatcatttttttttccttttgagaatcaagagcttaatatgaattaatcaagttacatttgaaattcagtccctaattcttctgggataaactacttcctctaagtttctgttaaattcaatcatatgttcgaaatggagcctcagataagataagagaagtaaatttgtatgttacaaaaattagcattttgatgtgtttgctgaaagcatgcccaaaataaacctaaaaaaatatttctaaaattctgccccagctaccgcacatcgtaggacaatcgctctcccatgcacgaactttttgggatcaacgaaatgggagcccatggtcctcctaacttgtggagagggagaaacatgggattggggtttcttttctaaagaaattttaaaaaatctggattgatggcctactggatccatttttccctaaaaagtctaatatcgtaggatttatattattcttcttctaccttatagttcaccaactatagttctatacaaacctcattcatcatctatctatcctatacatcaccaactgcagtactacaaacctcattcatcatctatcttatatacctatagttcaccaactgtagtcgtacaaacatcaaatctaacagcctatctacgttgcctatttggcacagctccagctccaacaccacggccacctctcttagagctagagtctagctaaacagtttcagcttcatcagaaatgggagtggagttgggtggaacactctcacaaaataaactagagagatgtagttgggtttagactacttcataacttcactccagacctaactgctggagcagaatttaggagttaaaagttctgccaaacagacgaataatgaaagaggtggagctgttggagctctacaaaatgatgcgttctcccaagtcccggccgccccacaccgccgccatccactcctcctcctctctgcgccgcctcccacatccacgtttgagagcgcaggttctccggggtccgcggcggccaagcattgtctcccacgggcggccgggccagcgcacaaatccggcggccgaagcagcagcagaaggtcgcggcaaaacctccgcgtcgcgtccccgcaacgagggagcacgcgaccgcgggacgagcagcagccgatcagcccgccgccgcagaaggttgccaacttgccaagacggcagccggcgaggcctcccgctccaccatcctgtccgggtcggcggaccgcggacaggccgtgctgcacgttcttcgcttcgccggccaaggcggccaagcaggtattcctcctctatttcttccgccttactcttctttatctgaatcaccacccagttctttatttctgtcgacaattcttgcgcatctcatgctccgatttagtcgcagcaggaatccaagaattcttccagcgaggcatcccgctccggggctacaccaccggcgaggccgtcctcctcagtggagatgggtagaagacgatcacgccggtaaagcctcctctccccagtccattttcgtccttagcataatatgaaatcgaaagaaagaagaacgaattcacatgctctgcttgcacattttgacgcaccaaaatacctgcattgtttacacccaaattttagcaaaatttgtttcatatgaaccacaaattcacattcagcatctgaatcacatctctgtgattgcctggacacctctgttactggcgattgatgttttattcagcttctctgcatgtcattgtcatttggcaatctgccattctgaaacctgaacatttttgtgttcattcaaaaaaaacctgaacattttgtacctttcaggagctagaggttgagtatcgagtgaggagagagagatacccaggccgagtttgcttgccagcggcgagctggtggtgcgcacctgcaagtgtggtgtccacaaggagttcagcttccaccattcccactgagattgacaaggtcattgctatctgaaatactcctgtactcgaagctctgagattgagaaggtcattgctgtctgaactacttctttagttgcctgctttgtttaacttggctacatagttgaggtacactgcaaataaaatgctttatatccaataatttgtaggataagaaacacattccagattcacataataataaggatatagaccctccatgcatttgttgattctttttaaacccaagaagtagcaagaagtgacctgatagggcagccgtacggcataaatatatagttctgtttgtggttttgaattatcaacatttataactgataattatcatgcaaactaaaaatttgagaaaaatatgcgcatgctgaatttcttaatgagatcacagtaatcttcctttgaaagaaaaaactattttgaaacatgcatattgcccgcacttgcttttaattactgtgagtttcaggtacaaaaggtcctaaccttcacaatatatattgcccacacccttgtttttcttaaatgaacagtatgtgttgtttgttaattttatctgatcagtatgtattgtttgtcacgtgatacactgagttaagaaagtcattgctagcggtgctgctttttggtagctatatttttctgacttctaagtacaaccatatttttttcagggctgcaagcctgcaacaatgatggatttttttttccattcagacccatatcttagcattcggctggtgtttgtgggtagaaattattgctgaacagttctttaccagcattctctaacagctatttacatgcatagttaaaccatttgtatcaaggaagttttgctaaattttagtaattgttcagttagccttttgcttaccataattccttccaagaaaggcctctgggtgtattcataattcatcctaaaaaaatgagagttccttatttaagtctcaatgtagaagtaaagctacgccttattcagctggctggcttacttttcgctacagaaattgagattaagatgatgcaattgcattctattaccgtctcaataggtttccaatagaccatccaattctatcagttaaagcctattgttatgcctatggtgttatactgtgcatttgttatgattgtgccatttttaatgttcttaacatgtggtcctgcaagggagttgtggccatgccaaatcctaggagacatagagcctagctgcagcggcatagtggtagtgacacaataaatttatgaactgttttcatgctctcccacaggattactaacatccaaaatgatgcttctttcatatttggacatatagcaatggttagaaagctatctggcttcggttatttgcgcaacttaggagtttactgctacttcagctcagaattgttgggtaagatctcataagatagaagttcccctatcattttcatgtaccattgccaccgaatataagcagcctcttctcaatcatggtggactaaatgcctaaagcaaatattatctacatgaagtctctcggtagattttctgaactgcacaacacgacagcatgcttgcttacgccccattgtgttttaataattatattttatatctgacattccctttttttcgtcaggctttaacatcaaatgctttgttgttgctgccagcgtgaaatttcagctaatcaaaggaaattgtcagcgagttccttctggtggctacgggtccgaatactcagcatgtaagccaattttcctattctctcgaaatttccctttgctttatgaaacagatgccatgttctgtaaaatgtttcattctaaccagatagaagcactatgaattgtgtaattgtgtggagaacatgacctaaaatgttaaaatggtgtaaatatggtataaacatttgtcctactgctgctaatatgatgtacacatgatctaataaagcactacccatgtgcagcaattaggcaattgtactcaaactttatagcacatggtatatgcaattcagatgtctctataggcaggaccatcttctcttacgactttcagaagaaataatacctatatactcaccctgcactccttttaaaacacaagccacagctattgacactgcccttttctagagggtagggaaggaaaaacgagtagtgatcacaaccacctgctattgacactagatcactggcatcatttcttttgatgggaaaatcatcaaaagatgccttagaacagaacagaaacaaaagattccagttattttatccatcttttcacctattcttgtctttgcctcagtccttttttctggtactgaaagatctctggtgccatattcttttaatatgtaaaatcattagatgcctcattcaaatctgaagatcattcacatcttaatcatattgcagaggatatgatcaagaaatttgtgaatggcttgtcttcctttatccattttccatttattgcacattgcatcatcgcatcctcttttttgtgtacggtcatgttgtagttgattttgctgcctattatgctgattggtttctctacaggtttttgccatttcacctggtggataaagacacagggctatttatctttgacaaatagctatcatagactagcagttgctcaaaaaaaaatttctaaggttgtacattctgttgctggttgaaaactcaatatcagaatggttgaaccatggcattctgaccattctttttctttgggcttattttttattttgacttgctgcattgtggagagtcttgaaaattatttttaagggctggagggtcttgaattgaactaaagaaagcttgaatctttcgctgcacacaccagtgagttttttattggaaagacataattagatatagttttgcattacatgttttattgcttgaattgcactgctgtgatcactgcatttataataatgataactgcatatgttttcttcagtcacccatttgtttgccattattctttctttttgcgcgaatcctaaatagatcataatttttatgtgtactacaataaattttggatggacaatacaagtttgttgttcttttgcacaaccacattgagtttgtgtatatttttcccataggaacacatgggctcccaactagtatgcagaagagggcttccaaaaggtgattatggcctcggattgtctatcctatcatccagagaatttggtcgggaacacgggattgatccatggcgggagcggggagcccttgttgctgacatgaagaagcgtgcaacctaccttcctggagtgctccttttcacatgttaatcgactgtctaatgtagcatcacacaatttggcttgctgtccggagcttttaatgtctttggttctataaccctagaatgtatccgggaagtgccccgttctaatgctagctaatcaatagctgcgattatcctttttttaaaaaaaaaaaaagcatatacatgatcattcggcaatctttgatattacagactttgaagttgatctagccatgtaaatgtacggacgccacgagttcacacaattcggcaggattgaattaattttgctcaagaagtagagcactttctcccttcatttttatttactcacagtgctcatcttgagcggaatctcgatggacatctagagagctgggaagacctggatttagctaggatataactataatataaagattaagactcatcgtactctatcatctaagatgaaaacagttgtgaacttatgcaacctaaatccacagggacacggtgaaacagttcaaatagcgagtgcctgactaccttcacacatacagggaatttgattatttaagcaagcagcagaacaaacatactgagagatcagtccatgcatctctgaaacaaaatgcagtatctaatgtagctcacatcctaatccaagcgaagaggtatcccaaaacctgcagctcatgaaaaaatgacgaacaagggaaatatggccgatcgagtggagcacagagaattgagaaatgctgcaaatcttgggctgttgcccaaccaaaatgaacaacatgcgaacaagttcagagagaaaccaaaacaataatcgtctagctgcatgaaacttgcaactaagcagaaaaaacagataatttggggcacaaaatatagatctcattgcaagcaggcgatagatggagcagttcaaagttactgaatgactgcaaataaacgatccagctgttcaaaactctgtttcttgttggacaggatgcacggactgaagataaaactacctgatctgaatctaccacagacaccatcaagatacaggaacctacgaacgagaacgacaactacagctattattccatcaaaaagcgcctcaggcggatgacctccttcccatactcggcggcggaatgtgaactctggttcatcaacgtcctcctacggttcttggacgcggttgtttccatctccacctccattgccgccgcgttgcctcatctcgcggtgcataaggtccttttgcttcggtgggccctgtgaatgaaaaaggaaaggggaaaaaatagttagatagatagagattacaaaatggatcaaaaacaaggaaggtgaagaaggaggaggatcctcacccagatgaggatgaaggtgaaaaggaccaccatgacggtcgctatggcaaagcaacccacaccttgacaagtatcttatacctcgagaggcacaagaactgcaagaagtaggaaacggtgcacagagcgaaaccggtcgggacgaagcaagaggccaccttggtgagctgaaacacatcacggggacgcttgaggcagagatggccgatgatcgcaatgtgaaagaagatgacggtggcgaactgaaggcaggtggatgcgtagtcgggggtcatctcccgtctcccagcggtcgggaccgcggaagttggttggtgtgccggcgacgtggtcagccctcggcctgatcagcgacatcttcgctgcacgcccgctgaggctgtaggcgatggcgacggagtagccgagggtggatgcggcgaaggtagaggcgaacacaaatttggtctgccaagaacaacaaaaaaaacaagtagcttgaatcagaagaacgcgagactggctggatgggttatagtgtaacttaccctggccataatgtgattttccatggcgtgatcttgctctgcaggaagagaacaccataagattaacagtggtgatgcaggaaagcgaaacgacatcgagatgaaaaaaagaaaactttttacccatcgcgcgcgcgtccggaccccggagggaggtggagcacgacgccggcgacgaggagcagcagcagcgacgagcccaacccttggacgacccgcgcgtcgcggcggaaaggacgagagggagtgggggtggaggaggaggcggagagggtggaggcggatgaatataaagagcagcgggtgttttgcttttttttgaatgaaacctgagaaagtgttttggctttcgcggtttctttcgccctctgcacgacgaccacctggtctctccctacgactaccctacgactacgagacaggttaggctgacgagcgggacccacagcgaagcgcaggttgcgtgggagggacgcacctcccactgacgagcgggacccacacggagctctgtacccaccctgtctctgttcgggtggaatacaccatacccatgttactctatacttttttgcttttttgaacccttccttgcgcattatgacggttccatttgttcacttgatggtccgatttaaccacgtcgacgcgaacggtcagttgttctgatcgaggcaaagaggaacaacttaagaggtggcaacgggttgggtcgggtagagcgaatccatacctgacttgagaccacatgcccgcaaggtctatgggaaaaaaaatctcatgctcgtgcccatacccgtcgagcgtaggtaccccatcgggcttgcctgctatttgataaaaacaaaacaacgaacacacagaaaatagggaaaccctgtattttattaatcacgattcattaacatgaatgtttacaaatatatgagggctcccgcaggagttcgtcttttgccttcgcgaggaatacttaatagaaaggtatgctgactagagattgcgtgtagtctgctgattcccggcgcctagcaatgaggcggccggttaattacatctacaggagagagcctatggaacacctccaattaagctgcgcttgtgatcgtcgtcttcaaaattgattgctcgccgaaggttgaagttggtgcagagatttaatgataactgtgatataggtggctttgtttcgccgaaacctggtcacaatatattatcaccatgtccatacatgagtcaggtatcataacaaaggggatgacttttgcctcgtcggtgcccatttatatatgccagcctttattagatgtggatatatcgttacttttgcctcattggaacctagtaacatgtatccgttcctatctgtttggacatgttaataatatcatgacaccggcctcataaatactcggccataatttttaacttacaaagatcacgaatagctcccatgtgtgtgcatggtatcaaaatatattttgtaaaacatcggttagattgtccaatcaccaatgaaagttggacatatccagcgccgttgttatcggtatcatagtaacaaatagatgatccaatctccaatgagggccggacatctagttttgagcatagaaaatatatcaaatagtgttcagataatccgatcgccaatgaggaccaaaccagccttataccatcgattgtataaatggagtttgatgataaccgtgcttcggctctcattgatctggctttaatcatcgagatcaagatagattaaaaacatgcagatgttgcgatcgccaataaggaccgaacatctattgtgtttaatctagaaaattaatatttattcaatgtgctcaccatccagcgcaaatatcctgaatggcggtatgttgtcgataaatgactcgacttgatgaaggacgccggctgcggtgtttaattctctccgtagcggcgccggtttgctatcaccgggcgacttcaatctcctctcctgattttcctaatctactaagaagaatgggatgaatgaaaatgggcagatgggtgtctcctgtggcgtcctcggcgtcccccgctctagataggttctgcttcttatataggcagcggcgacggaaacggcctccgaatttccagcgccccgtgctaatcttcgtgataagccgacgcagagacgagccaatccgtcgacgtgtactgcagtctggagataattatgtgattaacatgtctaatgacagtgggccccatatgtttaatcgccacagccaatgaccatgcatgctcacgtaataacgatagcacttgcttatttcttttgttttaatagttccaatcttttgaatcgtatatcggatttaaaatccatttgaaccatcactttctattcaaattatacaacaaaacgagtccaatatcgaatatattcggacaccgtgacatttaaaatttctggacccacatgtcatatagatacgtctcgtatatattcagtaaaattatgctataaataatattctcatataaaattaaatgcccaataatttattatttcttctatgaatttttagcacaaaaattcatcaaacacctgcgccaccaccgccatcgtacactgccgcatgcgcccttggccccgtgcgtcgctgtgtcaccacccgccgcctgctcatgtgcgccgtcgcgtcgccatccaccgctgtgccgccagtcaccgtctgcgcccgtccgctgccagctgccgtgcgcagtggcgccgcgagcctccgccagccgctgcctgcgtccttgtggccaggcactaccacgtcgcgccggcaccgccgctgcgccgtggggattggggtacaagaggggagtggggaattaggttaggattttattagctgactatatatgttgtgtctctagttagtgggccaaatggtttaagagaaaagggtacgaggaacaagagatgagctaaaattagctaatacatatgtatcgaatcaggcatgggttacacttgagcaaaaaacaatacccggttgctgtctgtcacgttctcgggtatgcccacgggcaaaatataacacccatgcccatgctcatcaggccgggtaaattgccatccataggttccttatcttgtcaccgaattacaaaatcatctcttaaccaaaaaacggggtacatgtgatccctcaacttataaaactaggtcactctgggtccttattggtattgacctcagttttgtccgatgtggtggctgaatgaacgtgggaacccacgtgtcagggtgaccatgtcatcaccccccctctctctacctttcttctctcccttgctccactctctcgcttttctccttgtttcggcgggccagccagcggtgcgaggcgggaaagaagaaggtccggcagccgacaacgacgacggtgacgcaagagaagaggagccgaggcagggaagcacaacctggagctctaggtcgacgtgcttcttggcgttgagcatcgccgataggagctgctcgaaccggtccaggaacaccgcccactcctcacgcgctcaacaccttgaacgacatgctttttcgcacgacaccacatccggcggcaccttgatccgccatagagaagctccactcttggcgatgccattgccgcggaggaggaggaggtgcgatgggagcctagcagtggtgacggggacgtcgcccatgctgaactgggtactctcgtcgtcggagtcattgtagtggtgattcttgcgaggggatgtgccggcggcggtggtggaagaggactcgtaggcgttcttgtagagggacgcgagcgccctgagcccctcctccatcgccaagaactcgtgggtcatcatgtcactgatgtcggcgatggctgctccgagcatagcaacgtggcatcccgaaacgggtcgagcgccaccgacgtactgcagctcgacgccagagaatggcaacgacgactgcaggccgtgcagccgacgtgctacctccgcacctcgtgccggcctgctccgcgcctgcgctcaccgccaagaagcgcgtcggcctgaagcccaccaggccatgctctcctatctcggctcctcttctcccacgtcatcgtcgctgccgctggacctccttctctaccgccttttcccgccagcccgccggcccagacgaggagaaaaatgagagagtggaggaagggagaggagagggtagagataaagggggtgatgacttggtcatcctgacatgtggagcgcctatgtatgtcccacactgattcaggcaccacgtcagataaaaccggggtcaataccatctaaggatctagagtgacccggtttataaattgaggatgctatatatctgatttttcagtcgagagatgattttgtaattcggtgacaagatgagagacctattatgtacattttctagacaaagatccttctctccctccacttctctttccctctgggccaacccgagcccatcccttgcgctcggcccagatcccagccaggccgacgccctcccccttctctcttccctttctagctgcgccagcccaattaagagcacgttgcccgaccgggacgctgctggtatgcgaatcttgtgtctctgctaccagtgccctgcctcaagacctcgttactacgctcgccagttgcccagttcgtagaaactagaaagactttcttgcttgttaatgggtagagagggtagtcatcgtacatatggctatgttcactgcatgattggttgattgctagtaattgatttgtaggtcagtcctatgggaatatcactgagtactgagggtgtgtttagttcacgttaaaattggaagttttgttgaaattggaatgatataacggaaaagttgaaagtttatgtgtgtgttttgatgtgatggaaaagttgaaagtttgaagaaatagtttggaactaaacatggcctgagtagcaaaagctcatatttgtaccatatgactttcagtagaatcaatctgacttatcgttcatgtttttactgtatgacgttctaggatccttcgagtttctatttttctacgcaaataatttgatcttttctgcatgaatctgttgtcgcacagaacaactataatagtataattgagatacaatagagtgaaatatcacaaaatgaacaaggtaaactaagaaatcaaaaatcaactaatccatcagcatcgcaaagtatataggataataggatactgacatcagtggaaagcagaatgtatcagtttcagaaagacctgagttcctccgtgttcaggcttctgaatgctaaaccaatcttccttggccataccgtgctaaaaaatgattcacttggccataccaatttgcgccgtattacaccaatatcaagttatcaactatagttgtggtaaagaagagtaaaatgtcacaaaatgaacaaggtaaactacgaaaccaaagtcagctaatccatcagcgtcgctggggaatttgaatgacgcatgcagaattgagtccaccagtctagagtaaccgacataaacaacactttggatgtattcatagtttaataaattatctacgaactatatacataacatacatattgaacccttaaggtcagtttgtctagtaggaggttttgctgtctaaccgtgtaaacatcaggcctatgcgatgcagctaaactattatcaagctacaagtgatgatcctccagacttaaaagtgtacactgttctgtaactacatgacacatttggtacgacaatgcaacgaaacctcttctgcagtgaaaaaataatcacggggtcctgataattttaattgcttcccctccacttctcatgtcactcattaaagcaatttgatgcagaagttgggcaatcctctgcaaaaggcaaaacaaggatctaatgagagaacatcaatgcataaactgtcttgtgaatatttactgttgctcaatgcacgcctgaacataatactacgtagcttacatgacacaagactaacatctatatatatgagtacaaagatatactacttttctccaatttagacaagattttttgtgttttgaacataatttccccatgtaaaaacattgcctcataagacgatgactaaaaaattgttgagaactaatgcatattgtaataattagaaatgcaaaacactaaagggcaaagacaaattagagcaagaaactatccaatttatatttttagaattcaagtacaatgtgcagcatccaatttctttcactcaacctaatgcatgaaaagtataacaaattgatggattttcaattcaaggctacttgacaatggtacaccatcagtacctacactaacaaagagtagccaattaacattctccaacctcaagaaacagtatcagtatgtgaaaagaacatcaagaggatacaacatgttatggcgaaactatcaaaagacactaatttaaagaacatcaagaggatacgacaagtgaaaagaacatcattgatgggtttcctaacactctaatggtgaaactatcaaaagacactgctggtactactgctacagcatgacagcagtaaaacaaaacatttccataatatctcaaatcttctctatgatcaccacaaagagttataactcattcactgaactgtatactgaaattccagtgatacatgtaactaaacagaatagcaagtagcaactgtacaaatgttgccaattactgatcgtattccctaaaaagttgaaaccttaactataggaaaaccaaatatttaaccctgttctcattctgtatgttccgaatcaacctctgcgatgatagaacatgatactcgcttactgaaccgtatacccaaattccagtgatacaacatgtaactgtacaaattttgccaattacagatcgtattccctaaaaaatgatcatcttaacttcagaaaaaaaaatcaatttcttgatgaccacagtaacaagctcgaattatcacatcgttgtttaacttctaaagttccgatagatattgcgcacggatcatacttggaagatgtagttgaatatctacaagacatctaaaacccacatgttcctcgcctcatcacccaattctctagcgtaattgttcatgataccagaataccgacgatgaaattaaaccagaaaacctatagaattatatagagattcaaaccttatccttctcctgcgagagcagcacgagcaggtccctctccctcctgtcccgccggcgcgcgtagagcagcgctcccaccacaacggccgcgcccgccgccgaccacacggcgggcctcaccgcggggcacccgcacgtcccgtgcaccatcagcccctcccgcacggccccgaccccggccgcccacgctcgcctcgccgccgcgcggcacctcccccacccccacagccactccccatcaccaaattcatcatcatcatcatcatcatcctcctcgccgtcgtcttcctccccttccttcgccgcagcctcctccgcctccccctcgacgccgagcccctcgtggaggcgcggggggaagacgtcgcagtcgtcgaggccgccgtcgtccacggcggcagcgcccacggcgacgacggtggcggtgggcgtcacgagctcccaggcgtcggtgacggcggggccaggcggggaggaagacggcatcgagccgagggatgacgaggagagcgagagggtcagcgtcttgggcttgaggaggaggtgcgggttaggggaggggaggagcagcgggtggagcgccgagtacggcgatgccggcgcggagaacggcggggactgcggcgccgacggcggcggcggcagcgctggcctttgtccatggctgcggttgccgcggctcaccggcggattccgcttcgatttgcagatggtttgtttggatctggatgatctttcatgtggcgctcgagatcgatgacgactgctgctggttttcactccacctgtactgaatggtccgagttgaaaggacagcgatgtgtttaatcccaattcaattgaaatctctagcatgcattcaaatcttatacatatttcacacgaattgcagattattaagaaagaatttgataattttttgaataagacgagtgatcaaacgttgtaagaaaaacttaaaatcccttatattatgggacggagggagtattaatttggaatttcagattaatttggtttgtgtttacatttagtcgcgactaaaatcttttttttaagcgtgttttctcgatatcgatattttgagtctgtttgacacagctctagctccaccccttctggagtttccacctccacagctcaaccaaaactggatggaagtggagctgggtagaggaagtggaccctggatgaactggatggaagtggaccctggggtaccaaacaagccctttatttcaacaaatctactagtagtacaactttcaggttaaagtttgaatctaatttagttgaggtgggccatcaattttgcttataatcaaaatttaaacttgatttggttggggtgcgccaggcccgggcggtagtgcaacgcctgggcgacacgcgagggccccagtggcaagccactgtggtggaccctcccccacaaaaaataaatttaatatcgaagtgaacacatggcccacatatcagatattaaactgataagaacagatactacacttgatcttagccaaaaggccgagaaaggtatgctttgtgacggagccctgcgactcattttatagctcgcgcgaccgcctcatcgagctgaacaagcgaggtggtactaaaccatcgggaggagcaaagcaaacgtggcaacaacgctcgtactgtaagcagtttcccaccaattgggcctcgaaagtttccgtgtggcccatcgtccccggcgcggccgcggcccaactccttcgcgtggaggcggcgaccgcttcagcctcaaagtctcgaacccctccgccgccgccgcctggctgctcggccgctcctccgcttgctctcccttgcttccgagggctccgccgcacggggtcgtcgcggctagagggtgggctcgccgtcgaggaaggcgggggtgtctggctcatcgagaacagtgccgaggggaatccgggttgcgggggcgatggccatggccgcggcggaggcgcgggtgcggcaggagaaggtgaagaagttcgaggacttcgtcgaccggagactgaagccggaccttgtgaacaccatcgcgcagcgggacaaggtgttccagcagcagaagaccttgtaagattcgcttcccgtagaatcttgtatgtaaaacctcaatgattattgtgattccgggttaccgtgttgatgcgatgctgattattatggccgttgatttcggtttttggatggtctcagcttggacttgaaaaggaacatcgaaaatttggagaagaatggagtcaccagtatgcgatccatggtcaatcttggctctgaggtgtacgcccaggcagaagtgtaaaccctcgtcctccctttacatcttcagttctggataagactcaacgagttttgatataacttcactgatgaattgagtcaccatgtgttaacaatatacactgacgcggtatatcggaacagctggatactacattattcaagttaaattttctggaagtgcacatgcagttgatagaccattggcaatgggataatgtggtgtttctacatgactgtgtcgtttccatctaaatagtggaaatagggtgacaatcctggttggaaaaatagtattagcatatggaacatagtataacaaacttattgatttttatttttactggttattctgataaaaaaaatattcttggttattgacacactacataacaagtagacttggagtttgttcatgttgatatttcaaggtctttagcctagctctggagagtttggatagttacagaaaatcagtatgaagtgcagaaaaacttacccttctgtaacatgagtgatatatccgtgatatatcctctttattgttcttgatctttccagatttacctttggttccttactgtgtacctgtggtgacttctgcaggccagatacaagacacatttttgtggatattggtctaggtttccatgtggaatttacttggcaggaagctttgcagtttatatctgtaagagaatcaaggttggcaaggtaactcaattcttagaattggctatgaagatcatgtttttttttgtgtcaaagaagttgaggaataggaatcttgatggttgagggaagttttgatgtgctttatgcttcttttaacacagtatccacaattagcatatatttcatatgtcctgttttgttattgttgaaaaggtggtttgagttttttttcccctcataatgttatttatagttgaaaatgtgggttttgttttttcttcttctcaagagaggacatataaactcaggaacatattatattcttgagtaggttttttataaaaccctgggtatctatatgtatccttttggaggttgacgtttacccaggcatcaaggacgaaaggaatgtatttatttgacattttagtgtgctgatcctgggtgctattggtgtgcatcagatattctgcgcgcactctccaagtctccattgataagttcagaaaattttactaaaatgacctattttcactgtatcatttcttagcattctaaactgctactcttcacacttcactgattcagccaatagatacctactctgtattttcttagatgtgtcaattctcagatgagtttgttcctactgctgtttcaatgatgttatgctaacttggatccaattatgctactctggaagccttccttgtcaattgctgattttgcagtatactatgtttgaccgtagatatataggcctcttgtgtgtgtgtgtgtgtgcctgtgtgggtatataggtagacaggctgggtcttgctcatgtatagtggcaaccactgttgatgttgcatgctccctccgtccccaaaaaatccaacttctgcctatgtctaggttcgtagctagaagttgttgtttttttgacggaggtgtaggatatagttgactcagtctgcgctggatacttggatctaataatactgaagcatcaacatcaatatgatatgtattcaaagatcatagtcatagtgtgtactgtatagtggcaaactttttttgttgcctttatatcatctaatataccgaaccccatattttccgggacaaaaactattacagttgaagattagcagaccttagcaattaatcatattgctttgtgccttgctgctttgatgtgtcaacttcccgttcataaaacacaggttttcaatttgacagatactatgttacaggttttcaatttgacagatactatgttttgtttaggatcgactgcgatattgtcactgcagcatattgtcgttagtcccgatttcttttgaatgtgatctgggcttctttcctatttctctaattttcctttttgggtttcctgtggctacatttgtttgtatgtcaatatgttggtgctgtaattttcccttttatatttacgcttttgttttatttgatgcctgactccctgtagtaaaattcacatactaatcctgtatatttccatgtttgcagacagatagatgagtacactcatctcatcgcaagcataaaagcgcagatcaagttggtatgtaaaaaaactaaactagttgctcactatataggtgatacttggcagtactctggattatagctaacctatatgcaattacccgtgcaggtatgtgaaggtatccgcgaactactcgagctaccagcagagtaaaggtgaaagttggcaatgcaatcgtatgggggtgcttggtagaatgacttgtgcttttgcttttctcacgaaggcatggtcgcccatcttcgaacatgaaagattttacatgtactgttgtgcaaaagatggtttcatacactcatccctgtaataacattcatctaatcagattaactacagtagaatttcgctatgtgaaatcaacgcaaacactgtgaaaacttgttggttgatgcaacttctgatcttccctagattcccaagtcatagtgtacatggcatgccttggaagctcatggcatgttccattttgtcattagattagaacaatgaaaggaagttaggaacatgccattttgcatatagatgtgtcagtcaagacagcagagcaaggaaagtatatattgggctattggcacttcatctggtaaggcataaagcttttgcctttgccgcgaagctgccttattgtcttttccactttccacttgggcctttcaaggaatcaaacaaaacttgccaccttagcttttgttcccttggctccatcatacttaattttgctctcttacattatcaagtgattaggcccgaaggtttcgaagcttttgttccttcctgctcggccttgtttgaccctcttttctctgtattgatgcaactcaatatacctgggttactgtagttgttgtatacctcttccatcctaaaataaacaaacctcatacgtgatgtgacacatactaatattacgaatctggacatgtgtatgtctagattcgtagtaatagaatgtattacatcacgtataatgttggtttattttgggacggagagagtacagggaacacatagcaacaaggtttcagagttttttgtggagcaaaacaccgattgagatcctatgctcaaagtcaaatcactttgagtcactgaacatgtcagtgactctaaaaacacattacttaagttagaggataattcgtgaaacacgtactatcgtaataatttgatctgagccttgatcatgactcggacgattacgacataatgtgtcctaatgcaccttattggtatcctcctctacagtacagtttatacgcttagggcatgtataaaggtagagcttagaatggtctctttgttaatacatatcacttagagactattctcctacaatagttaagataacaaaaactcttaaccattaatgcaccaaaatattttttttagtaccattctttccttttctccacctccatgcaacaaaatttcctttaataaacgttaagagtcgactctgacccgttgtcatgcgtagcaaccatgtttccctttactccactctctctcttccacgtcatcaattttacttacatggaaacgaagagagaccgttattacacaccgttgtacatgcccttagggtgagtttgaggagaaggtgattgaggagaatacagtttatgcacttagggtgagtttgaggaaaaggtgattgaggagattgggaagtttatgcacttagggtgagtttgaggagaaggtgatcgaggagattgggaagatacgcaaaacgaggtgagccattagctcatgattaattgagtattaattattttaaattttaaaaatagattaatatgattttttaaagcaaattttctataggaaatttttgtaaaaaacacaccgtttagtagtttggaaagcgtgcgcgcggaaaatgagttgttatctccctcaatgttacccgaacgaacgtagccttagggtgtgtttgaggagaaggggattggggagattgggaagatacgtaaaacgagatgagtcattagcatatgattaattgagtattaactattttaaacttcaaaaatggattaatatgattttttaaagcaacttttttatagaaatttttttttgtaaaaaacacaccgtttattagtttgagaagcgtgcgtgcagaaaacgagatgcttttctccctcaatcccccagatcgcccaggaacgaacgaagccttagagtcgctgacatatatgctcatgagtttcccatgagaaagtggatcctacatgttaggcgtgatagtatgtcactgcgaaggatctcgtttcaacaaaattgagtttcgcttgtcctcctataatttgcattcgaaaatggtcttaatggtgatggatagtatttgtttcttcctactttgtcaaccaataaaccaaatggcaatagtacaaacatgaatcacaatctcacattgtcattagtaggttgacaaaacgaacatataactcattgtcaatgcactattatcaacttcaaatcttcaatggaaccaacgacaagaggaatttgcagaagcacaacccaagaaaaatcatatgcaagcgtgcccgtggaagcttcactgtgagttcccaactcccccatctcattttccgcgcgcacgcttttcaaacggctaaacggtgtgttttttttgtaaaaagtttatatacgaaagttgcttaaaaaaattatattgatccatttttgaaaaaaaaattagcaaataattaattaatcacgtgctaatggactgcttcgttttccgtaccggagggatgggtttccagggggccccacatgtcatcctaactgacataaactacctccacttggtgggacccgcatgtcatcctaacaaacctaaactacctcaacttggtgggccccaaatgtcagtaccacatgtgaactgtcggtagtcagaccctccccctcgcctcgcgagctcgcggcgtcgccgtctcccttcacaaaaaacccacctcgatctctgctccaagaaacttctcttcctcctcgacctcctcctcctcccacgccattgccgctctccaagatctcgcctctgctcactggaaccaactcggagggcggccacgggagcctcgcattgggcgacggggtttggtggagctcgagccgttgcgttgaatctgaccggggaggaacgtcgcgtttggcggcggaggcggcgagtccaa

SEQ ID NO: 8756 - DNA, 10361 bp, Oryza sativa
ttgaccgtcatgaggtactcgaacgaccgggacacgaccttcgacacgacgtcgtccgccgcgccgccgccggaggcggaggaggaggcggagcccgcgatcgcggcggcgcgcgccacggaccgccgcgccgccgcgagcgcgcggccgtgggcggtgaacgccgggtcatggaacggcgacctgggtgagtcacggtggatgaactccacgctgaatccgccgccgctcgccgcgcactcgcacagcctcccgccggcgacgaggaggacgacgccgaggagcacgagcacggaggaaggcgccatggccgccatcgtcgaacaccttcacacagaaactcactctctactcctcacgctgctaatggcgtattcatagggagattactcgtaacgtaaatggtaaatcacgagtgattaaggggggtgattaatgggatgatgagtatgaactggcataattacatactactaatcacctgtgcatgcatggaaacatgcaaaatgacgatacagatagctttggcagtggagattttgattggaaggagagatacgttttttaaatttttgcgcgttaaactgatcctttggttgagctaatttatatactacctattttggatttaagcattaaagaattcttttttgagtgtggatgatttcaatgtgtgtgtgtaaattcggtgattaattaatatccagcaatttttcctgtatagtcaattaatcatagcctattcggtttgatcaattgtgtctatccttccattatttgtttcccttagtgttcattacaggttgttttctcttgttctttttcttcttctctcttttttttttgaaatttcagtagaatttgcataatataagaggatttgattcctatcggcgacgggtcgaggatgtgagtaaagtcctttcaggatttcagcctggcccatttctaaacagcacaaaggctgcagatcttgcgtaccattcgcctaagtccagtttagtcccgaaaagcccagttcagtgggccggaggcccgtagataggatcatgagaggagtttctttttctttttttttctgagaatataagaggagtaaattcatgttgggcctagaatagcataatgaccaattgatggacctctacctgtcatttcatcacaactatgatttttcttttttcagaaacaggaaaaaagctgaacagtaaggaagtttcgtattttccctacagaaatactaatttgacatcattttgtctttttagtagtacgcaattttttaacatatatcccttccgtcttagaaaaaaaagatcaatcctagttatgaacctgtacatacgtatccaggttcatagctagaattgggttttttatgggacagagtagtagttagtaggaataaatttcaatttttttgattcaaatttccacacatggtgttatctgggcagtatcttggatggttctgcaggaggtgagacaacattgcacagtgtcaaacaagcttagacgtcttctattattatgtaatatttttgtaagatatggttagtatgaataatagtcaaatttgtttcatacaaattctcacatgatgttatttgcgcaatttcttggatggttccatgcagcagcatggcacacaggcgcagtgtcaatagacaagattagacaactagtgagatttcagaggcaacaccaattgaacaaccctatttgtaaccatacaacctctctaattaatagtctaattagtcagtggtgttacttgcaaatgatgcaaagtggcatctgatgcccctcacttggcagacaaagtgtaggttgactgaccaaacaaagccctgaattacctcgtcttcacagacaagtcattaccaaagagaaaaggtccatcttttcacaggaattcagaaaagaaggaagtaccagtactatatatcactgcactaagcaaaaacaatttgactattagcaaaaagcatccacagcttgaagaaagcaagtactagtagtagcaagaagattctaattgacctactgtttgtgcaaatggcctacttaatggttcaattaagtaggcacaactaggtactcctaggtgagtatgctgtttgtgacaaaatgaataaatagagagatgtgacaaaatgagtagagatgattcttttcagatagtagtgtcatttgtttagcacaaactcatgtttgtacaaatgatgggactactaaattccatgaccaaagtgatgagtaagggtcctatactaatgtaattccttgtcttgaataactgtattaacagtattcttctccttctgaatactgaacctgaacatgcaacatgcagagcagagacatggaagattcaggatcaaactggatactgcagatcgggggcagtacacgcttttaaagtagtaggaaatctggaaccacgaggatttgattctgagtagaatatgatcagtactatacttagcaactgaatttggattaggttaatcgttcatgtgtgattaactaaaggggagagggattttgtcaagtcagaagggcgtgcaacctgtttgatactgtgatccctgaagatctctggtgttggtctggtcgagcagagcattttggatacgcaagtgcagtgcaggtcgtcgatcggtcgctggccgccctctctgaatgatcctgtcgagagatcccaaacaggacaagaccagaccatcaattcacaaaagaacgaagttttgcagaatattattccgtccgttttcaaataaccgataattttaactttgctatctaaactttaaccactagctattattggatggttagactaaggccgagtttagttccaaactattttttcaaacttccaactttccatcacatcaaaacttctacacacacaaacttttaattttttcgtcacatcattctaatttcaactaaatttccaattttagtgtgaactaaacacaccatggaagcgaacaatgtaaaatttttgggaaaaaaaagacgagccattgaagcatgaaagtaaatagtgtcagctgctggttattttaaaaagcagggagtagctttgaagagcaaacgaattttacacaaaagttcagatttttttaaagagaaatttgtgttgttttttggggtgaaaagcgaggaaagtcaagagaggggacaagcaaccgacaggggggcacaatcacatgtccccgctttatgctactcgtacctcattggctgttcactgatgctgcctccgtgcccacccaaccatttcactttcacccctctcaaatccaatcccaattcgattccaattcaattcaattctggaggctatttactcgtaaccgtgtgactcactccatctaccacagagtgtctttagttcacgtcaaaaatagaagtttggttgaaattggaacgatgtgacgtaaaagttggaagtttacgtgtgtaggaaagttctaatgtgatataaaagttgaaagtttgaagaaaaatttggaaactaaactaggccacagtctactacgatgctactggaagacaacttgtttatttgatgagtaaatttaataaaaaaccatgttttgagacactcataatggagaatccaaaacttttttatagtttatttcataaaatcttagattttagggtgaaatattttacgaaaactcatggtacatgcttatgacatccatttaactaatatatacatatataattgtgagaaaattgtatgagatattttctaagttatgtagtagtagatgaaagttccttttttttaaaaaaaatgtatttttaaaatcatgaagcaaataattcgtggtaaaaaataggacaaagtacgaaaagaacatggccatcttgagttttcttctttgacttctctatttcttacattctaaaattccaatttagagtgacaacttaagacatacaaatactgaagttgtctactgtacgtgtgagttcttacgtcaactacagtaaatacatacaacatgtacagtacccattatatgtttattattttaaaaatgaaaactaacatttttttatgtttaataaactcatatcgttgtcttgatttttcttctctctatcttgctgtgcacgagtgcctgttttattattattaactgacgaacggattctttctcatccaccgtacgaaaaaggaaaaactacgggaaaggcaccgtggccgtcggatcgggatcgtgcggcgatgagggtggcgtagcgtggagccggtcgctgcagggcgcccaaccgacagcccgggcccactgccgggagcgacccgcgcgaaatgctcggccactatttccttgtttattccgttttgggaaaacacacaacactaaattaatttcccccctttttgcacttaactcctacctttcctatcttttcatctctaactgcatttttccactaacttcagtttatttgatttttatgaaagtttggtgatttgaaaaccatcttttatgcactggttagattacttgttgtaaactatttgtaaaaattattttctgaaatatttttatttttataattaaatacatattcctaaaaaataacgtaatgattaataatctacgtctctctattccgtattttatattataactcgcattgatttttttattagttaaatttctttagatttaattaagtatataaaaaaaagtttgcaacagttagcaacaccaacaataccaaattagttccagtaaatttaacattgaacgtattttaataacatcttttttttgttttaacaatattactagcattgattttttttattagttaaatttctttagatttaatcaagtatgtaaaaaagtttgcaacagttggcaacaccagcaatacaaaattagttgcactaaatttaacattgaacgtattttaataatatgtttgttttgtgttaacaatattactatatttttctacaatctcgatcaaactgtttttttatataaaaatgattaggaaaataccaaaacaaccaatcaaacggggaaagtaaaatgtaatttgacatgaggtcaggtgctaatgtgtaaaatggcagtcccgggtcactgaccgttttgaccaccggtgacctcccagctataaccaacccaacctcttcccttctcccattttgctttgctttctttgctttcctctcctctctcgccgcccacctcgccgtcgccgccgccgcgagggccaacgccggcgaagtccgcgagccgaagcatcacacagctgcgccagcgatgtcggtggagacggagcggagctccacggagtcgtccgccgcgtcggggctcgacttcgaggacaccgccctcaccctccgcctcccgggctccctcgccgccgccgccgcacctgaccccgaccgcaagcgctcctccccctcctcctccgacgccgccgacgccgcagacaactcctcccccctcgccgccgccgccgatgctccccctgctcccaagtatatacaatacactgcctcttctcttgtgttcttgcgcgcgagaggtttgattgggtggtgtttggattgattggtgaggttgtggtttgtcagggcgagggtggtggggtggccgccggtgaggtcgttcaggaagaacgcgctggcggccaagttcgtgaaggtggccgtggacggcgcgccgtacctgcgcaaggtggacctcgaggcctactccggctacgaccagctcctccgcgcgctccaggacaagttcttctcccacttcaccatccgtaagctcttcttcttcatcatctctcgatccatctgattctgttggttgttcgagcaattgacgggaggaaagttgcagggaagttcgccgacgacgagaggaagctggtggacgcggtgaacgggacggagtacgtgccgacgtacgaggacaaggacggcgactggatgctcgtcggcgacgtcccctggaagtgagcctcttctttgatttcttgccaaccttttccttttccccttgattcattcatcacttggttgtgaaattcgtgttccagtgccagatcttagtatgattcttgatggttttccatagtggataatttgttggtctggttcttggaccgaccaggttagaatgtcttggctctgattcgttcgagaaattcagagtacttcatttgttgatttggagctatacataactgtagaggctttggtactattgctaaaagtggtattttgtgctgatagagatctgaaatgaatttggtatatagatgcatgatgctttacgttttgggtaggaagcagatatggtttgctttgcttgtggttttagtctaaaaatgggtgctttttatatgttgtgtggtctcatggatatgctcttagttgttgacataatccaatgcaagttcatgaatgcatttcaaagatttggagttgcttatgtggctctggtctgtgttgatctgaagaaaggggggttagttagggatctgaacaaataatgcattactaacaacaaatcataccctgattccatagatagtgaaaccccttccctttcagtcttgaggttaggttacattggaaatgcagattggattctactagtggccaataataggaagttctgtttggttcttgttgcactacgtcttgcgttactgttgcttccttagcagattaagcaactttgatgtatcacttccaaataaataaattgatgtgcaatctctctcctcctcagagcaactagcctatgaggcctctgtacaataaaaagaagaaccccactttgttaggatagactactttggataagcttgcctttctagttttgttctccactacctggaacacactgttcattgacctatgggctgtgctatgaggcgtcgatccttcttgatccttctagctaaatttcgtttgattaatttttgagattgtttttgtcctacttattatgtttctttatcttactttttggtgaactgcaacagttctcatgaaacagtaaatggcacaaatgctctctttttatcttcagcagtttctgaccttaatggttgtgcaggatgtttgtggaaacttgccagcgccttcgtctcatgaaaagctcagaggctgtcaacttaggtacatgtttgcttagttgttttaaattcacctgcctacgcaagagctgtttttactctcttttgtacctgcgtcctcagccgtcttgttctaatcggtttgttctctcccttgcagcaccaagagccgctcaatgaggcattcccggtgcccatgaccgtgtggttggattgaaagaaagtggaagctttgccccgccgatgttcgcccacgtgtgatatgaacatgtacagttgtctcctactacttttggttccttgatgatgctgagttgagaaaaaggttgtagtttcgttactcgtctgtagtctctccatatatagataatgaagcactgaagcttgaaatatacacctacagtttgtctctttatgaataagaccatatacgcaaaaaaaccgatgttctttgctgcggctcgcgtgtcgtcaggctatatgcagttttttgtcgcaccataggcgatggacatctctggccttatactttcgtaaaaatcttatcatgttaagcgatggtcttgctttggagttcatagttctgtgctctatgatgtgcaatcagcttggtgttcatctatatataatcttttgctgctgtattctggttattgtactaagttgtaactgacgaaatgatctcttggatgttagtgtcttcgctgattgatatgagctcgtatctattgctgctgcattctggtttctgtaacgaacaaaatagtttgttggtgaggctgaaaaacgttattggaatgttcagtgttttactctgaatcatatgtgaacatatcagatgtgttagtctgaaaaaagagcaataattgttcagttgaaaaaggatgatggattcatggatgagcttaccctaccccgggccatgttcttccatggacgctttggacagaaaagaagaacagataagatcagatcatcgaacgacaggtcaccgtcgtcgttaaggacggcggcgaggtcgctgtcaaaactcgcctgctttttccacaagatgggccatggcgtgacctcaccggccggagatggtcgccggcggcggcgacggatcgacgactacggttgctcaattttctttgctattttttgtgcatgggtgagaagaaaacgacctctctgatccatgtcggcctatactgcggcggcaaccgtcgtttcttcatttgttttctgcttcgagaaagcgatgctacatggacttgtggtggtataaaattagaaattataaatctgatcttaattatttaagttgttgcgagagggcatatatacacctgcatagcacttcaagatttcgagtttaaatcttatatcttgatggatatggagaatttcaaattgagttatttgagagagtaagttaccactttaaatggctgtatatattcaattcgatgtagaggataggtaaaaaataccattgtttataaaaaataaaaaagttatgagttgttaactgcaggctccgttatttggaacttggtcctgaacattagtctctttgataaacatagtatttgacgtttaggataaaattcggacacttttacaatccaaccatcattaattccttatattttagttttttaaaaaatattatgcggagaactgttttgaaaagcactctcgtaatgtcataaacttattaatattcgtacaatccttttagtataaaattgattgttagaaatcttaaagtttgactaaatattactctaaacatcaaatttttatgactaatgctgaatcttttttattgcgtgatactcaatggtttaaaagttctgtatcttttcaccttggggcgaagaaaagtttggaggacttcatgcttactcaagctacagtttattagaggagatgattagggatttggaatgtccatggtcaaacatacccatcatttgattagagagaaaacaatgaacgaattgaccacaatttctcatcaagtggatatttcatatttgcgcggaggaaaaaacatgatctaactattttacgtggagcaccatctatgataggttaattgtttctctatctggattctatggcaacgctacataccctctgtttccctccacaaataatgtccttcaaatttaccatcagaatctactgctctctctgtttaaaaaagaaaccaatttagatgggatgtgattctacccaaaactttttatccagattcgttattttatgtagagtcatactccttccagcctaaaaaaaaactaatctagttgggggatgtgatccttaataggagaatgaatcttgactatcttaggttgagtttttttttgaaacggaggaagtacacatctatgggtgtgtttagttcacgccaaaattgaaagtttgattgaaattgaaacgatgtgacggaaaagttgaaagtttatgtgtgtaggaaagttgatgttataaaaaagttagaagtttgaagaaaaagtttggaactaaacacggcctatattattttttctaataccgagggattacaatgcagcaacgaatttaaaaacacgaattaaactacacgaaacggaaatgacacgacatttctcgaccgttacacccgatttcccaattatcccctcccaaaacggaagcaataaaaaaaaagaaagagagagaaaaaaaagccgtaacatccaacggctacgattccccggtccccatgatcggacggccgagatgatccggcgcgcaacgcgcatgcgcgttgccagtgaccaccaccccccgtcctctccaaaacgccaaaaatttttcccccactgctccccactgctttcccctcctcctccccgcgagatcccatccatggtggccgcctcccgcccccggatctggccctgacgaggccgccattgccggatatttttggccctcctgccatttcctgaggtgtcctgtcgtttcccctttttcttttttcttttttggcccatttcttgtgaggtgctttctttgggttgggttcttgatccgtcgcatttcgcgcctggcactcggcgatccgttcttgcgatcccccgcacgttgcaagcgcggatttgttgtttttattattatttttttttgttgtgatttgcggcgtcgtgttcttggtgctggctggcaatggtggtttgatttggggggggggggggggggtg

SEQ ID NO: 8757 - DNA, 53877 bp, Oryza sativa
attcctgcagcccgaatgaagagctagttcgtcgaatcttctatcccccggatgctgaggaaattttgaggatccaattgccacatagccctgaagaggactcattgcttggcactatgataaggtgggtatgttcactgttttttctgcttacaaattagccctacaggcccagatcagagctgacgaagaggttgcacaatgctcaaatggcgatggtgataggaagttgtggaagaacatttggaatgtgcaagtgccgcagaaaataaggatttttgcctggagagtatcaagagattgtctagccacacaacataataaacatcgacgacagattgtacaaaagccaaactgtgagatatgtggggcagaagtggaagatgcgtttcatgctacggttgcatgcacgaaagcagctgcgctgagggcagagatgcggcagaatcggtggctaccgggggaacaggagttctctcagttaggacctgactggctgctacatcttataaaccgtgccgacgatcagacgagggcgttaatattcctgctgttatggtgagcctggtttttacgaaacaatatagtgcataatgacggccatgcttcagtcactagttctgtggtgtttcttcggagttatgctgaatcattgtttctcaaccggcaaccaagagctgacagaaaagggaaggctttgtgtcgccctgaacaggggaaggagtcaggtccaactcgggcctttccatagcaacgtgtttgttggcttatgtctgtgaatggctgggctaaaatcaatgtcgatggagctttcaatcctgaaaatggtaatggggcacttggacttgtaatcaggaattcgaggggcgaagttctgttgtcttcttggaagtttctcaggcgatgtgtgtcagcggaggaagcagagctgcttgcgtgctatgaagggctgaagctagctgctgaatggattcccatgccagttatgcttgaatatgactgtgccacagcgattgcgaggttgttgtccactactgaagagagatcaagatggtcttttctgctgcgagcagcaagatcagttatagggttaattaaggaagtgcgtttgatgcactgtaatagagagtgtaatagggtcgcacatgaacttgctcagattgctatccgttcggggcaaagcgcggtttggcgtaataatgcaccgaattgtgttatgcaatgtctgcagcatgactgtaatcctgttacgtaatcaataaagctctctattcccgcaaaaaaaaaagtagtaacaaataattggggttaatgatgagcagagcgatccatggttggatcgatcgagctacctaagctatcatctgcattacggcagctagcccgatcgatcgatctatctagttgggggcagatgatgacaagagatgctagccagctgcagactgctgctgctaatctcgtctcttctgatatcgatcacccacagaaaaggggagaaaaaactcagatcgggacagacagcccaaggaaaacaaaagacgaacacgcagagtactctggtgataatcagccacttgatcattaatttcttcgtgaccgttggcgtagccctgcctcaaatcaaatcgatatatatatattcttcgatctatctactctctctaggcttctcgaatctcgaaggacgatgatttgtactccctccatcccaatataaatgtaaagcagatataaccagcttatacaaaccaaaactacctgttcggattcgcactattagagtgcgttaagttgttgaatgtcagtgttacaatgagcaaagcaatagtccagtattacactttgttgtaatatgacgaattgagagccaatttggattgctaccctaccaaaatttactctaccaaaacactggtagggtagcaaactaaacacctatattaaaacattacctttgtcataaatttggctttgcccataaacttataccttatgggtatattttggcttcaatcaaaatcaacattttcaactctaccctaccaaagttttggcggcatgtctaagatttagcactatcaaaattttgatagggtatcaatccaaacatgcccttgtactatataattagctttggccggtcggccgacagaataattaaccttggcggtttttagattatacttggtggttttcgaccgccaaggacatgccgttttcttgtagcgtattgactctcagaatatatctaacaaaactgccgttcgtgcacatgtatttaattacgttgtaaattgacaatccattctctcttctctctaatcgtaaactaaaaacatgtgtgttaattagactatgattttaaaaaacaactcaatacttagaaaattattttcacagctccctttatttttacaaatgggctaaaagaagattcacttgtgaaaatatataggactctcacagtcaacaccgggccggcgctgtattttagacgaccaagacgcaccaacacatacgttatattaaaataaaggagcacgaacaccaacaacaccttgcttctcacattttccttaaactctccacacttccctctcctcttcgttttttctttccacagcacagaggacactgccttggctcctccttcccctcttgtagatggcggccggcctcaagagcaacgacgaaaatgacaacaaccttaggagcggcggcggccttgggagcgcgcgatggatccatcgccactggcctcggttggggcagatccccagcgtgcatgggagcgacgttgatgatgaccgcgctagccttgggagaggcatatccaacgacgggagtccagggatggcatcaacaaagtcggtggcggccattatggggatggttgcggcgatgatgacgaattgcaatggcggcgatttcgattggggattggggctatggtttctgtaactttttggattttttatatttttcgccaaaaaactttttgtagtcagggttgaaaatccgttccgtcatacggttatgatgcccgcaatagaaaatcttgacttttgcataaattgtcttaggtgggtgctccatctatctaggaaaggtggttttggtcggctgaaaaaggccggtctgtagtggggatttactgttagtttctatcagtatatttcagatacccctcaatattacaattaatactgggaaagcagaggcacttttcgcagcaaatatcaacatatacatgtgtcgacgtttgatgtcgcgattccggtatttgcatagtatgagaatcgttggtactagaatatatgcgagattgtaataaaagagatgtggacgaggatttttatacaggtttgggccccctgaattgtcaggtaataaccctactcctgttggccgaagccggtcgttactcttattcaccataatcacaccagcataatatttagggtaacctatctaactgttgtcgacttgacggtctgaagtgttgactcgtagtcgacaacagggtagccttcctcctcaaatccgtatccggcgagattaaagacagcgttatgtctctcctgagagtatccgtagacatcgtaggggactaaccatgcttatctctgaagttgatatccgacgtcttgtcttggcacatgttggcttgtatgttgatcttgtgtcttgatctattgttccgtgtcccctctctcctaggggccttgtatttatacccataggtgtccccttgtccaagtagaactaggaaaaccattatggataaatccgagtagttcttgtcgtttccatgtagaactctattcatccttcattatgcataactcctcgtatatccgaaggttgtttccgtataagacatggtatgtggtgggtcctaccgagatttagtcaactactattaggtatgtgatattcataaccctaacaacatgtgtgcactgtgcaagtgcaccagacattgacacaaaacaattcgtcgatagacaagaaaattcacacgcagagacatgcacacaccacatgctctttcttcgaaggaaagaaatacacatgactcgatctgcaggtgctgccaaggcatcacacgcaagcagagacgcaccacatacgtacatctaaggtgcttacttccaagatgcgtgaaaaggcatctctctctcaatgtggtcttcaagaaaaaaacaaaccaaggtaatatttctctcggatttttacaggtatattatgcgtgtatattaccgaattgtcgttagttcactacacgagaaagtgactgaattgtcctaagtaatataaaatatgtaggaaacgaggaaagatgagagtgtgtggctagaaattaataaactgaaacatgatatatactgtttatcatgttacatattattaaagttttaatttgagtcacccttaaaccaatctttctattttgtatcagattgttatttttttatttttgagtttcttaaaattttaaatttaaaaataaacatttccaaaattattttcaagatccgaatcttctggtcaagctaaccaagctggcatggcgaaacaatattgtcacacggtctaaatgacgtagcaacgttatttggtcacgccgatatagctagtgtggcaacattatttggccatgtcattatggctggtgtggtaggataaaagtcacacctaggtagcatgacgaaaattgttattttactgggtcaggcgagctgtcatgaccaaaaggttccgattttagaaaattaaaatatgaagggttatttatttttaaaataaaattttaaaaggttcaaaaataataataaaaaaaatattattttaccctttcttcagtttggataatccaactctcttttctactcatatctagcctccagtctagcaaagatatggcttgcatatggataggagagtttggcgaccggtttgccagaaccaatttgattgaggtcgttgatgtgtaatgaagaagttgtttgggggtggttaaactataaaagcgataaaattcaatggtccaaagtaaaaagattggtttactggtgattcaaagaaaaactataataataaaatatagcctaaatttcaatacactatttttttatgaaggaagtagcagtatggtagcatggaaatgaaacgatggactaataaaccgagccatcatcatgtctagctactactggctactgatctcaaacggattcgtccacatcttgtctatgactttcaatgcaaatgatgctcagacagattatgatattatcctaacaacttttatccttcctaagcgatcgatcgacgattaatttcacatatcgtatttaggctaagatttgtcaattgaatcatgttccattttccggtgctttgtggtagcacaaaaggaaacaaaaggacattgctcatgggaccccatgctgaatgaaggagccacacaagggataagagtgatagatccagcttataccaacatgaaacactgtgtttggcttatgtggatgaatcagtggacactatctagtgtatggagaggatccacaaatggggtacttggcaaattgagcatggtgtttgcccccctggttcaatggacttgattgcgattgatgatgattttaattaattgctaatatatactaattagacatgtttcttaatttccccttgaaaaagatgaacatgcatgacatctataatacaggttattatcatggacagtccacttttaaacttttcattgggactctagatatatattacttactctatctctaaaataccttatatttagaggatgtttagatctagggtgtaaaattttgacgtgtcacattggatattatatagggtgtcgcatggagtgtttgggcattaataaaaaaactaattatagaatccatcagtaaactgtgagacgaatttattaagcctaattaatccgtcattagcaaatggttactgtagcaccacattatcaaatcatggagcaattaggcttaaaagattcgcttcgcaaattagtcgcaatctgtgtaattagttattttttagcctatatttaatactttatgcaggtgttcaaacgttcgatgtgacagggtgtaaattttttggcagggatctaaacaggcccttagtcaatctcagatatattaataaggatgtgaaaaaatgaatacgcctttcattaactgtatgcttctcctaagctttgatgctcgactaaggctgtgttcgttaccggggttgggaacccatctcctccgcacgaaaaacggagcggtccaatagcacgtgattaattaagtattagctatttttttaaaaaaatagattaatttgattattaagcaactttttatatagaaactttttacaaaaaccgtaccgtttaacaatttgaaaagcatacctacggaaaacgagatgaaagggttcggaacaggctgaaacgaacgcaacctttaactcttcacatggccaagctctaattaatgatatttgcaacttactattggaggtggggacgacggtaatcaagggagataaaaacgaggataataaagtgggccaatcgacacacgcctaaaaataaggtcttttagggtgaagcgaatagatagtaggttgtcataagaaatttaatatgaattactagtgcatgttttaagaccataaaagttgtacgaaaatactagcaaatgacttacagtacatttgcaatcaaagtaaatattcattctgtttcaatttacttgtcgtattagataatttcacactaaactaggtggtgtggaaggggctaccctcattaattacatgctaaccatcgtacgtcttctcaaagccagcaataaaattagaaaatgctacacgtacgtccgaaatgtccgactcctgtacgactgcaacgtccgtccatggcttgatccccgcgctgtttaatcctccaactcattgagcctcacgccgttgtgcatttgctgttttgacgtttagtcgtacgtcggtgggacaagaaagtcggatgtatagcagtctctccaagttaaaatttagaaattttagcaaaaaaatctcattccaacagcctctctacttgaatggctaaactagatggatggccaaacttcacctcccactagccaaacttggccagccaaactgactggccaattgtgggccccacgcctttccccccactctatcgatctatccccgtccctctccgcattgctcgtctctgcccgtcatgccaggttgcgaggagggaagagggcgcgtcggtagggcaacacgactatgagcgtcgcctcggcctctggctcgccgttgtcacgacgacgagcgtcgcctccggcctctagcggaattttctccgccacgagatccgcacgtggctgtgcagaggaaaaacccagggaaaagggcgacgacagggcggcacaacggcaagcctcgccgtcggcctccagcgccgatttctgccgccttgccactgtcctctggagcttcggagagagaagaagggatgaagggcagcgacaccactcgtttgcgggtgagagggcacgatggcgagggatggagggcgcggtggtgagggaggagcgaggtaggccagcgaggagctgatccgcgcactgcagcccaccggctcggcgccttctccgctcgccgctcgctgctttcccctggcccacctcccatgcccgccgttgccttgcgtgcccacgagtcaccaccgctgtccgtcgtcgcctcgcgtggcccgcctcccgcgagttgtcgcaccgcatccgaggtagaggggaggaagaaccgaaaaagggagatgtatggggggaatggggtggaagaagtgtagtagaggttgacatatgggtcccatttgtcatagacttataatggagatagtagatggagaggctgttggagtaaacaacgagtttgacttgctaaattagatggagagtttgccaaatagacatttagagagtcagatttggagagactgttggagatgctctaaggagtactagtactagtattactgcattggtgaagggaaggacatctctaaaaatatttttgtatgtctcagaacgacaagtattttactaaaaaaaagctagaatgacaagttaattgaaacggagggagtaacgaatatgaattggcaaaattaaatcttgtgtgcacctacagtatattttgaactatacagtaacattttgtattaccaaatgtccatgtccaagtacctttgactaatctctcctacagatgcaaaaggaggtcaaggaaatgaagaaacttctgcatcgacgatcatgataaccggcatattttcataaagatattctaactgctttctttcacaacgatcacttcacaatttcaaccaacagtcctgtctttgatcgatggtgcttgagaaactacaaagccggtctcctcttttttgtttacctaagggatctatctatcctagctatccaaaaagctaattagctagtgtatgttgtacatgtgccatgtcctacacatgaacggttttaatttagtacccaaacaattaggtttccccagtgctgaattaaattcttgtatagcaatagcattgttcatacatgctgcacatatatatgcatctccactgagctatcagtgctggtcgtcttgtcaactaagatacactacactccatccattcccctattctcctttgtggctaccaaccagcaccctcacagcctcaccaaaggacatcacattacacccctcaacacccaccaccctcacacaacatgttgtcctaatgtttcctagtgttgacaccctaagtgtgtgcaggtgcatcagtatgtacacaaaaaatgcttccattggtgggagtttgtcccatggaccatgatttttgtaccattccgtatagatgcggccaatcccatatatatacacatgcatgcatcatgtgtgtgataagcattttcattttatcatcgagttgcatgcaccgaccggttggattacttgatcgcgttgctagatggcaatatatgcatgccatatgtgtaatggtggagccagcggtattatcgagcatggatagttaatagtattttttgacaaccagctagtttttacgggcatcgatggtaattgtagtggtaacagtagagcttgggtggacatccgacatgccaagaactgccttctgcgccattgcatatgtttatgttgacgtgtacgcgcctcctcggttgttcatactttcgattgactatgcttttgcactgtaattttaggtaggtgttaccccacatcatgtgacattcacatggtagacaagagtctcctaacttcaattcatcttgtcatatttggccagccctggcctgacaatgtccctagacaatatgtgttgggggtttggaataaatgccgacatggtgagcctccatttagaactcatttggttaatttgtgtactatttatatagcaatgtgttttagttttcttttatttgatagtaaaactacacatacttcctctattccaaaaaaaataaagaatatgatacattacagtacaacaaatttataaaaaaaacttgtacaaattcattgcattaaaataggtcgcatcatatcatattctagtcttagttttttttccttatacaaggagtatatagctgggtcgatctgactaagggggtgtttggaagagaggggcccctaactgtgccctgccatatggttctccataaatgcctgctgtagcatccatgattgaaccatgtgtaacaaaagatggagcaggctagccaatcaaacaaaggaatccaggaggatatatgctactgacatgctagctcatcacacactgctctgctatgggtacccccccaccccccaacacacacacaaaatcgacgagggttatctatagtactgcacagttgtatcattaatatgtgggactatagatctacctgctcgccgcttccacaacaggggcggtactgtagaggatccgtgtcagagaaaaaaaaactttcatattttcctctctaaattaatttgagaataaaaatgttatacagggcctgtcgtttataggttttctttttatgcatccagaaaaaccccatgtcggtcatagtatatctgtatatgttactaagtaattgactggtatttttagcggaatgtgacatgaattggattagcttgacaaggagatcgtgccggaggaaaaggacaaatgatatttcatgatagaagatgctctacatatctatcgaaattatgcatttggtggctagctagctaggtccccttacgttctaaaaggtcatttttactcgttttccttttcctttaagttgcgtttctttcttgacctgaaaattatcagcagagatagcccaatgcaggaattttgcctgattattgtgaggaatgaattatttcctatgaaatttcttcaaaaattctgaatacgtgatatatatattataaatttatataccaaatgagtcaaaataaaagaaatgaaactgttttcgttatatgtagtaccggatcaaacaggactatactacgtaccctgcatcacttatataaagttgctactccgtactaggcttcgaaccaatcatgtgtggccgaaaaccgtcaaaattaatactacctccattcaaaaaaaatattttttacctatctcacacataccaatataaaaaaaatagaatacccctactttatcaaatcctaatgcaattattcctcattttatctactcccgatacaattattcattacttttataaactatgatatgtaatggttattttaaaaatacttattttctgacaaatgaaataagccaaaaataaacttattgcggacggagggagtagctccgaaatctggtagtgagtagagcttactaggacatgtatgtgcgattcaaattgggccaagctatcttaggctaggcttgtcatgctgcatatatatgcatgacgattcaagcatgtttttgcattgcacaatatatgttggtgtgctatagctaatagtgtcatatactacctccatattttaatgtataacgccgttgactttttgatcaacgtttgaccattcgtcttatttaaaaaaattatgtaattattatttattttattatgacttgattcgtcatcaaatgttctttgagcatgatataaatattttcatatttgcacaaaaattttaaatgaaacgaatggtcaaacgttgatcgaaaagtcaacggcgtcatacattatggtgggagtatatacgtgcatgcagctaccggtgacctttcagtgattcatctagtcaccctatatacagtacacaggccggcagctagcatgcatggatgaaggagcatgcagctatagcctagccaagccaaagttgattgatcgatatgacccaatcccaaagtgtgtatgtatatcttgtttgcatttgcattgcaattttgcatggatggatatatcgatgtcatatatattgtatgatcgatctagagctatatctatatatctatcttaccctagaatcatatcctgttgtgccctgcatttgctacttgcatatcctgtttgtgctcgagaaggaacaagctatgtcgatcggtatatgtgtgtatatgtgcccatctatcagttatatccattgtacctccatgctgttgtggtcgacaatgattgacatatatcttgtgcacaatcgctcggtttgcgcgagatatacatgcactacttttacaggccatcccttttctctctcgatgtgtggatcgaattgatatatgatagtataacatatagtacctcctccgatcacaaataagtgacgttatagatgagaggcggtcagcgatacagttgtttgattattactccttccgtttcgcagctactctcttcgtctcaataaattaaacatttgtcataatactaggatacaacttttttttacagagagagtaattcatttctgacaattctcaggacaaataatagtgggagaaatggctatggtgtcccgtgtccatcattagtacagtattttctagaggctccattcaaatgcacgtggagagagtaattaatactacggtatactccctccatctacttttgatagtcatatttcatcttggtacaatgaccaaggataagtgattctacttatcatccatttaagctattcctcgtaaacaaacgatttattaatatttacatttctcgatgtctatatagccaatcttgtgtggaagaatagagagtcacgcattaaattcgagaaagtcattaagaggatatgtggttggattgaaatatgcctatcagatttggaaatatacttatcaaaagtagacggagggagtaacacttatgaaaaatgtggaaaagttataattatttgaaactatttttaaagtcaactctagcaacaacatttttaaattaagttaaactcgaagtgttcaaagagatattaatggtcaaaacttaaacgagttgactgcacgcattaatataaaatatcacttatttaataagtgaatggaaggagtacatgttattgaagtttttcaaattttctcttaactatttagataacatacaagaaagtggacgcatgtccttatataagccttaaacctcacttttgtaccataacaaataaatatatatataaccatgaattggtggcagactgatactgtgacagtgacttattatgttgcatgtcaactcaccaggtaggtttgaagtgtttgcagtaggcctctaaatgttctttgactaaaagaacaaataaagctgaagtcctacgatttttctcagaaaacatctcacattccagccgacaaggtcatgttattcctagatcctccactgcttgtgaagtggcctaggataagctttgtcatacaatctgaagggatcctaatggcagcattaagcaccgatgaaattgatgaaaaagggagctatatattgctataataatataatattagtcaatgagaattgtttatatatatgtagatatcagacaggccacgtacaccttgcattggccacattgtgttgtttgcgcattcagcatcataatccatccatccatcagtgtgtgtcgatccgttttagatagcggttttaattataattgcagtacggccactagtacagtgcattggatccccagatgctgatgatcgatcaatttaccaaccaattatgtacaccagccctccatttattaatgatagacctatctgatctccaccaatcggaggggtcttctctcaagctctatatcggatcacgttaagattcgtgttaccggcgaaacagcccttaagagcatgtacaataacaggctatagatcagctataaacacatatggatagtgtgcatgcctaagaatagatatcaagtgacaagtaattaatggggatcagatcgatgaagattgacaaagaaccattggcttgattgtgtaatgcaaaggttggcgcaacgaattcatgggtaggcaggcttatgtgtggactacaggcaaatctgtatttttcttaaaggcaacctcactataaataaaagaataaaatatctcgatggagccaaattttcgaggggatgtaataagtggagtagatgaagcaagggatgaagcaagtggggaaaggaaggggtagagcatggaggatgcgagggatattagttaggttcaataatgtatatcgacacaagttttgtactattaattagatggagaatgagttgccaaaaatcaaatagtattgtaatgaaaatttaaattaatgtttatatccaatatattgattattttttatgacaaaacacacacatatataactcataatatctatcttattaattacttcctccatttcacaatattttccgcagcttatttatactttgttagcacaaaccaagaaaaagaactacttctccctgtcaaataaatctaccccatttcacaatatttgtccacagtatattatgagtacaaaccaagcatatatatatatatatatatatatagatgtttgatccaattcgagcataatattcttacctttttacccctcttttctatagaaaggatttctctgacatggtcactaacatatattccctccgtactcgtaaaggtagtcgtttaggacaatatttgagtcaaaccttgggaatataaatcatgaataactctcaagttgttgagtttgaaaatgtaaaaattatatgaatagatttatcttgaaaaatactttcataaaagtatacatatatcacttttcaataaatatttttatagaaataagaagtcaaagttgtgttttggggaccgtgtcgctgtccaaaacgacttcctttacgagtacgaaggaagtatactcatcgtcattaggccaaatgtcagtgaccacttaaatcaaaggatcttaatcccttttctaccttacatttaatgatgtggatattgcttcttttcctaaagataatggagggattaattttattggaccagatagatatgtgcacccctgaatatagttagttgggatttgctccatcaagaaagctattcgatccgttaattagcagcagcaggtatgctgacatgatgctctcttaattaattaattaattaaggtagtggttagcaacacatatactagtacaatacgtgcttaaacgacaagcacaaaacaaaagccattagggaaagctaatgtggctatcgatggaaagggccaattcatcaagcagctaatgtgaggacgtgcaacgagacaaatcgcaaatcttttcttgtcgccgtgtgtacgctctgcgacaagcattaatgcgtctctcaacgtcacttttacagcctttggttccatgctaaaataattcgaccgttttttgtccccgatgggggcattaatactccaaaaatatcgacgtcgcgacgagcaaaaaggtcgccgatcgatcgattaatttatataattaatttaatggttattcttttcttaaaacatatgacatacgtatgcactcgtataaacgtgtacacgcacacccggtatgtatggacagaaccgaagagacgtaaatacgaacactctgtatctagaatttaattctgaatagacaaattccaccataataaaaaaaattaatcagttgactacactcacttttcaaattaattggttattattgtacttaaaaaccaaaggtatttctcaattaattatctttctttcgtattcaagtcgtgggtagaagcaagatcagatactatgatattattatcgtccactcgcacttatacagacccttttacttatatgtggatgagagaaatgaaagagagacgtcagtaacaaccatctctttctaaccataatttgtatagcacatgggagaattaaatgccaaaaaggacaccgcaatagaaacgtattgttacaattatcgatacgagttctttattagcggatatgacatatcgctcaaatatgagcgcagtcaaacttcgaaaattaaattattaataaaaaatatcaggatttaagatgtaaaaaatatattggtagattcttgacaaaagaccctctttttcatatagttatactttaagtattattgacaaatatatagttcaagaaaaaaatgataaaacattgaagactctgtcgatgttttagaacgtcatcctagctatttagaacggaaatagtatagtataagacagttattacagacaactgctatatatgtccaataactaaccagccaagatgaatgaacaataaacatatcactaattgatagagttaagagtagtgctgctgttcatatgattattatttatttatttttttcagattccattgtgctaagattccttctcttttcagctggatggctccaaccattgaggtcgtcctaaggctagagagtccataggatgcactgactagagtactctgtgcatggtgatctactagctactacactcaatattggacaaaagataccccaaaagtgccatgcaaccctgtccatttttctattattagcgggctgtactgtggtttggtgacagggcttgctgtcgcaatgcagttggttagaatttgtagttgcaaaaaaaaatgtatatatgcccctctgctgtgaagaacataattgacttgttaatgaaatcttttgcatttactatatcccaaaaagattccaagaaaaataacttgagaagaagaaagtagtagtactactgtaaattgaggtgtgatgcaaatcaaattgagttgagacaagtgtattttcatttaccaattaagttgtttttctcatgtttatttggactaatataatatttctattattattcaaaaatatgttcctatcgattcatatagctcgatctggtttttgttctgtttctattactggtatttaattcagcattttttgtcgacattttagtggctttcagagctactcttcttgtaaaaccaaaaaacaaaaaagcaaaataattaaagtgggaaaagcacactaggtgtccaaaagttttaacttgacaaagtaaaagaaaaggacagaaggaaccttagcttagctatcaggtgtggttaataaaaattaattctactgtgcccaatcattcgcctttggtttgttaatttggaggtgagatctcaatgtgggtcccagctacatgctatacactcatctcgtatcaggtcaggacaaaccaacggacaaccgtccatggcgaatttgattttctccttggacattttcacacgcggtgacttaaatttatcctcgcgaaattcaaattaaactgtttgccattaaaaaagttttccctgaattttgtacggttgtagtttattccaggggataagaacaacatgaccaacaagtgtgtagcacatcgtttgtctgacagcttgtctttcttctcctcgttgtttcagaagagttttgtgagttggatagcagcaactagcagcttgtcacctctcactcacaattaatagataatttcagggtgttatgctccctccgtcccctaatataaggatttaaacattttacttgtactgttttaccattcgtcttataaaaaacttttagaattattatttacttttttacttactttattatctaaagtattttaagcacaactttttactttttatatttacataaattttttaaataatatgagtggtcaaacagtgcaagcaaaatttcaaaatcccttatattatgggatggagagagtacatgtttaggtaaagaaaaataagatcatccatggtatctatggaaattgttgtaattagccgctgagctatcacacgatttgttgggctcctttcagcgaatatgaaccaataatggataaattgttagtgggaatactcaattaaaaggagggaaaaggcatgtgtgtataaatacaattaggctgagttcagtacccatagctcccaactcgtacctctctttttcatacgtatgcttttcaaattgctaaacggtgtattttttaaagatttttatatgaaagttgctttaaaaactcatattgatctatttttgaaaaaaaaactactaatacttaattaatcacacgttaatagaccactccgttttccgtgcagaagtgattagttatggagcttaggagggttaaacatttagtataggttttatgataaataaattgttgaaatgagcaaaattgtaggggaaaaaatagagtggccccgaaagctattcgtcaagccgattgggttaatcattttgcacattaattttggaagatgttcccatagaattcccaacatgcataaggagatgtacatctattttaaccctaacaataaaatagggatattggactgcccttgacgtaattgtttgatcatttggcgcgtttagcatataagagcacaatacgtgttagttatgcaatgtatttaccaaaacaagaaaaaggtgcaagactcccattcttttggccttttcctcaccaattccacactcctgccttgagctgtatatgacttgtaaaagatatttggtttacaactttccattccccataggagaaaggcccaacgggacttttcgccggagctccattgattgtgaaatatgggaaatgtaccggcaaatggccccctttacgttcgaaacaaaatacatctctcgtggcattctaagatacggggtatctgtgtgcgtatgactagcatgtctgaattttccccatgtaataacatatggttgtagtcagcggggccatgggcggcggtgggccacgcgttgcagcggagaaggtcaggagggcggcgctgcggcaggtagcagcaagacgttggcgacgatgtctctttgggtggcaggtgctgcggagcacgacagcgaagggtgcggcggaggatggcggcgtcctaagcgtcgacgaatagtcctcggcaagaagaaggcgaatccggtaaaggtggtttcgtaggcagtagcgaccctaggggcgatagcggcctgcgagtccgggtagaagacctcctcagcttcggtaactgcggccctaggggcggcggtggcctaagtgccggtacaaggatcttagtgaggaggaggccgatcccggcggtggcagtggccctagctaggggcggcaaaggcctcggagtcaggacgaaagaggatatcctcggtgacagctgttgaggactccaatagcggcggcaacgggctaggggtctgagaggcggaggaggattctgatgtcgatggaggtctaggaatccaatgaagcagaagctgatccttttggctcacatctggtcggctagttctgactgtatgacgatggatgagtggggtttaaccggcgtcacgtggcgtcagctcacttgaagcggatgaagatagcaccagcggaatttcgtagcgacaacgcactaggggtgatggcaattagatgacttccactcgttgaatttggccacttcaagagaggatgtggggaagcagggatgtatagaggtcgtagtgtttttttttccctttttttttggttttgtgttctctttgttgagatgtgagtctaattgttcttgtatcattttgattttgtatatccctcgtagatatagaggccggactaatgaaaatcaattatctaaaaaaaatatggttgtaatcatttcttaatatttagcataataatcaacattattttgcaaagaaaaggtaaaacctagaccattgcattattattgttactaaaataaaagaaatatagtgcagaaaaaatcatgatgaggattagacatatattcaggaactagagtggactcgaatccttatatacaaatttttatatactaccgcattattatttgtttatatttaaataagaaataagaatggttccagggcggcgccgtacgtagcctaaagagagaaaagggagaaattggtggagagcgcgtgggaagcggcgggcggcggcggggctgcacggatcccacccaatggcgacgcgccctctgctccatcgatcccgacaacgcatccagaaggcgccggcgacacctcgccgccgatcgtccgccgcccctagtcgccgccatctctcgatcatccccctgtcccttcccttccacgcacggccggccattccatcgccgcctacctccagacccaatgcatcctctctctctctctctctctctctctctctctctgtctctgtgttaattttgtaatgtattagcaaccattcatggatggatggatgatgatgatcatggcctctgtcctctgtttttactcgtggctgcagactagtgctgtcttttctcttgtttgctgttctagaatctgtgtgctgttttctaaacaatttactgtttatatttgttttgttttgtttatttttgtagttgtaatataaggttagtcttcttagtaaatatattgaaaaaagaagaagtagataacacggtttgaatcttggtaattgtactgtgctcgacaaattaggacgtaatcctatcgtttcagattataaaatgatttgactttagtcaaagtcatgttgtttcaagtttgactaattttatagacaaatataataatatttataatactaaattagttaattaaatatattttcataataaatttgtcttgagttaaaaatattactactttttctataaaattagtcaaacttaaagcagtttgattttgactaaagtcaagacgtcttataacctgaaacggatgtagtactgtatatgggaactagcatgaagatcttgctactgaaagtaaaatatcgaatgaaattcgacgtgtatgagaattatacggtaatcataattaattagaagtggctgcatgtgagaatgtttggttctaaagcagacagacgaattaaaaaaaaacaccacggcaacggaggacgctactgttcctgtgaaattcctatgtttaattacctaatctgttttatgtaatgtgataattaaaaattactctggtgcttatttcacattgtgattttactttactataacataacttaatttgtatgaatatgtgtgttattaattgggtggcagtgccactagccagccagggggtggtgatgagcatactagctagatttgtgttgtgtagctaagctggtggccttgtgtgctccacatcactccaaaccctctgtcccaatcaccacattttttcctctccaaatctattaattaatgatccatttcaattcttcatcactgatttattcaccaattaattctctctttttttttcttccactacgctccaaaacttctctccctatatatacctctcccttgtacttgtccagttcttacactcgtctcactttactactcattccactattgtaaagtcatagaaaaaatttatatagagagaaaaaattagtgttgttattgttactggctttctgccagacgagacgagcgagcgcgcgagtgtgttgctctctggtcatcgtcgtcgtcgtcgcgatgccgacgccgtcgcacttgaagaacccgctctgcttcgacttccgggcggcgaggcgggtgccggagacgcacgcgtggccggggctggacgaccacccggtggtggacggcggcggcggcggcggcgaggacgcggtgccggtggtggacgtcggggcgggcgacgcggcggcgcgggtggcgcgggcggcggagcagtggggcgcgttccttctggtcgggcacggcgtgccggcggcgctgctgtcgcgcgtcgaggagcgcgtcgcccgcgtgttctccctgccggcgtcggagaagatgcgcgccgtccgcggccccggcgagccctgcggctacggctcgccgcccatctcctccttcttctccaagctcatgtggtccgagggctacaccttctccccttcctccctccgctccgagctccgccgcctctggcccaagtccggcgacgactacctcctcttctggtatatatacatatatactctcccatgcattccatgcacatacactctacgtatatatctacctctacgtatatatctacgtattgatctacgtataatatacgcagtgacgtgatggaggagtttcacaaggagatgcggcggctagccgacgagttgctgaggttgttcttgagggcgctggggctcaccggcgaggaggtcgccggagtcgaggcggagaggaggatcggcgagaggatgacggcgacggtgcacctcaactggtacccgaggtgcccggagccgcggcgagcgctggggctcatcgcgcacacggactcgggcttcttcaccttcgtgctccagagcctcgtcccggggctgcagctgttccgtcgagggcccgaccggtgggtggcggtgccggcggtggcgggggccttcgtcgtcaacgtcggcgacctcttccacatcctcaccaacggccgcttccacagcgtctaccaccgcgccgtcgtgaaccgcgaccgcgaccgggtctcgctcggctacttcctcggcccgccgccggacgccgaggtggcgccgctgccggaggccgtgccggccggccggagccccgcctaccgcgctgtcacgtggccggagtacatggccgtccgcaagaaggccttcgccaccggcggctccgccctcaagatggtctccaccgacgccgccgccgccgccgacgaacacgacgacgtcgccgccgccgccgacgtccacgcataagctatagctactagctacctcgatctcacgcaaaaaaaaaaagaaacaattaatagagcaaaaaaaaaaagaagagaaaatggtggtacttgtgtttaaggtttcctccatgcaaaatggtttgcatgcatgcatgcaaagctagcatctgcagctgcaagaattacaagagcagagaagcagacagctagatggagataattaattaattaattaatctaattaagcatgcaataattaagattattattctgatttcagaactgaaaaaaaaagtgtggttaattaattattggttaggcttaattttatctagatgtagaaaaagaatcaagatcttcaagcaagagagaagaggatcgaagaagaaggaaaagaaaacgaaaaggacatgctgtgttgtctcttctagttgtaccctggctgctgattaagtgctttgttttgttgctgcaagcttgtcgttactgattattagttagttatgcatctaattgattaaactaatctgtttggcattttggctcgagctaagctatagccaggctggtcaatgataggaacttgtacaatttaagcaattgaacctgatcctgtactggcatgtatgtatatatgcaagtgatgagaaccactagctagtatagctagacatgtatttgtatagatgtgtgtgtgtatgtatatttatattcctacagtggaataggccatggatgtgtaagctagtgcagctacaagtctgcaactttgtaggacacatctggctttgtactgttgtgcaagcaagcatgctctcaacaagttaacaaaccagatgggccagacaatgcatgcatgatccacacggatacaatgcaagatgtagaagaagagaagaacaagcaagaaatagtacatggttatatgttcagggaagctcgaaattctgagaagcagctaagatgagtagctagctggattttgtatgaatgaatgaatctgaaaaagtaaaactaaactggattttgtatttcctgatttctagtttatttttttagattttacaactataaattcttggaattttgttaaagaattaattaggattctgtttgagggagtcgaagatttcgagagaagccatggctccgagaagctcctcgaaacagggctacactatgtgctagcttctttttttttctttttttctttttttttcttttttttatgccgggaacactatgtgctagctgtgtgtttacgaatcatgtacataatacatgtggggcaagagcctgaaagatgcagggtttgggcttttcctgcaagcacaaggccacaagggagccccttttgttctgaaagagtgaaagaaattggagatctctgcagggatccctttttactttttgcatttcagcctggacacatctatgatctactgactactaccccctcatttgcatgcatgcatgcatgaatgaatgatgcaaaaccagagaagatgccatgcatatgtgcattaggagttaggacacagggccaggcctcctcaactaacattcagattttcagaggctgcaacttgcaagcaaatctagtacaaagtactactagtgccaatgccaaatcagatgccatctctatctccatcacacacacaaaagctgagtagttagagaggcagtcagtacagacatggaggcagaggaaatttatgtgatggttgcagaggaagccaatccaggggactggaaatctgaagtttggtgaaggaagcaaagagaatgatgagtgagctagtagtagcaaagctaggtcactgagcccagtgagtgagtgagcgactgactggatgagtgaatgagcatgtgcagaagcaaattgaatgcatgaacacaagagagattttaatttctcggcatcattctcttcctcccattgagatcatttcatttcatctctctccctccatagctggcatgcagcacggcagccaagtcactgaacacagggcaatattaagccattgcaggggatgatcagttgttgcatgcaatattcactgtccgtccagtgaatcaattccaagaattaatgccaccgattttttatttttgatccgcacgcatccctgcacagcaaagaaattaaaaaaccgtcggttttcgatcaaatttggatcaatcaaacttctcccctcaagaaaacataaataaaattatataataaagagctcaccgtcttcgtcgccatcgtctatctatggatggtgacatggatgggtaggtgtagcagagcagatacggcgggctccattggggcctttctgtctacccggagcccggacaggcaccgcgacctccacagtacgccggccgggcgagccggagccccggacaccgacggcgcccgcggcattttgccattgccacctcatttttcatctcctcatctccattttttttatcatcttttttcagacaacgatttgttgttatcttcttgcagagtaggcatgccaactaggctcgccagcgagtcgcgccactgtgatatatggcctgtatttttccgggcttcattatctaacactatccgtaaaccggaatccgcgtgtagtatttgtctaggctctagaaaattcctggatccgccacgcggagagtcgcgtggctggatttatatgcatgtagttgtagttcaggtgccatggtgaaagctagaggtatggaagggagctaggttggaacacttgtaaggaggaggtgcaaccatgtgtaaggcaagatggatatgggtgaaaaaccggatatatgatgatttctttgcaggttaatcttcgctttctgatctttactgaacctcatctggaaccaaccaatccgggcctgaatatatatataaaccttttaaaaaaatccacaatatggcactcgtacaaacgtgcaattaattactccctggaaaagatcatagtctcctaccattagtagcaagtagtagtagctatcccgtttttcgcatgaaggtgtttgtgccggattgggaatttggattgctgcttggtttcatggtgtgacaccacatggaggataacgatggccggccggccgcctcgagcacacgcaactcaaccctgcctcaaagctcaaaaccagtagaagggtaggataggatgctggagatggagtgagctctactccgccaacgacagccaggcgcgacgacatggcactggctgtcgtggcggaacctagaaagattttagagcccggacaaatctaactacaagatgatataacgttagttatggtggcaaaaccgagtaaacttttagagtccggacaaatctaactacaaacgacataacgctagttgttgtggcaaaaccgagtgaacttttagagcccggataaatctaactacaaacgatcgaaacgatatgacgctggttgtcgtgacagaaccgagtaaacttttagagcccagataaatctaactgcattaagtatttgatatctattggttggctttagtataacggagccaaaaataacttttagagcccgaacgaatctaactactggctggttatgtgcatctcgcgatgcagaggctgggatttgacctctcccaagcatcgtccagcggtatttgacatctcactaaaaaccacgatgcaaatacaacggcagacagactgctagctggaatgaaacagggagagatggtttcacgttgaattattctccttttcaagctgtaaaaggatggtggttcagaaacagtaaaagaagttgctgccactttgatgccatcgtcgttgtctactgttctttgtgtgtgtgtgtgtgtgactgaccatgacagtcagcaatacatacacattgccggtgtgtaaatacggccgtaaatttcacaattaagacgggaggacaaacgaggcacattgatttcttcttaatcaccacgcgcagttaatggcgacgcagtaataataactctagatctctcctctttcttctacctttggccatgaacaagatgagctgcgaccccaaagaggaccacccaggatcagggttttctggcacgatcatatggcagatgacacacacaaccatgatttcgatcgatcacccagcacggcaaaagcgtaatggtctctgaaattatctgaattggcatatgctgagtgcatacatgatgatccactccataatgctcctctgttctgaacttctgattaatgttgatccaccaacctggtccagcgtttaattcccaggataacatcgatcctctccaaagaaacaaaaggatgtgatagactaaagcctctccttcaggaatcttacaggattttcacatgaaccagttcgattccgacaaaaatcctcgaaaactaatagtattattcaatccactccataatgcagacagcatgcatgaatggcttgatcttggtagctagcgaggtactctagctagaatccatggcatggccttttcactgcagaagggttggccgggagggacagggataatatcatcgatgtttaatcagtcaggttggggggcaccggcagctgcagctagctaggctaagcaacagtgctactgcagggggacagtggtgttgatgtgtaatgctacagctactgtatgttggttttggctccagatcaatctatcagattcagatatacaaactgtacattccaaacaagatggggatcggatatgatcatccatagatgaacagtcaggtggttagcgatggaaggaacagtgccggatgctgctagctgcagctgctgctgatagctggctggtcgagaggcatcatcaactccattgcactggggaaagctgcatcatgcatgtaatgcagatgcagatgccgttctgaacatctgaatgttgcagggctggggctgggcttgctatgctagctagtagcaaagcaatgcaatccaatgacaatgcccgatacagtattgggttatctaccctccttggaatggatgcagagacatgcagtgaatcattattgtgttcgcctctcatgcaggagtactccctgcatactcataagggtacccacaatggttatctataggctctatataagagatccatgtcagcatattttcctacttggaagagattaaatgaagagagagagcaaagctatctactaacctggagatagtctatagagaaaaacgaggcaatgtattagagagctatagatacccatgtagacatactattgagatgatttactattaatctagtctattgctgagatgtacatgttttatagataacaccttactttaccattgcgggtgctctaaagcatactcataaataaagccgtttaggacaatgtttaagtcaaaccttggaatataaatcatgaataaagttgttgagtttgaaaatataaaaattatatgaatagatttgtcttgaaaaatactttcataaaagtatacatatatcacttttcaataaatatttttatagaaaaaagaagtcaaagttatgttttggagactcgtgtcgctgtcctaaacgacttcttttacgagtatgtagggagtactgcacaatactactactccatccatcccaaattataagacactctttttaaggaaaatcaaacttgataatttttgacaacttttaactagtaagcatactaatcatatataggctaagtattatgaatgttatatcactatattcatattttaaaatattttcatgtgatactaatttcatattcgtggagagcataaaataaaataaattaataatcaaaatatataattgaagacgtataaaaaagattcttataatttgggatgtacttttcaacgagcagtgcttatcagtggcagaaagaaaacagtgtatgcatacaaatggaactgacacaaattccaaaaagatgaacttgcatcatactgtaggtcactgcatgcatgcaatgcaatggacacatactagagtggttcctacctgctgctctacttgtttctagcagggtgactgcacaataatgagtttgcaaattatagagttgcatgtaccgatctagttcatcttgaatattaagatgacaagaaaagacgagcaattcacttatatttcaatacaatactacagctgacgtgaaaactgcaattattttgtgtcagccagatgcatatcaagcctagaggtcttaaattcgaatcacgactgactacaagtttttttaaaaaaaaaaagaaaaaaaaacaatggctgactacagttggcagccttcagatggacctcataaaggaagctgtctcaaaaaggaccaaaacacaccttagaattaatcgtcctagtgttggtttgtcctagtgttggtacacacacgcaggcagatcgagccaacgacatggacacgtagcctactggctgactacacgattaattaagcacatgctaatagcgttggacaaaccaaaaacatcgaacaaaagcttcagttacccagcattgtcagcattaatatgtctaaagttgcagcagcagcagcagcagcagctactacgtgctcggatcagacaccacacgtatgtggcttgcgtgttttgaactgattgggtggttgattagcttaagcctgggtcaactagtgttaattagtcttcgtcaaacagatatatgtacgtctccatctacattatgtttgtcgatcgaacagcgtgaggcccatggcggttggaaagctgaagctggacaggcacggaatgctgggaaaaaagggttgcttcagatgacaactagcagctgggtcgcaacgatgacagcccaagcaacccgaagattttaattaccagtactactccctcggtccctccttcccaaaatatccgcatttctaatgtacaattgttttgtacttgcatatttgttttgtacttgtattaacaaaatatgcgaaattaaataagagacattgaaattggtcaaaaccgggaaattaaataagagactactgtgattagttgaaataagagcatgaaattgttatattttaaaataaattcttaacgctcgaagttgatatattttgagacagatgacacaagccaaggtttaccaaattgtttagggtggggttaccgccacgccacgccacggtttggcggttatcacggtaaccacacggtataccatgattttaaaaactgaaaaggttaccgtacggttttgtaaagcatgacgcaaggtgtgcatgtgattgcagtcactagcacgcatccaggcgagtgaccgtgacatgaacccactgctgcgacgacaacgttgatggagacagatgacatgtagacgccggcccgaacaagtgaacaactagccggtgcaattaaagccgtggctcttgcctatctcaattttaacgggtgaggggtgaccaaggtgatgtgtatcgcaaatgcgtcggtggcttgcattgagcacgtgtaatgtgaggcgtgcgaccatatccccaaactcggctaacccttggcagagaagacatcgtcaccaacgaattacgtataggcgagtgactctcattggaattaccatgatgaagaggctgtgagaattacaatgtggtgaggttgtggacaatgtgaagcggaaggttttaattgggcaagagttccaacgtcgcacgaagtctaattttacgaaaagggagtatacgcttttggtttggagaaggcatggatgcatgggtaggcaagaaggcaggcgacaagaagcagcacgagacaggaggcccaagacagagatgagctgggcccaagatgagatgagatgagatagagggggtgcgattctgacagcggcgtgtgcacggcatgaggtggctgctgccccgccgccagccgatgtgggagggcccgggccccggccggcgacagagacatggtgtgggcgtcgccggcgcaggggacagccaaccgtgccaaatggccccccggcatgtgcgcgatcgtgtcgcccagcactgcctctcgatcggccacgccgtcaaatcaaaatgggcggggacagacaagtagaacagccagccaaccagacaccagcagtgctcatctcttaggagtatcttctacaagtatgttgtatacgcatatgatatagcagaggacacaagggtataatgaaaaactcaccaggtaagaagggcaaggggcaaggagagatggcgaaggggatgcttggtgttggtgtccaggaccaatcttttaacacccagcgctctgctacaatgtgcaaaatatatatgcggcatcagggaccgtcccttgccttttgttttccatttcatatgtaaaaagttgagccagtccaaagttttcatggcagaatgttaacgctaagatgatagatcgacaaagaagaattgaatgtgccaatgcataatgccatggaacaaagtgatatcccagctgatcgatcagtctaaagtcagcacgacaggatgtgaccaacactcgctctaagtccatctgcatgcaagttcaccgactatccgccgtgcttttgatcataggtgcccataactaagactcaagtcagcgagcgaatgtatttcttgcctgtgaagtctttcagctgctaatgctttatatcctttgaaagaaatacaggtatcccatatccttgggcaagtcgacagaggcagcaaccttactatcattgaatattacccacctcccgtctttgaggacatgggcaacgtagtgcccacaatgggtagaggtgcccatatggctcacaaacgccatcaatttgtatcctgcagagcatagagcaatgttaataaaccaagaactgcaaaacacacacacatactgaagatagataatcaaccatctagaagtattgaacccaatggtttggaaacacctacagtctgagacaagtttggagcttacttttatatggtttggctaatcattcactaccatggatttctttacatatatcttaaaagaaaaaaaaattaaaaaagtaagttttcttggaaacttagatgggacatgggtcatataattgtaaatccacatccatttcttgacgataatgtgccatcgttattcagaaatgctcagggcatgtacaaagtcatctttcaaatgttgcaaactacaaattcaacattaacagttcagaatgttaatgaaattagctcatgagattggaagcttggcactagaaacagtaaaacagaaggggtagaaaaacttactgccacttccatctggtatgtgtgcatcatcatcttccatattgcttgttgaagaatcagtaggtactgagctaaaagcctcagggtggctaaaaatccagtctgttgctctctcgatatttccaccctatcacattagaagtacaaaacataagcctccgatcaaaaaggttggttgcagacaacgggaaaggaacaccctaagacagttttgaaaggtcattatatgaaaataagcaaatatcaactttctgagaggtattcaacattgcgaactgtacaagaaaatgtaaaagatcaactatcatggatgaaattaaaaacagaagattattacagaagctgccaaggcctttcgagcaacatcttcttgaaatccgaaggaaacaagagtttgaacgctagtttcatcaacagtttgttcagcagcctgtgaatctttagatattggatcgttgatatctgtatagcagaaaggtgattaaagtttgtagcggtcaagttacaaattacaagacggccaatcatcctttcatgatgacaaagaagtaatatgtaacatttctgtttgtatactgacctggatcatccatgtgtgagagaagccaattcatcgcctcctcaactcctgtgtttgatgtactaatagcagctttctggcaatgaagataattgaaccccatgcttgccagctgagatacaatgtcctcactggcaacaggatgaacaggttcagctttgttatcaccagaagctgcaagaatatgttgcagtcagcaaagtcaatcgggaaaatctgatcaagttgaaaatctaataaacaacagtctaacctccttcaggtagtagctcttcaccaggctgtatgcctttgctgcgcatgtgcgagatatcaattatatctggcacatctacgtatacatctgaggggaaattcaatgtcaagactcaagacaacaaatgaccaaatatggtgaaaagaaactgaattactgtctacatggaaacttagttactacctacgtcccaaaatataaggagtacgttggactcggttattatgaaagtggaactaaatgggagaaggctgtgattggttgagaagaggaggtaggtagagaatttgaatggtggaagattgtggctggttgagaagagaatgtaggtggagaagttgttatatttgggacaaatattgaaggctagaagttgttatattttgggatggagggagtgtatgcaccacgaaaccagctcaggttccaaaatttctcaaacaggagaagtgaaatactaagaacttagaagtaaagcctagttgttattcctgccaaattataggattacttcaaaattattgtttgttggagacagagtacatcaaacaatgcgatgtgttacatcacactacctccctttttaaatagatgaagccgttgactttttgttacacgtttgaccattataatttatttcgttgtgagttgttttatcactcaaagtacattaagcatggtttatatattatatatttgcataaaatttttgaataagacgaatgatcaaacatgtgttcaaaagtcaacggcatcatctattaaaaaatggagggaatatcattcgctggtaataaagcctcattccaatcaacttctatcaacatgaattatgggataaaaagtttactgggccagaaaatacgaagaatataggtcatcatatggataggtactgctagagtgctagttctttcaggaaatcagtccgccatacagtttggggcaactattcgaatctagagtcagcacacatgagagacaactgacacttgatagggacattacctagtttctttggcacccatcctgcttccattacaaacttgcgcatctgcaacaccaggtaatcaggaaatgttttaaagccagcagtcctgaaaaccaacaagttatataatgtgttagtaagaagccatctcctgtttccacatcattaaacagacctatactaaaactataatgaacataccattttactatttgcacacaaggacaatgttgaaacaaaacattgtgaatgatccaggagactaaataagcagaggaatcatgttcaaaaataaaaaccaaggtcatgacacctcacactgagaaattaaaaaaacaaggactggaagttccctattaagtgtctcggtaatggtcttaagatagtacgactaaattatagcagtacacccagtcacagtaatgtgttaatgttgaattgctcaggcattacatttcatctgctatattgagttgaattacagctagccaagttacatataaggcaagtttgagagattcagtcttttacaaactgaacatgccacagatatgagtttgcttgcattttgaaatatttcttattcaatcaataaggctgtaccacatttccatgtatataatagaaccaaatggcaatgaagatatgcatacttaattgctgttgtctttgaattcaatgcagtgctgtaaaattcaggcacttcctccgcgcctgaaaaacttgctaagcatgcctccagtgggactctaggcctcacaatttcctcattagacctgttttatggaagcaaagtgaaacataagtcgtgctcattagacagtgcatgagctatgaacaacttacacttcctttccatccaaatccattgcagctttcttctcatgaaatgcttctagctgctctgcatatctcacaggtgtcaaggatatatgcactaactttataatacaacagggaaaaaggttttaaagtcacctttgttagtagcttcatgtaacggtatgttcaaagaaagaatgtagtcagaacgtttgttataggagacttttccagaagggcattgaagacgctcctcaatgaagaatttgaaccctgtaaaaggattcagctcatggtttccggtgtttgcctgatcaacttggtcaataagatgaaggaagaaatcaagcgcatcctggacaaagagatgagttaaaatgactatttggaaaaaattgtacccaaaattgcagttaatgatgcaaaggaaaattcaaataagtagctcctcaaccaaaaatgtgtgattccaggtccaaagtacctgttgcctcatactggaaaattcgggatgctttgcagcaataactgtcttaaacatacgagggtgtattccttcttgtccctatcaatatggaacataaaaattaggagtattcaaaagtgtgtccaaaagtactattcaggctgtaagtatcaaaaaatgagaataggatcaaaatgagatctgctgatcacattatgtatcagaaaacttagcaggtatagtaagtatatggtactcccgaccttgggccctgttaggaacgccaaacattttcagattccataggattgaactatatcgtgagtaattccattattccagacagggtctcgattcatattgaaagtgaccagtggttaaaattgcatagaattgaaggaatagaagttaaagaatttgtgcatccaatcagtgaatattggctgagttgaaatccacaatagtattaaacttccaaacatgtgggtaggattccatgtttacaccatgtttgatagcaggaagctgtgtgtagcacatttaggaattaaagcttccttagaatttgacttgagtcacaatttatgctacagaaaaggaatattccaacttccaagttctcgcacacagttaaatgcaggcaggttttgtatatcagttgagacttgagaggacttgcccacccaaatagggaccatatttgtcagagaattaagaagctgtaatttgtgcacatatccaaaataaaacaagaaagcagtctactcgaagattgaaccattactgaaacaaacaaaattgctaaggtaagtaggtaactaccaacaacacaaagcgtaacaacaggcaaatatacaaacaaattcttacctcctgatttggcacagagtatttgccagagagcattccatgagccaactttgtcctgaaaatgtcaagtgatgagtataagagcggaaatattttttactaaaacttcttccataaaaatagattctttctagatttcttttatcataccacagtagcactgaattgaggaaaacgttcacttagaaacaaaatgcaaagccttcaatggacacttggacagcatgatatatgtttgattacagcatttgctatgagtctaacacactggaccactacagcacccaggatgaattccctccagcagctaccaagcgcgagcaaagaaacaagaaagtgctgattcaccaaaaaaaaaaagatcctagaaagaatcactttgtttgtgattgcaagtgtttaaaaaagtaattgtacccgaattacggtttcttcacatacaaccatacaggataaatggccaaaaaactgctttatgtattatccttacatttagcattagaagaaggtaacactgcatctcacaccaactacctcagaatagtgactaatccaataccaatacacgcaaaaacacagatcagctggtgtacacttacatttgcatgttcaagtccaatgttggatcagctggggcaattgcaaatgcagctttcaagctctgcttctcaaagtagctgaaatgatgcaagaaataaatgcaagagcatgtgctactaaaaaggaaaaaatgcaactctagacaagaagtgctgaagtatcaattgagaaagtagaaccaaccgtgatataaaaggatgagttgaaaacataacttgcattactgaggccatatagcaactgcaaagaaggaaacgcatgcattacataagagaaattattacaaaagaaaattcatgacgtcaaccaatgaaccaaagctacctatttccaagatttacaaggccagtataaccagggccgtataaaagttcggcatctttgccactttcttgtattctattccagtcataatttgtgttgtgatcaagctctctttcagcagtagtcatctcggtctgcacaacaaaagggtcacatcaaatagcctctaaactagacagatagacaagcatataaaggggaaaacacagtatgaacatgagatgctacagaatatattattcccatgaaaaagtactaatctgttactatcacaataaaaaaagcaagtcatattgagcagagctaaattatcgctcataaatgtcatcgaaaatgatactactcaccttttggagtgaagaaaaatcaataccaaaatgtgacaaatgctgcgctaatagtggatcttcaacgctatcatcttctgggtatgagaaaacgtctgagctgtcacagaaaagcttgtatgaataggtatatttaaatataaaacaacagtaacttcagcagcacatgcccttgataggaaggttgctttaggactttaagaatattctttgttaaaactaaaataagacgaaagcaaaatatttcaatggaaggttaaaatatcagtgtaaattacttttatagtagctaattgggctgtgtgttataaattatgaagtacgagcagtatgtatccagggaacaactctggaatttaagaacgagtcttactgattaaagtgaatattcaataataattgcaatatactccctccaatcacaaaatcattaacattttccaactttttgtgcctctgaataaagacaagtatttataacaaacatatctctaaaagctatttaagtattacctctggttttaaatatatgacaccatccacttcttttctcaaacgttgaccaacaatgtttattcaattacttagttaagtaaagtggtcatcaaatgtactttaagagtgccttatatgtttgtttatttgcacaaatatttctagagaagacaaatagtcaaacgaatttaaaaggtccaccgttttgtatatttaaaactagagggagtatagtattctaaaagtgcattccaagttgagcatcatatatatgacacttttaatttagatattacaaaggatacagtttgtgagaggttaaaaggggtttagttcaatttttcacaggcgacaacccaatgtcaccgtaagttgtattcgataatagaagaggaagcctaaatatgtaaaaggtccacgagtagcattacctgctgcttctaaatcagcagtaattgttccaagctttaccgcaagaggatatttagtctgttcgtagtgttcaatagcatgattattccccccacttccatcccaaagccgcctcccacataggatcatgccatcagttaaatttaaccagagattctcagttttatcacacttgctgcacttccatcctgtaggtggcacaatgacaccattgtctagctgcttcagatccatagcatgtgcactgacttttttcttgtcagcaacccaagaagccaattgttgttttcgatcagcactttcggcaagtataactttgtcaactgcaatcctaacctgtggagttgtagagtagtaagtaactactatgtagtaagtaagtacaatctcttatgtcaagcacagttaccttctctggcaagtcaattgatggaaaagggagagaagtaaattcaggcaagataacaatttcaaaagcctcatcgtattcgggttcttgatcagtgaaacctccctccactcctataaattgtagaaaacccggattagtaaagatggtcaacgcattcatctatttgccatcatgggaatacagaacagagaaaatacaactatatagatctaaatccaggacataggcaactattctaattacaaataactagcatacagatatcacataacaaacaattcaccaacatggccaccatatgttggtctctgtttccagattagcaaacaaagcaatgcactaccatattttttctctacagcacagtagctcaacagatcaaacagaacacaagatatatgataactaccatagtttggtaagtctctaccacaaaggggaacagataatggggatacagattttcaacagtatgaaatacgatgttgatcatagggtaaaaacaagtcgcaataggaaaacgatcacatcatccaaacacaatcacataccctaacgcgattcatgcgttcacaattttaacagtatgaaatacacgatggtgatcagtgggaaagcgctgtcactcataccgatggcgagtagcgtgggcttcttcagcgggcgatccgcctcgtcgtcgggctccggcttccggcgctgcacgatgtggaggtacacggggttcccactcttctcgtagttccacgccacgtgctccctcccgaaccccaggaacgaggtcatgtcgacgtacagcccaccctccgacctctgcacggcgaaatcggcgtcaaaaccctaaccctaggaaaccagagcgaagggggggacaaggcgtgggtgggtgggtgggtggttggttggtttaccggggtgtcgaaggagacgcagcactcgtccttgtggatgcggctgccgggctccgggatgcggaccttgtggaggtgcgagcggaggagatccatggccgcgggcggcgccgggcggcggcggaggaggaggagcgcggcggcggctagggttttgggggtggagacggcgaggcgacgaggtggggggagggtggaagaggggaggagtgattagattagagatggaagaagaggggttaagttggtattggtaggggcaggagacttgtacgggaggcgatttaaacacgggggttagtttggcttttgccggcgcatttattgtcttgtttttagattttctttcagaaaaggcacaaatactacccctctgtcccataatataaaggattttaagattttacttgcactgtttaaccactcatcttattcaaaaaattttagaactattatttatttttttgatttacattattatccaaagtactttaagcacaacttttcgttttttatatttacataaatttttttaataaaacgagtggtcaaacactacgagcaaaaactcaaaattccttatattataggacggagggagtacttctttgtttgatattatattttgtttttttctaatcaagtttcattaagtttgattaagtttataaagaaaaccaaattagtttcactaaaactaatatttaatatattatgataatatatttgttttgttttgaaaatgttgctatatttttttataaacttgatcaaactcaaaaaggattggctataaaatatcaacacggcttataatagtaaccagggataaatatgtgaaacaaaatgatacatccatctatccctaatgattttttttcccaattacaccggggacttttttttttgcaaagtctgtgttcttccccagtatacccaactcacctctcccgttctccacgcgcacgcttttcaaactgctaaacagtgtattttaaaaaaaattatataagaaagctgttttaaaaaatcatattaatcatttttaaaaaaaagttaatacttaattaatcatacaataatacgtatttttcgttttgcctgttgaggatgaagggttcacaacccctcctcccgaatgccgcctaagaacagtttggcactactactccaagattttattagctagagcgatgtaccaaacaccttcaagatcttaaataatgtagagtggaatttgccgctttcctcctgataattatacggataggcatttccgctactcaaaaccgataaaaagttcttgtaaagttggattagatgacattccacccagcctgttttagaaacggttagaacctctagattattttggattactaaaccagtattttccatctactcggacggcattttatcctcctcactttatgaacgagaaatacatttttctccaggttataaacctataaagtcaagtggtaaactaaacaaaacagaatctgagaacctgttaaacctgtgatgatggttgcaacaactaagcattgtatttacctctgatcattctgatgaagatgcatatgactcttctcaaaaattcccatgtaggtgtagctatcattgtgaaagccctacaggatgcagtgttcttccaaactgaagatcagagagaaagatgcacattccctatctgataagaagaaaaatcaatgttcagagaagtaactgaacatctctgatcaggaaccaatgatctgttcacagatttgtgttgcaatcgatcgatcaaaccgtgtcatgggtatttttggacaggctggggaatctaagagccgtgcaaagactgaacatgcaaacagggcaaatacattcgtttattgcaggccagagatgccgattcattgctttccccagacaccaagcatccgtgacgaaaccacgtttgtaaaattcagtaagaaaatttccaatttcttgctggaattgagcatacttcttacaaaaaaagtcccttgaaattcctacgagaatgccacattcatcacattcttcatattcatagcagagatgcagcagaataacttcttagaattcagaccataaacacttcagtagttcagatagactatgattaatactaaagcatagttcatgttctgtacaaaatgctactttcccagggtcagcaaaaggtatactaggatagcaatattttcatcagtcattcagtagccagctactttgtgggggatattataccatatagagtgtttataccatcatcacacaatagctcttcagagctgatggtgtgaccaaaaaatgaggaagaaaaaggcccatccttagaagagggttagagggcgcggctagcttgaaagcacatcatttccacagcttgacgaacttgtcgtggctcgtggaagcgaccaaaccggagcttgacgacgccagggctgtgatgaggctgtcatgagctgcgagcgtcatcgttctgttctccgacatgtcccacagctcaagagactgcggcattcaaacacaaaaccagaggtaagcgtactacaggcattgtaaacatgaaccgcggtgaaaacataagtggtctctatggccgaatgcttgttcttaaataggaaaagtatttcattgcagtaaatcttcaaaataattgcatgtgtatcatgaaggaatatttgaggaacttgatatatgtgtaatgatgtactgaaattcaagttgtggaatgatcctcagtgtgagtgagtagtcatgagttgatctagaaaaagtcatttttaaccagctacttaggaattaggatgatcagtgcagattagttttgaatgaatcgtgacgcatgagcataaaagagatccacgaatataaagtacttgcctggtaacaaccaatgataagcatagatgaatatgaagggtggaaagcacacgagtgaaacttgctcccggtacagctaagctcttgcacgcagcgatcatcgctcccagcattcacagaccacaccttcaccgtgtcttcactgacagatacaacatattcgccactgggatcccagcatactgaatcgacatgctttgtgtggccctgcagttcccaataaagaggacagattaaagtgattggttaccatcactcggaaactctaaagattaacatggaagtgaacactggctacagctagcacgatgcgactttgaaaatatgtaaacaaccaagcaaggacaactaaccatcaagggaaatgaacaccacaaagctaattacaaaataaatagatagatttgcagtatccaaaactcactctaaaaacgagatttgaaaagtaaatacatccttgcacatagatttgttggtcggtatatatgttactggaacctcagtgaatttagaagatcagaatgcacgtgccaactgcaaggtagaaagtctctacaaacctcaaatctcctaaggcaagcttgagtctccacatcaagtatagagacagcattctccgaagctactgcaagatatcccccatgacgtggttgaaatctcagctggcttgatcctccctacaaagggattggaaacaaataaatcaagaaacagtgtatcctacaaggcatctccttttgagaccagttgttgattatggatggagacacctaataacagcccattaactacaaaggggttatgacagtgattgaaaccaattaacaagtaggtatggaaaacatctaggatgttttcttttacgtaattttaggatgttttcaacagattgacattcatcatgcacattttctataaagagaaaagtctacaagtatacgttggagtgctttgtcaaggaaatgttaggattgttcacaataaagcagcacttccagattgacagaatgctgaataagaaaaactgagtaaccttaaatatccggacgatgtttccattgttgatactccagaatcgaatttcattatccccatcacaagaacaaatgaggtcatccttgtttgggtggaaatccagtgacataacagatgctgagtgcccagtgaacgttcgaattgaatagccttgctgcaaaagtacaatgacagcattagaatatgatgagcagtaaaacacaacagtactttgctgcccttgcagctttaacattacaagtactgacattacccaggaatctgaaagttcagaagtatcatgcttatatcccctagagaacaaacaagttccacttctacaaaatgaatccatgccatgcctatgaatctcaaaattgatgttgtagatcattcacgacatatgaccttgagatggacattgcttactgtattctttgagaatttatagcctacttaactttatgatgttgtttctacataaagggcagttcaaaaggtaaaaaaatctggctaaatatacaaatggcaatttgatatggtttcagtgctagttggcaggtttttgcaacataacacagaggcaatcaccgaggcaaatagatggtaggaaaaaagaactaaacagttatgtacttacattgtcagcatcccagaccctgacagttttatcaaatgaggaggtagcaaggcgtggaatgcttggactgaatcgtacatcagttatcaaaagagaatgttcctccaatactgacttctgttttaaagtttcagcatgccacaataccacctgcattgaaacattgcaagtatctatttcaatatcaccatgaagtcaaagatatgcctgcccacttccaagagtatcaactaggctgagcatcttaacaagcccaggcatgtgcacttaccttcttatcatgacccccagtagcaagtagctttccatctgatgagaagtggcagcatacaaccttgttcgtgcttgcttgtacagaagagacctctcggaagatgaatcctgcttaagacatataaacagaatcaaagctctacagaacacaaattcatgttagacttccctacaaaatacatcataaatctaacccactgaaccaatatatgttaccacatgacatattagataatttcccctctcacaggaccatagcctgaaccgcaccaactgctcaatttccaagctaaattcacctaagtgagttcagcttgttggtactatttacaccagccataattacattcaagactaaactggccagggtaaccactgccaatgatgttaatatgtcaaagccaaccattcaacttcaactagccataagttacaaaacagttagccttatcacacctttagtagattccatacgactgccatctcttcgatctgcatcatcatgcgacaggaacgaatccacatgatcttccaagcagccatcctccacaaaacgatccatgtcagcctgcagtgtgagttatcagatgttcagaagtcaggcatcaaacagaccatcagtgcaatgaaacatttccaaactatgttgcatgcataatatatccacgtaatagggccatagctgtttggatttagaaccagttgtaacttacaagttgatttgatggtgatcccattgtccctgctgtactggtaccgtaaacaactaaagcctttgataagctagcattgtggtgcagcgagggcattgaaattgtgtctcctgggctttgcgatgaaggagttgagggttctgaggaggggaccgcggtgtttccagtgccagaactattggctggaccagacgatgagattggctgtttgcgttttcgcccattttgattcttggaaacctgcaaaacaatatatttatgatggatacaagtcttaacaaaaggataggcacagtaacaaatcaaggtggtaatgttgaatatatgtagaaggaagtgaaacctgttcacttccacggaatgaattagacaggcttccatcaatagtaacacttccagctcccattttttcctgctggcctggaaggtgattagagattggtggttgctggctaagtaaagaatgctgaaggagctgttgctgattgctgctttgctggtgctgctgtatagctgctatcttctactacatataatgacgaggtgttaaggtcgaaaaccaaagatgtagaagttatcttgaaaaaggtagcttcagaaaacatgtgagcatgtattaatagcagctagatcattatgaaatccaaatagtatgagttcctctgttcaaaagattatattacacaaggaccaagaccgatattttcatgatttaatcactatgctatagtagaaagtaaatggtactgtgttatgcaaacttggcaacataacataacaagaacaagcatgataaatttaaatgaaattctattactgatcactgacaagaattaaacaatataatctatgtacatataagatatcaattgagaacaaaattatgcataacccggtggtttacaaggtactattacttacatccaatgtatcctcgcaaataaataaatgcatgaatatagtaaaacatacaagtgaaacttaccttcatcagcatatctgtctccatgcgctgcacaggtgagcacatattttgcaatgaagggccaacactaggaataacttccgtgtaggcatttgattgaccatccctcccaggaacaatgtttcggctactcaaaagcatccgaagccttctgctgtccatctctccaggtgaagatgtcatattttgttgtgcttgaagcagaagctgctgttgttgtggagtgagaaattgtagatggtgcaatggttggggagactgcataaaagatttctgttggagaaacccagatctaagctggtctaagccctgaaaagttataatcaaatggtaaaacatcataaaaacaaaaaaaaaaagaaggtgctgtattcaaacttgctcctaatttatagcttagaatgccagttaaggaatgatgtgaagaactcacagtaagaggccaccctttcaacgtcaaattgttccctgctgggttagcgcctgccagacaacagggtatcaaacaatggcactaagtacatgaataaacagtacagcaggtctaagaatttccagttagcagccagaaacaacaaaaattagtagagttcaaagcaaaaaaacctggtactccaattaatgatccatctgcccctgcagctctcatgtgtacagcagcatttgtgtctacctttatttcctgaaacaaatttgactcgtctagttatagacaataatgcatgagattatacatctgaaataagactacctgtgttgatgcctggagttgttggttccgggcctgaacctgttgcaaagtacctgacacgccaccagttgatccatggaaaatttgcctaaaaacaattgatcaaagcaaatcaatacacacacgctaacaggaaaacagaagctagagataattgccgttaaacagccattacagtatgaaccatcaagatagcattgattacggaaatttagtcaaacagctactacatgctggatagatttattgtgaataatatgaaagtaatataatagtttttattagcacattttagtgtacaataagaattaatggtcaaagttgcaatttgaagaccgcaaaatagttaggtaaaaacaaaggcggtaaacacaattcaagcatggtaggaaatcctattagatcacacattataggctgtatttaagactgatatggtatttattttgcgctccaaacctcccatccccaccccacactcccccccccccccaaaaaaaaaaaaaagagaagtaaatgattagcaagcattattgagcagttggtaccctgaagcctgagctgttattgcaacggacttcagcatagatgatgagtttgattccagcagttgtccaatattttctgtaaacctttgctgcagtataaagatatgcatttcatattatgagagtttagatcatgaaagcaacaatacacattgccatgaagaaactacctttgcaggtgcttcatctaaggtgtccctttgaacagaattcttcaccctctcctcgtacatctttgcagacaaagaacttgcagctgaagtgctttgtcgtgttggaggatcagcagaaaccaaaccattatgtgcacttgtcggcaaatgactgctttcactacgctgttgttgcttctgctggcggcgttgttgctgtggttgttgctgactctgctgctgctgctgctgctgtgcatgcctctgtagtaggagttgttgcatttggatctgctgtgatgactgctgggaatgagcctcttgctgctgcagctgtgatggctgctgctctcgagctttaattgactgtgtctgggttacaaaatttatgtgtaacaacatcaggaacatgaaaatagcattttgcaataagattgacgcatcatataccaagaaatggctagtttcaaatgagtaatcaccagaaaatgaacaggtattagctacggcctactacaaagggaagggaccattgccttcaaagtaattaatcatattgataataaaatgttgactttgaaattttacttgaattttaaagatgataatagctggagacaacatagtatgtattctacgagaaagtgttttgcattctgtaccttctaaaatgattaagacacatgttcttctataattgtgtgatatgatgcagcatgttttgtttggaaatatggggaaacatttgattttttttttaaaaaaaaatatccaccataacaagtttttcctacatagatgaattaggcattttcttcttttttttcaagagtgacatggaaagttcttgaatttggttttcaatgtttgtgtggaatttaaatccatttgctttaggcaaaaaactaaatccttttacagtgaacatgatctctatgactgacacaattcaagcatttacacatgtttattgtaagataagcagtaaaccactgtaccaagtgagtgcaagcaaacaacaaggacaagtaataaccaagatgcatgtgctacaagaacctcaatgtacgaagcagcaacatcagagtgcttctcgttcgtccttgcaatgaagatgtcccagaagacagaccaccactccaagaggaaaccccctggggcatcaattgctttttttgcaaaacaaaagctgacatctttcagtacaagaagattaaaatcgcattcattacaatgcagaaacatcagagactggcatgcataaatcagacaaaacaatgtggctgtagtattgttcctttgtatctgcccggtacgagtagctaataatactcgtgtctcgcacatgcacaaatgtaagtgtagtactaatcaagctaatcaaatgatcaatttgtaaccatcctattggcccaagaacaatggcagtctgaggaacaaactatctggtcctaatgcagaaagagcaaagattgcaaactacagtagtatgacaaaattcagaaattgatgcactgaccaacaggatcggaagacacgctgccttctgcttggaatgccttggcagtgctctgcaggttcctcttcaaaagataatcatggatgtacacgtccaacctgcttccaagaacagacatggataagttcagtgcggggatatataataagtaaaaaaggaaacatgggggtttgcatgcaagcacagcagcaacaggaaggaggggatcgaaagttttcatgagaaaataaaaaggtaaaatgcagattaaagtgtgaaagagcaaataaatttcgagaaatgaaaaggcagttgcaatgcaaggtaaaaggaaaaggcagttgaaaagctagcaagcaataaaccaaactagtactgtatccgagaaaaataaaaggaacaagaggaacaagaaaaaaaaaagaggcatggcttttgcaaaaggagaaaccaaaatgcagaacggaaaatgcagaaatttcagggaactcaaacagaatctcaagcgtctgcagccctctgaaatacaacaacaagggaagatgaaggacaagattcttgcaaaaatcaccagaaaaaaagacgatctaaaccgccaagaaacgaatccgaaacccctcccagaggaaaacaagaaactaatcttggggaaagataaccatgcggacaccaagagaaccaaatggaatgacaaaaaaatctcaagacaaaacggagaacatttcaccaacataaaaaaaagggaaaaaagaatgtgcgaagaacatcaaaccaatctgatcgcaataacaaactaaggaatgatgaagcaacgaagaacagaagagagataggagaaagctcacatcttctccgcttcccacgcactctgctgctgctgctgctgcgccatggccgccgccgccgccgcctcactccctctcactcctcgacctcgctcgcggtcacgcacgctaaacacaaaggcacaggagagagcgcctcaggaactgacaaaaggagagcacaaaacacaacgcgcacaagctaaaaaagaaggatttgaccgctcacattcgcctctaaaatctactactaatcgaggtgcgccaaaaaaaaaaaagaggcaaattgcttcctttttaaaatcttcggtcgcggagagatactatacttctactaccagcggcaatgcgtgtggaatggaatagaggaatcgaataaaaaagaaagagatgaacagggcagtgtgagtgaggagaggaagggcttaaacaaaaaaaaaaaactgaagatgactgtcaaaaaaggtcagtttaacaatattttctttcttgaaaacgccaaacagctgcccatttcacactgttttagtggttcaccgagtaaaaaagaaaatgagattgtgggattgtgaatttgtgatacagctgcatataatccaatccaattatccatatcaattatcgttatatgcgattaaggccgagagagagagaaagaaaataaatgtgaaatgatgctacagttctagggctaataatgagtgtgcatggattgatgagcctgcagaaaaaagcgtacttgcggctcactgtagctcctcggtcgaaactgcccctccttttgcacgatatttcgctactgccatcgtggctatattttttttctcgaggcatttgtcatgcaggtaagataagggaggtgattctgtagaacagtagagatgatgagactgtgcaccaggttttcaagagcccaattgccaagatttatctggtacttaattcattgttatgctttgttttggtaatgtaatgaacatatctcatcatctctgagcttttttttaacacatgacagatgcatgcacttatatgtacacttgtgcatagagcaccttcagagattgcaccaacatatctttaataaagaaaatcatgtagatgtctcactatcaataggtataacagacatatttcatcattgtgtaaaactttgatgtttttattaattggccatttaaggttttaaaatttgacggtacgtattttgtgacaacgtttatccaagagtgaaggtgttggttattcttactttcctatatgtgattttgaatctccctatttctactcggatttcacttcttatccccttctggtactaagtttgtaagtcagtcaaagttatattctgtgattaattgaatagcacgttgcattcagaacgctgagggagtgtttggttaggagggagggggaatgtttgaagatgatggaagtttgaggggtgaggagttttaagagcgaactctcgtcttttcaatatttgggtagaggcaggtaactgagagaaaaaaataagttagtatatcatcacttaaaattcatttctcactcaaattcatcataattctcatatctcctatcaaacgacagagattaaaaatgaaacttacaggatcaatcccttcattagcttattactctaaatttccaatctccttaccatgagttaccaaatatgtattgatgaaagttataagtccactttaagggttcctttggaacatgactcaaaatacaggaagaggaaaacttaggattgaaatgtcacgacatgaaaaatcctccaagcaatcaaactacaggaatcattcaaacacaagtgtttggatatatcgaacgggtgagagaaaattgagattacatgtttaatttgctagagagaggaggagagaacatgccttaaaaatcacaaaagaattcgaaacaacgaggttagaccccatgctagaattcctcgaagatgtggagagacttttcctatcccttgaaatccctttgaaacaatcgtatgatccaaactaaactgctcatatagtaggagaatttcttttgaattggattcctccatttttttcctcatcataaaaatcctttaattcaaataagccctaatttccccattcatccaggaccaaatgtgtagtagtagtattaaagctttattattcttttccttctttgaaactttagtaaatgtttgctgatcatctccgatgaccaacatcagcagtataatatgcttatcttagtagaataaggttatattgaaagaggattctctgcagtactgttcactgacacgtggatctataaggcataaacccttgtgcccagtgagtagcactaccctgcagaggatctccgttaggttatactcccttcatcccaaaataattgtttttttttgttagtttagcataaattaaggtttaagttaaaatactatactactcttcactaaggttgcgttccttgctgggagatcgagagagaaaacaacttgtttttcgcgcgcacgctacccaaactattaaacgacgtgtatttttataaaaaaatttatataagaaagttgttttaaaaagtcatatttatccatttttgaagtttaaaatagttaatactcaactaatcatgcactaatggctcacatcgttttgcgtatcttctcaatattctcttttctgtaaatgatatggttagaatcggagtggcaattggagggtataacaaggagaaatttaatataagaagatggataggataaatagttcctccgttcttataacctgaaacagaggtaatattttagagtacaaatattttggaaaaaaattgaatcctaaaaggatattccctccgtactcgcaaaggaagtcgtttaggacaatgtttaagtcaaaccttagaaatataaatcatgaataactcttaagttgttgagtttaaaaatgtaaaaaatatatgaatagatttgtcttgaaaaatactttcataaaagtatacatatatcatttttcaataaatatttttatagaaacaataagtcaaagttgtgttttggagactgtgttactatcttgatgagtacggagggagtacctatttggaacgaagataatatctatcagtattattttcatatacaagacttggtttattttaagattaaaagcgtaaatactactccatccatttcataatgtttgacaccgttgactttttagtacgtgtttgaccattcgtcttatttaaaaaatttaagtaattatttattcttttcacatcgtttgattcattattaaatatattttcatgtacacacatagttttacatatttcacagattcttttgaataagatgaacggttaaacatgtgctaaaaagtcaacaatgtcaaacatttgatacggagggagtattcatttgtctcaaaatatcatggaatttttttaagggacagacggagcacgtaccggtagggcagggcaggagaggacagtagggcggggcatgtgacatcgtgacaggcgacgggccacgtggcgggtggcaggggaggaacggtcaatgcgctcgccgacgacgtgtcagcgaccagtctgcccccctccctcatcagctcaccgcccagtcgcctccccctccactgcagatttaccgtcctgccccccacgccacccctcgccaccaggggcacaaccgtcattccgcggccaccaggggtgccacctgtgtctccttccctcgcctagtgggagactcgagactcttgcttctttctgttcgacatggagctagcaacctccccacccttacttaggaccgctttaaatcaaagaatttatataggaattttataggatttaaattatatagaaaattttcctatttggttatttgattcaaaggattgaagctttccaaatcctatgaaattcctatggaatggcacattgcatgtggattttggaggaaatttagcaagagctccaacctcttggaaaaattcttttgagtctatctctctcatccgattcctgcgtttttactgcgctccaatcaaacgaccattcctgtttttttatgtgttttgcaatcctttgttttacattttaattcctgtcagaatcctgtgtttttcctattcctctgttttttctaccctgtgattcaaagggtgttaacagtgaaatttggtaatcggcaaagacgtcatcggcttagaatcattatcggctgcagcatctcggaatcagccgatgggagttatcaagtcgccaatagtcggattcctgctatattcggttaaggaaatcaatctactaaagg

SEQ ID NO: 8758 - DNA, 45370 bp, Oryza sativa
ggcggcggcgaagccgagcgcctcgccgccgccgccgccgccgccggccgccgcgggcgccgaggggaggtccagggaggaggcattcgtccagaacgtgaacatctgctgcgcggtgttcgacttctccgaccgcgggaaggacaccaccgagaaggagcggaagcggcaggtgctcatgtcgctcgtcgactgcgtcggcgccgccgaggagcccctcacggaggcgatgatcgcggcgagcgtgcgcatgttcgccgccaacctcttccgggtgttcccgcccaaggcgaggtcgggcgccgcggcgtcggagacggaggaggacgagccgttcttcgacccctcgtggtaccacctccaagtcgtgtatgaattgctcctccggttcgtgacgtcgccgatggtggacgcgaaggcggcccggaagtatgtcgacagctcgttcatctcgcggctgctggatctcttcgattccgatgaccccagagagagggacagcttgaagacagtgttgcataggatatacggcaagttcatggggaatcggccgttcattcgtaaggccgtcagcaatatcttctataggttcgtgttcgagacggatcatcacaacgggatagcggagctgttggaggtgtttggcagtgtgataagcgggtttgcgaagccattgaaggaagagcacaagttgttcctatggaaagcgttgatcccgcttcacaagccaaagacggtgggtgtgtatcttccgcagctgacgtactgcatcacacagttcatcgagaaggaaaccaagcttgcagggactgtaatcagaggcctgctgaagtactggccagttacaaacagtcagaaggagatgatgttcttgggggagttggaggaggtgctcgagttgaccgacatggctgagtttcagaaatgcatggtaccgctgttccgcaggattgcaagttgcctgaatagctctcactttcaagtaagttcctttccaaattcagaactttaatttgaattaggtatcgattaatgtttgttcatgaattgtttctcttctgtgtatcacgctctgcatttatgtttgcaactatcctgtcctaaacatctgaattgcttcatgaagtagttgcaaagctgtttatcagtggaatctaattcttattttaatccgagaatcgctttgggatctctttcctttttctctgtgctttttctagtatattagtgttacctacacggtccccttcacctttttatgacagtcattattgagaagatatctcagcagtaggtaaactttctctgtgttggctaaagtgagaccatacacacttcttgttcactcaagcacaattggtggcctctaacacttccctttggtaggcttcagaccattgttaattaagtatacaactggagctgaaagtagtttaaattatatagttctgctgtgcatcttggctcatgaaccatgacaagaatcaattaggttaggtacaattctaattcccattgtcattccatttgatttatggaacaactaatgacagtcactctccccattatggaccctaattttctattatctactgatattctatttttctggcatatgctgttagagctgataaaacctttcatcggtaagttaaacgtttttacttcttgaataagagagggcccttaggagttaggactgaaacatgaccagagctgtgatagcactgcagtctgcggtcttcatcttttaattcttgaccatgttaaaatttctcttcccgaaaaagaagttgcccaggaaactaaagatctgattttaattatgggcaggttgctgagagagccttattcttgtggaacaacgagcacttgttcgatatgatctcccaaaatcgtcaggtgatcctaccgatcatatatccagctctggagaggaacacccgttggcactggaatcagtcggtcctcaatgttaccctgaatgtcaagaaaatgttcttggacatggacgagagattgctcctggcctgccagaacaacttccaagcggaagaagagaagcgagccgcgaccgaggagcggcgaaggctgatgtgggagcagctggagcggaatgccgctgcggcatgccatccacatccagtgatcaccactactgactcaagctttccttcacccccttcatcaactcctctggtagctcccactgtgacatgacatgtggatcaaatatactccatttccacttatttgttagctagctagatgatgatgaagttgcttgcttctcctgggactatacagaaggcattttgttaccttcgtaaggcccccccatgtcaaagtctgtaattaatagttgatggtttgaggacaaaatgacacttgattttttcttctttttttgtggtgtattctcgagtaatgggcattgctttctaggcaaaatctttgattggttcatcctgagtgagtgatctgtcaaagtgtggacaacaatgatttttgtgtgagagaaatgacaagtttgcagccgttctttgtggctaagaacttctgtctatttttaacaggcacatttttagctacagtgtaataatatcagatgcacttgtatagaaacaaaaagggcttcgggaacagcttaaacaaattgatttgttatttctgttcaatggactatatctggatggattctatggagaagaaaacaagagtagctgagatttcagaagaaataaaaaacatctctttcaacatttgttgtaggttatctgcctggtcttttcaagtacttttctttgctaaaccacatgagaagcatctcttcaaaaagaggactaactgaaacattgacaaaacaagatttgttgctcaaatcaaacctaaaacaaataatagaagaaaatgatggcaaggacaagtatactccctgacgtcaaactaacacatacataatcttctggaaattatctaggcccatctctgatgcgcctacacttgaacttttttaagattggaaatggtttataatcctacacttgaatgctgtacattagcagcctaacggattgatacatctggttacaaatgtgcactacatattgtgttattcaaagcacggattcagtcgtcctgtctccttgagtatggataccacgctgctggaattcaagtaagaattccttgacaagtgtgtaccagacgctgttaaataaatatttagcacccacaattatgcttaggtggataaactgctcgaatctcgattacctgcctagtggccgcaattattggcccttaattgtgaggttaatccgtggccattttgacagcttgagtttcacaaaaaaatagcactaccggttttaattgttaacttaagaaataatatttgatcattcgtctatataagtactatttattttagtgttactttttctattatcaaatgcactttaagcataacttatattttacattttatgctaaatttttaaacaaaatgaattgtcaaacgtcattatctaaaaatcaatatcgtcatatatttaaagacataataagagtatagtttttaaaaggatttgaagaaattccagcgttccaaacagagattcatcagtggagttatctaccagtgttcatgtctactagggaaggtcgcagtttgacgtgtttccaagtgatatgttttcagttcagacctgagctgagtttccttataaaaggaagcctcaagctgggcatcatgtgacccatgctctgttagtgccttctgtctatctatcccccttgctggtttcttcctcctcttctgcgtcgtcgacttcgtctccggcggccgcggcacgggcggcgatgtacaaccctccggcggcgcaggagatgtcctactccgaccatgtcaagaagcgccatgaggacaaaggctgcctctatgcatggtgatcctcttcttctgtcatgctcttctaatctttcagagaagctgttgatgctattttatgttgcttattaatttggatgtcatctaaactaggttatattctctagattaggatgtgatctaaggtatttttcaaagtagaaattaggacatgtttgttcatcttggatgcactgttcaacatttctcaaatcatcagatagttcatctagtttcttcagacaagctgatttctgcatcatgtgagcattgaacacactcctaaagtcctactagattcagagatggatgagctgaagtagttagtggtcattttcatgtccaagaaaaccaaagatcatgtgagattttgccctgatcaagagggcttcttcaccatttgacaccttttttcctctgtttacctgtgatctctttccctttttgttgcagcctgttcaccctctgctgctgcttctgctgctacgagacctgcgagtgctgcctcgaatgcctctgctgctgctgatctccttatctcatttcagcagtcaaaataatgatgatgatatatcatatatagtcaggaataaaagatataatatgccgtttgaaatgcaggaatttatttttccgatttcaaaccatagtttgttgttgtatgtgtactggtgacaatatcatggtagatgaaactttctgaaaatttggtaggtatcagcaagatttgatctttttagttgtgctcccatctataaaatgaataaatatatttaagctgcctgccgagataaaattattaatcagaccgtaacaagcatccaactaatataacaatgggataacgtatattgtacaaatgggatgttcatgacaaagcgcacacatttctgatacaaagaaagatttctctattcaatgcgacatctgtattaagatcactagagctgaatctatccatacaaaaattggattctgtgtgaaaaattgctaaaacaacagttgcaactattgttaggaatgcccagaaagaagcaactgtcataagattttctgtctgaatttcatcagttgtattgtatgagaacctgtgatgtgttgctactgcctctaccactactctacacaactaagacctcagaagatgtatacgcacgccaatgcagtgatcagagtagtcaagaacacagaaactacattgacaccattgttgtccagtatattccgtcctgaaatcctggtgaccgtcggaccgtctactccaaccacctgcataaacaaaattcagaagcaataaaaagaaaaaatcaacttctgattcaaaggcaactagggtatatagacatctaataacatcaattgcagaaagcaccatacctttttacgaagactacagtacccactgtactggagtgttgcgcccagcaacgaatcgatcagacttccacataggccagctgctgtagctaagggtataaccagcagctgcctccagaatacatcagaagaacactgagtggttaagaatcctagtagcacaaatgtaagcccaatcgagaatccagcagccgctgctgcgagaagtccatcaatggttaccccgccattggtacccttccgtactctctggtgaagttccatgtcaaaagcaacagtgattatatgtactgatatttctctaattggtaaaagaggaaaatgcaatgtttaccttgaatgttgtgataattcgtggttccgctttgctgagaatgccgagctcagaagaccatgtatcaccattgcagcaagcataatgtccaataacaccaccaatgagggcagttacaagactagattctctcgtatccaagcacctatcgctccctcctgtgacaagtgctatcaaaactaccaagacacttgcaatgccactgtttgacaaaacttgcttcctgccaataagagtggtgtgcacctgcattagaaagattcagaagggtactttctgaaactgaaaggcatcttattcatctcaataacggtgacaacagtccttaaactttggatcccttttaaataggtgattctttttcctttgaaaaatgcctcttggataaatttgggagaaaatacaacaagacaaacttcatgaaaaatgggattgcgttccgagttgaatcttgaaaggaagtaggcatacctcaagttaataaggacaatttgaacagtttaaacagtttcaaatgttgtcaaactacatacttcatcatcaaatcgagctcatttttatttttcacaatttaaactataccgagccagcgaacatggtagctgtacacactacagaaacatcacatgaatcacttaaatctaactcaacgaaccccaactttttatcatatagcagcactatgaggccctcaattcccttgttgcacaaataaatcgcatatatgttctaccagatagctattttgcctttctagagatttaccacattcccctactctactacaatcagaaccaaaatctgaagcttccactctgaatgtaaacctgccaattataccaaaagccacagcgcaatctcaaacatgtccgaggcctctctgatctctacgatattaatttcagatttcacatcattctctatttttcttggtcaccatcggaacaagaaaagaagaagaagaagaagaacagagaccatcttcttactcaccagttgcgctgccctccttccttgaagtcgggatcaagcgcgcgcttcctcttctcgccgaccctcgtcatccgcgacgccgtgaagaagaacaccagcagcatccccgcgaacctacgatgatgattcgtctcaaaaaaatcacatcagaaacaggatttttttatcaataatattttttttaaaaaaaagagaaattagccgccctttcacctgtacccagcgacggtgtgggccaccatggccggaacgccgacgaacaccgcggtggagtcgacggacttgcgccgcaccgcgcgcgccgcgatggcgccgcccgccgccaccgccaccgccgcccggatccaaactcctccgcctcctccgccgccgtgatccattgccggcgacctccacctcaccaaaccggatcgcgcacagcagcgaagaacaccaaaaaggaatcgatcaaaccactcgcgaacggaacggatatggatctcctcctctcctcctccaactccaagccagtgcagccgacacacgctactactactactgacgcccgcaaaagatacgaagcctttttccgcctcgaggcgaaggcgcgtgctccggtgtagaaattggcggccgaccagatgcttcgggaggatcgccggcgagccggcggcggtgggctcgccggaatcgcgcaggtgaaggtgaagcggaggtaggagagaagaaataagcgtgagatctgacgaaagcttgatgcttttctctcacgcgagtcgcgagagacttgtatttgtaagcgtgttgcatcgaatcgatgggcctgatcctacccgttcatctcctgaggacgcatcacagccgtacaaacatttttcgtgcacccatccaacggtccaggtcggggcagaatcccaatcctgatggtaagatagtcttgtaattcttttttttttgagaggtgatagtcttgtaattctagattatattctgcttaaaaaaacactaataatgttcagaatttcaaaaaaaaaaataaagaagaaataaggttgcgttgggcaaatcccaatcctgatagtaagatagtctggtaattctaaatcatattcttattaaaaaaacactaataatgttctgaatttcaaaaaaggaaaaatgtaaggttgtgtttggcagggctctagatctcatatttatggtacatttgaagtttgtatattaaattatattgttttaaaattttaaatttcatctaaaataggaacaaaatgatttatccaaatgttatcaacgagatcacaggtctagatctataaatttgtggagttaggaataccaagctcaaaaaaaaaaaaaagaatccatagctatgtcaaaaaagggcctaatcatatgctgattccatgcatctgtgaacaaaaaactaaaaatctatccaggatagtgtacagtacatgttgtttctgaattgagacattagcttttagctaagcatcatctgaagggaaccagaggaaagaacatgacttggtctaccacaactgctattgccactgccattggatgtttggattgggctaaaatcttcccctgcctcgccctcgccctcgtcctcggccccttcctctcccccgtcctcgccctcgaaaatctcttctcccgcctcccgtttcttcaggaccgctgaagctgaacatgctcatccgcaaacgatctgcgtctgaactctctggcactccctgcaaaatagcacaatgccatgggaatcaacattcttggaatggcggtaatggaagttttgaaacacaaaggggttctgatcagggaagttgaaccgacataggagtcttcaagatctagttgctcctggagctgccttgccagctcctcgtctcggctggtatcgtcgatgtagctttgtgctgtggacttcaaaccagcggattttcgcttctcccattcatcgagggtaaatactggagtatcttcttgcctgcctttacccttgaatctatggccccgaccatatctgtcttcgggcgcagcctgggtcattttctgcagaagcttctgtgcagtggcttggttttgaacaggaatagcttcactgactgcaacgccaaagcaaaaggtttgtaaccaactgccaccaatatactatatatataaatattttgaatggaagccaaccctcttttggtctgccatctgaaatagattgtttgggttcaactgcagactctttgttctcatcacttgaactctcattgactggtttgccactggaactaactgacacattctgacgaccgacttccggtttcctagccttattatctgctatgacataagaaaggagtccaagtggaccacaagtcacggaaacaagcaatatgaactccatatatacacaaaaaaaggaagtaatttgtatgtcaaaaacacattcacttgctaatccaaatatattgtcagcataataaccagatgcagatcaggttttccaactaaagtcatgcaaaagtgcagttcagctccatgtttttcagaataaagagtattttttatccaaataatgttatttgtttaattttgcaggacttgacaataatctccagtcagattccaacacagggaaaatcttactagtgagtaacacaactgataatcacccatattgcacccaaaaggaacaccctcgtttagaggaaatagttctgaacatcttaattcatgcatatagatttcaccaggagaatcgaattcaaacccttggtacctttatatatataacaactgccacgcataaatgccaactttacagtggacataactaagggtaaggggtgtgtgtgtgtgtgtgtgtgtgtgagagagagagagagagagagagagagaggacagaacaattaccagaataggtttgagaacgggatgtcctactaggacgtgcttcaacatctaacttctcaaatggtggaggtccaactccatcatcattttgagacaacctcaaggatgaacgagataaccctgagaatttctggttcatctgccactcttcatacaatgattggacaactccccccatgatacttatattcttcgcacttaagcacaatatgccattatgtattggaatcttgttctcaagacaaatctacatgagtcgtaaagaaggagaaaatacatgacgatgtaaaacagtcagtaaatagcaaaagcatttaggtctgaatcacggatttcaatattgtttatttgacaaggtatatattgtgtaaataatcactaagaaaatattctactgttctgtatcaaaactatgctgcagtttgctcataagcaatgattaaggatgaaactcaatagactgtaggacagagacagacagacaaacagtgggaattaggaatgctatctcccaaccccatcctgatgatgcaatataaatacaccatctctacaggtagctcttacacaaacctcatgcagcatttactaaggaggatttcagattcaatgttatcaaggagcattcttgcattttgttttccaaacattattcatgtgggatgtgtggaatagaaacacaccattgatcaatgagctatctgagcatctctccttctatttatctagttccggtgacatgggaactcaatactgaactagttaggagcctaagatgaaattcagacaaagatgaaactatgtgcagagactctgactatgtcctctaacctaaaataaagcagaatgacaaatatcagtgcacatctagaacctagatcaagaacatggtggactaaccttagtacctggagcaatatcttcaatgataaacgggattgggaaaaactctatcgctactgcttcagaaattccatcagtcagaacaaagcgcagaaggcggtgttgctgtgggttcttaaaggacgcatcaatgatgcttctatatatatctcttactgatactacctgcaaacaagtttgcattaagcagggatcaaacagtaaaaaaaaaaatccaaaacacaaggacaacagttcagctccacaaacactagatgtaggttcaatcatgatcaggaaagacaagcccatgtttcaccattgagatagacaactagacatcattgttccacagaggacgttcagatagccaccctggaacagccaagaacatctttttcatctgctcggatacaaaacccgacccatccacaaactgagaatgatacaacgcaagccccagccacatgattgaaacgatcttaagtaaggccattccctagcatccagacacaaattctcaaccttatgtccagccaagaacaccatcgtttcacaaaggcctgacacatatccatacaagaacagccaagaacatcttttcgtcagtctactcggctacaaactctggccgcttccacaatctggatacaatccccagccacagaatcaatagcagactaagaactgttcctaaatgaggcatttctttcccttattttttttaccaggaataaaattaattagaattactgagctaatatcgaaacaaaagaggggtgtcatcggaacctgtaggacgatggggccatggaggtaggaaagccgcctccccgtggcggcggcggcggcgcggtcagggagcgacttgccgccgaagagcctcaggtccacgtcgacgagctcggtctccacggcctccggcgacggcgagggggaggcgtggagtagctcctggatgatctcgttgctggggtcacggaagcaccacccgcgggcggagagggattgaaggagcctctcctgatgaggggaggccgacgaccccggcgtttccgccgccgccgccatcgcagtcggggggcgaagtgttctccggcgaggtctgggagagtgctagggtaggagacgtgaaggcgggttttgtggtatacgccatagcagttggaaagcggacatttgtggtgcttactgcttagggctttgttgtttagactaattataagtcagcttaagaaccgaaaagtctaaatctaaacaaaatattttttctggttgaatctattaatttttgataatttcagtagtgtcgtatgaatgtttggtttgatgtcaaatttcaccaacactaataccaaattgtcttgaaatcaaattagccccaaagctcaagtggatcatcaaacctggagtatcgttcagtgtcaacgtttggcagattcaaagaaaaaaaaagaaacggcatatttgtaaataaaatataatttgtgaataaaacttttatatatgtgttcttaactattaaaaacaaatgctagaaaatcttataaattcaaattttagtttataaacataaactctaaaattaaagttataaatttaaattttagtccataagcatagcgaaatgatgaatgtgaactcggaaggctgaacacagggacatgcagccgcgggcaacaagccaacaagtgctcctgcagcagggtgtgaaaaaccgccggtaaccgcgcggttaccgcggttaccgcccgtaccgcgggggtacggttacccgtaccgcgcggtacggtttaataaaattcatccaaattcaaaaatttaaaaaaaaaagaaaaaaatcaaaaaaaatagtgaaggtagtgcttgatttatagtgttttatggtgaagaaatttctcaaaaaagagtaatatttattcaaatttgagagcaaaacggagaataaatttgaaaattggaaaaagaaaaaaaaatgggccggcccgttactgtgcaacccattacacatcgcgcggtaaccgcgccaaaccgcgtggttaccgcgtcaaaccgtgcggtaaccgcgccaaaccgcgcagtttgcccgaatttttgaattcaaatttcgatttgtaaatttgtcgcggttttgcgcggttaccgcggttaccgccggtaaccgccgtaccgccgggtggcggtaaccgggcccccggcggtttttgaaaccctgtcctgcagtcctgctcatctgccttcactcctcctcatcgtctttttttttttttttaactccttatcgtcgtagagccctagattcgcacgaggctgaggtcccgcagcgcgagcgatccaaagatatccgaggtgacgccgtgtcatccctagttagccgagccaatttttgtttatagctgtggattacaaaatcctcttctcatctgaaacgttctcatctactatactatcttcaggttcaggttcggcctcgcttttgagcagaaagcccaaaaggtttcagcttgggaagagcaaaatgcggtgagaccagaataatagatggactgtttctactcactccgtttttctcaatgtaaattattctagcatttttaatatttatattgatgttatgaatgtggaaaatattagaataacttacaatatgaaatgaagggagtagtaaacttcatttacaaatcccattttaagacgaaatatttattttatttattttttgacaacgaatttaattcggtcaccacgaataccgcatcaatattgtgctctctgtcagatcatcagacgcaatattgtgctctctgtcctggaatctctcggccatcagttattcagttggcaggttggcagtaattttgacgaaattcgttgaagaatgatagcggtggggttaaaaacgaaatcttttcgtcctctcaccataataaagtttctctttttatttgttggtcaagccctttttgatctttttttttctgtctcatgcttatcctccaacttcgcggcgcaccctccgcaaacgtaagccaaaaagatcaggaaaagagacagaaaaatcggaataaaagagtgatagatagatagatagatactccgtagatactagatcagcagcgatttttttttcagtttttgttttttcatttcttcctctgtcttgtttagatgttggggttggtgagcccttggggggaatcagttggtgactgactcgagaagttcagaggttgttgtctccgaattctttaaccccaacctctcctcttctcttctcttctctcctcttcttccttatactgcttcttgggctcgccgctgcgctgttctttggtcttcttggatctctgaccctaacatcgtatccaacttctccagttcttgttcttggaggggtgaggaagaggaggaggaggaggtgagatgggtagcttcgggaggctggcgaggagggccgtggagacggaagcgccggtcatggtcaaggtgatggagaagaagctccctgcctcgtcgaaatcgcatctttcccttctgatttctttggtcttgattgatgagttctatctctcttgtgccttgtgctcttttttcagatgcaggaattgcttcgagggaacaaggatgtgatgtcgcttgcgcaggtatcggatcgcaatttctttcggttatctgtccaatgattgtgtgtgtgtgtgtgtgttttcatgagagtaccaatgagtttgtgttgttgttggtacttggtcacaggcattttgatgtttgcatttgattgggaagagtgttcgaaatggattagtgaaatgatcatttgtattgttcctttactgtttgggtcaattgtctcagtaaactgttcacgttgtaaggtgaatcaggagagtttagtacatctgataacatattgtgctttgtataacacaactatttatcaagcatggaatttggaaactaaaatggttgtattcctgcttagttcctgaaaatggcgtttaactgcttatgctagccaaataagatatccaaatatatatattagtggcagtggtgtgtgtgctggcctcctattactgccaacagaacatgtgatatttactggaaattatttgctttcttttaaactaatgtaaatcttggatgcagggagttgtttattggcagcctcctgaggcagctatgaataagattaaagaaattgtatgggaaccatcaatcagtaaatatggctctgatgatggtcttcctgaactccgagaagcacttctcgagaaggtaatttttcaattgggatttgttagataatggtttccatggcccatgttatcaagccttcccagttatcacaaagcaattaccatgtgagacaaatgcacttggttgcctactgctaagcctttatcatgtgagacaaaggaacctgtgtgcctactactaagcctttgtcatgtgagaaattgattctggaattttttttacctcgatactgagagagtgagagtaaggccattcccaacccaaaacattagacatagtttccataaactccacatcatcaagaaataagtactagacactactcttccaatgcaaacactactatttcatacttaaatttaatgctacttatctcacataatgtcttggatgttgtgtagaaaccatgtctcatgcaagacatagtttcctcctctttcctcatttattcacttgccacatcagttttcatcctatgtgacagcttatttaatgctatggacactatcctagtcattgggttgggaatagcctaatatcaggaatcacatgctatccttacaaaattttatcaacgagaaagtttcagaaagtatctctcagcttctgtgggggcttgggggggagggaagctaagggcccctttgaatcgtaggattgagaaaacatagtaatagaaaaaacgtaggattttgataggaatgtaagtgtaaaatagaggattacaaaacgcaggaaaaacacaggaatgaccgtttgattgaaccgcaggaaaaacgcaggatttggatgagagagatagactcaaagaaaagttactaagaggttgaagctcttgcttaatttcctccaaaatttctataggattgttcattccataggaattttaaaggattggataggattcaatcctttgattcaaaggacttcataggaaattttcctataggattgaaatcctccaaaattcctatgtttttcctccaaatcaaaggggccctaagctctgttgagagctataatagttcaatgctaccatgtaacagtgcagtagcacagttctgagacattgcccttggtactaccgatgccccctcatgtagagatgggtgttatattcactgatttctcttactgcgataatattttattgaaaaactaataatatgaatggtaattattataaacatgttcgttgccttccctctattttcttcctgaaatttttagcatacattttgcagctgcgcagagagaataagctaaccaagtcgtcaattatggttacctctggtgcaaatcaggtaatgcacatgctttccagtttccacctgatttattacagctttgtcatcttattccggttttcctctgtgtattttgccttgtttagctagactataggatgccaatttgtttttcttcttcagttctatgagatgctttcttacttttctgtatgactgcttcacctaaaccttgtttaccaactaggttagccaaataaaagtcaaataaagtgatgtcttctatcaaattttggcaggcctttgtaaatgtggtcctcaccctttgtgatgctggggatgcagttgtcatgtttgcaccatattacttcaattcctacatgtcattccagatgacaggagttactgacatattagttggtgcaagcaatcctgagactcttcatcctgatgtcggtaagatagttcttccctttttctttttgttggagaaattggttagatgtctattatcaacagtcaattataaactagttgccactttttttccgcttctgagatcttccactttgtaagttgataagttctatcacttgatacattttctctcagttcaattgagagctatatggtttttgatcattcgatttggttcacttaaggactgtaaaagaatagttcattctggtagtacaatttatatttgtttaataaaatgcagattggttggagaaggttctgcaagaaaacaaccctatccctaaacttgttagtgttgtaaatcctggaaacccctctggagctttcattccgaagccgatgctcgaagtaacctgtctctctcattcacagttcacgcacacttgcattcgaggtgactttaattatttcttaatattgcaccattgttccagagaatttcagaactgtgcagaaatgctggtgcatggcttgtagttgacaatacctatgagtaagttagtactcaattactgattattgctcaactgcaacgtcattttggtgcttcttttctttctgttgttgataaagctcctcagtcccttcagaaattgatattacttaaagcaattgtaaagacgaggcactacgaaagaatgaactacacatggacatgatcaccttaagtagtagtttaaaaggacagttcaccataagcagttgagcaactgtgcttgacttcttgaagttgagtcctggatgacgccctctctgatagattaaataaataggacttcaagaatgtggtatctctttcaaaaagtatctgcaaaccacccgccagtaagggtttgtcaaatgtagttatcttcacatgctcagcttattcaagtagggaaaatcttccatttcttctcaacactagaattggacacatggaacaactcgttttcttttgaaggtcccatttcagttcctcaatttcagtgatgcccaaaataaaccctccagtcacttacaggcagagtggaagactcactgacaagagcctaaattgaatcacggattagactcttccctcaagaaaagtcttactttcagcagcctagcatccgctgtgcggcattgggaagaatatatctgttgttagttctgatcaaatcagaaatatttgatctcttgctaatctacccttgctctatatttcagatcatgtttaccttttcttgtctggctctgtagttgagtaatggaaattgatattagtttttgccatttccttaccctgatgttgatgttaaaaggatgctatgggtccttttcgaatataagcttgatggacttcccaatgttaatacaccaccgaatttgacatgtgtaaatcttgtatatgataaaagtataatttggaaactttcaattatcatcacattgatttttagataatctgtattcaaaatgtttgcacgaatactgaaattcaagaaaacattttctcggaagaattcttttccataaaaggtgactgaccttttactttctgtaaaataattctacatatggggctattttggattctgtataactttgatgttgaacttgcttgcaaaattggtgggtggtctccaggtactttatgtatgatggaatggagcactattgcttagagggtaatcacattgtcaacctcttctcattctcgaaggcttacggaatgatgggctggcgtgtaggatacgtaagtttgcctctctctctctctctctctctctctctctctctctttctttcatcctctgcttaggcttgaaaatgctgatgtaagagtcaatattgagttctttcagtttcatgaatttcccgcatccacttgaatcttttaccagggcattcccttaaattatcaccatagcaatgcagtataagtaacttagtggctgcacaatctgtgttgatcagtgagtcttacaagaactgatgagctgactgctgcagattgcccacccaaacgaagctgacggtcttcatgcacagctgctcaaagtgcaagataacatacctatctgtgcttccatcatcgggcagcgcctggcgctctacgcattagaggctggtccagaatggatcagagaaagggtgagagatctagtgaaaaaccgtgaattgctcatggaagcgatgtctccgcttggcaaggactctgtcaagggtggtgagggtgccatttacctctgggcaaaactacccgagaaatgctcagatgattttgaagttgtcagatggcttgcaaacaagcatggtgtggctgtgatccccgggagcgccagtggaggtcccggatatatccgggtttctttcggagggttgaaagaatcggatacaaggcttgctgctgagaggttaaggcgcggcttgcaagaacttgtgactgagggaatggtacagtgacagcccaatggatgcaagaaatacatgacatacaaatcacaaaagtgaaaattttcagttacataataattctgggattagttcaagagaagaaaagagccaaaatttcaagattacaacatggttgttagaaaatgctgaagcttttatttcagagaacttttgtcacattggatttcctagtggaaatttgatttggtgggttgagtagagggaaaaaaaaagactcatccaccctgtggaataccattgtcattaaaggggtattcatgtttagtacttactgttgcttgataacctctttccctacaatcaggacagcagctgtacacaagtaagatataataagatataatagcaacaataagtgttcatgatgtgcttttatttcagcttttttatttatttcttcggttcggatcacttctcgaagctcaaaaactgaaaaaaatatgtttcttgaacttgttagcacttcaatttctgaagaaatgtgctcgtgcagaatcagacattgcattttttttatataatggtttatattaaaccggcatttacatccaaagtgaatgtatagccaaaatcagacattgcatacaaccatgattttagttcttcaagcactatcacctccagttcctgtaaaactccaattgctgccaaaccagtgattgtaaatttagagttgttttcgtggattattgatttgattataggaataaattaaatattttaagaaataagctttactaatagcttacattacaacgagtgatttaagcaatagagtagaacaatccgtttaaataattttatgaataagctaaaaagaacacgcgcttcggatcttggaatagtttttcagtcactgcatgttgtgttttttttgctgtccacatacttctcatctcttttctcctccaacctgtgtccttttcatcgtacagtgatcgatccatcatcacagcagcgacatgtgattggctcacattaaaacgccgttctctgaaaaaagcaaatatgtttcctccttttcctcctctttttatgtaaagagatccatgaaaatgatgtgcactagcggtgcatcaaatgcctctcttttttttctttgcaaacgtgattgagtgagagagagtacatgagagaaaatgacagcaatcttcaggctgaaagaaacatagtatcagcagcatataaatagcttgatacgatgcaccagaaaagcaggttagaagtaatccatctactccgaaatataaagatttctaggttgcttagcaaatactcctttccaatgttaggtctaaagatttctttttactcacttcagtagttcagattttattttttttgaatctaaattcttgtattcccttttcaagtttgtgattggctttggattcattgaaatgatgggaatcataggaataagtacatggatgtttatattgtggtataaatttaagtcctaaaaatccttatatttttggaatggagaaagtagtactattcagcaggggttgataagaaaagcaataagcaacaatgatcacaagatcagcatcagcatcagggactcagaatgtgtgattgccaacaacaaatgccaactggaggagctatcagagactgacagttcaagaaatctgatgctaattttgtgttggagactttgagaggatgtgtacacacatctcattgccagatgaccaataatgcattgaaagagagagtgcttatacgggagtaaatgattgcagaagaaagcaggtggaggcagcactgcacttgtccctgcatgctgcacaattgaaatgcaattcaatgcagagttgcagtactgccatcaaagtccctggattaaggggtagtactgctctttacctgctaatctaacctgctactatcatgtactagcagtgaaattgctcacatttttttttgtatatattttactagcaggtgcatatatagcatttcagtaccacttgttctgaagatgcaggtagcaagttcagtcaaccactactggtaccaatcatcaagcccaaccaacctcacctagggtgcattccgaagtgtcgatggatgctgctgaaactgagtttaagacacaattattcgaaggtatacacgaacgaattgaatattacaaagttgatcaatatccttattttaaaagagttttccaagaatgccaatagtcggcgtcgtttaaggccccatttgaacttgctgaagatggacattaagtacgggcacgtaaaaaaaaagttattagcgtatgattaattgagcttgaaaattggatttatatgatatcttagaacaacatctatataaaacgttttcgcacaaaatacgccgtttaacagttaccggatcatattataatccaaattaatgtgtccttaaactattgcccagaaatgcaggctaacctgcagggggtgacacagtaactactgtatatcgtcccttgccgccttgcgtcagagtcattcttcaggactaaaataggatgaacagtatatgattagtaccaagaaatggtcacatgcattgctgccccaatgcaactcaaagccaagaaactatagtaataagattgagacagagagagaagtccaggcaaggcaattgcaaacgaacaaataattgaaggacaagagtatattagccaagtactacttgggggctcactgcaagctacagtactacgtactgctacagtatgcattgggttttgttgatctgggcacatttagggcgccattgatgcctggctctcaccttttttacaaagaaatcaattgaatctcgctttgcattgcagcatgccaacgagcaagctaccgagggtgtgtttagttcacgccaaaaatgaaagtttgattaaaattggaatgatgtaacggaaaaattggaagtttgtgtgtgtagtaaagttttgatgtgatggaaaagttggaagtttgaagaaaaagtttggaaaacttggcctgaattgagttgaatcgcttctcttctccaaaggtcaagaagaggtgttggccatgtgtgagcatcgcagcggccatagttgaatcaatgcattgcgttcgtatatataatggtcccaaatgcaagctacagctgcaatggccatggccatggagtagagagggagagagagagatgcgtctactaacttgctttgctgatgatcatcgacgatttgacgaagcagagacgacgaacggacagtattctgtccgtcaaaaaaaaatgatgaatctagacacacgtgtgttagtgtgtgtccatattcattcctagagtttaattttttttggacagaggagtatgtacgacaacctactgcagcagtagcaccacacaccgacgaagacaacgtatgccctcgatcggtggaatggaatggagggatatcgctcttaaaataaacaaacatattaaaaaatgtaacttattctattaccttgaatctaaaatctgaacatatatgtcctttcaaaaaaaatctgaacatatatcacattttttttgttatgttgggatagagagagtatgtcatgtatttctactactttctctatcatatattaagttaatgtagtataagacatgtgatttccattaaaaaaaagtataagacgtgtgatggttgttggtgcgacgaggaaaaccgcgcatctggagcctggaggtagtggctgcagaaggggaaatcggcgaagtggtagctagcggcagccggcaggcaggagcagcggacggacagacgcacgaatgcatgattgcactcacttctaagaaagaaataaaaaaaattgtggagtttcagagttcagggtttacgatggatcaagctgttacctgtttttttttaaaaaaacattttaactcttttaaaaaatttattttttaaatggatttttttaaaaaacttatttcagaaatagaccctccttaatatcgaggtccaatgtctcagcgccaataacattagtgctaatattatctcttcctggtagataagtagttgatgctaaggaggttggtgcctcctatttataaaaagaattctaaaggcttaggctgactttggtacgcatggttctcaactcactcctctctttttccgcgtgtacacttttcaaactgctaaacgttattacgttttttttaaaaaaaaattctatacgaaagttgcttaaaaaatcatattgatccatttttgaaaaaaaacaattagttaatacttaattaatcacgcgctaatgtaccgctctgttttctgtgtggagggaatgaattcccaaccaggagaatcgaacgtagctttaagggtctttgatgtcgatgatctatttataggaacaaatatttacattatgactattcttttaaaaaaatattttataaataattcctctgcaccaacctttttatgttttggcagctaaagactagcttgtttggcaacttgagagaaggggattgggagtttacatgagagaattgacggcccgtttggttggagggagtttttaggagggattgggagtatggagtgatgaggctattaagtgttttgtttggttgggagacataggaattttggtgggatggggatgaggaattgaggaaggaactcccaccttttcaatacctgcgtaggagcaggtaattgggagggaattcctcctttactttgtctaagcaaatctcaaccatccgtttttattaatgatctaatctccaactaaactccctatcaatttccatcacctctaccaaacaagatggctgggattaaaaatcaaattcccattttaatctcatcatcaattccctcgtgtaaactcccaattccctccctcgagttaccaaacaagccgtgatggtgagattaagatgggaatttgatttttcatcccagtctcttgtttggtagaggtggtggaaattgatagggagtttagtttgagattagatcattaatgaaaacggatggctgagatttgtttaggcgaagtaaatgaggaattcccttccaattaccaccccctacccaggtattgaaaaggagggagttcattcctcaattccccatctccattccaccaaaattctcatgtctcccaaataaacaaaacagttaatagtctcatccatctaaactctcaatccctcctgaaaactcccccaaccaaacgggccagggtgtttgacagcgagagaagagtctaaaacaagttatttttcaagagtttatttataaaataagttttttaaaaaaaatcaaacataaaaaatccagacgctgttaccttttttttttgataacacgtggttctgtgctagctgtgataccgctggatagggatcacctcttctcgaacggcctgtggaaattgcaaacatgcatgcatctctcatattccatggtaaaattgtactagtgtaaaatttggcaagatcatttccaatttgtactgcgtattggcctcatctgaatgcaaggagacatgcatacatacgtatgtgcacattttatacattttcagtatatattttcagcgcaataatggagtaccatgtatatatacgtatgtgcacattttatagggcgcttattaaagaccacccagtcgtataatggaatggcttctgctcacagcaaccaacacggcgtggctcctgtatacatccatacgaccatacactactttatactggtacaccagtatacggtacatatgctgcaactgcaagcaggatagagtatcaattatactcatgcagcacttcccactattccaggctgtaattagttatactagtagtaattataatcatcaatggatgaaacgagtaatactaattataagtgttttgattttcttttaaatcagccttctttagtttggatcaaatttatagaaaaaaagactaaatttatagataaatacagtaatactttcaactaaaaaattataatgttagatttaataaaattaatttattactttaaatattactatatttttctataaatttaataaattttaagaatttgattttgaaaaacctaaagcaatttatagtatgagacgaagggatgaccaatgagtgctctctccgtttcaaaattcttggtgttttggtaaatgactcggtcttcaaaataaatatttgaccttacttttctattataatatatacaataaataaatgcatatttacttttattttttatttttattatagaactttgaaagacagattcatatgtgttattctagaattataaaagtttgactataatcttagttcaaaaattacagcagttaaactagcaggaggagtaccagattagtgacacagtgttgacagtggcgaattgattggcgcgagcaaatgcggttggggactgcattcaatgcgctcatccgagcttcagcttcagctttcactctagcccaataactgtctttgatcaactgggtagtagaagacgccgccgtgtggggcccataatccagatcgaccggtggccggccggcgacaaattagccgcggcgacaactcctccggccggctccggcaaggccgtgcggccaggccccacccccagctagcctgtcagagtttgtcaccgcgtgcatgcgtacacaacactccactgtagagtacgtaggagggactacttcttggactaggagtttctggtatttacaagtcttgtaaggcagtaaggtggtgtttgattctcctgaagatgaagactaagttatttacgtaaacgggatagtataatgtgtgattaattaagttttaattattacaaacttgaaaaacggattgatttgatattttagaacaacttccatatagaaagttttcgcacgaaacacaccgttcagcagattgaaaagcgtgccacgagtattcaaaatttaatccaaaagttgttggagaaaagaacagggcctaaatagttttagatttttaaaatttacagacatataatttagaaaataaattaaaagtacgaaactgaaaagactatttccctattggtttcatgaactgtttctcacaattttcagccctcattacatgtcctccgttgaatgttattacttgctttgtttctttctgtccatcatctttttagggccgtgtttagattcaaatttttttctttaaattttaaactttttcgtcacatcaaatgtttagacacatatatggagcattaaatgtggacaaaaaaaaaccaattacacagtttgcatgtaaatcacgagacgaatattttgagcctaattacgtcataatttgactatgtggtgctacagtaaatatttgctaatgatagattaattaggcttaatagattcgtctcacagtttacagacggaatctgtaatttattttattattagtctacatttaatacttcaaatgtgtgtccgtatacttaaatttttttttgacacacggactaaacacagccctggatctgatttccgagagttcatcatctgcatttgccaacctgttttggcttcttcacgtgaatcgtgccggcgtgccaacctgtttctactgctctcattgatccagctctagaaaaataatttcccaaacatataatcaacggcaagaaaataatcactcgtgttttgaagcagttgtggatcaggaaaaaataatagagagggtaaactggacaaagctaagacccttgcgcgccatcccatggtaggttcgcccctattttgaagcacgggactctatccaatttcactgtaaatcaaaacatcttctaccaaggcatcctaaaaacacaaataatttatacgcattcatatgaaatctaaactaccaaccatacagaaatcgtggagccttgcgttcaaaaatggctaaaaagaaaatcaccgtgttatggcatggtgaaacgaagaataaactttttttaaagtaaatttcacaaaactacaaatactttaattaaattatcacagaactacagatttaccaataaatttaatataaaactataggtttaaggctaagtatcataaaactacaaatttaataaaaaaaattatcataaaattatagattttgcggtttaaatccttagcactaatgttatgttggacttataagtgttcaagttttgtgattaaattatcattaaatatgtagtttgtgatacttttgttactaaatctatatttttatgatattccaccttaattaatctgtagttttatggtaaatttagtattaaatatatagttttatgatacatcacattaagagtaacgatagttttgcgaaatttactaaactttttttctgtgagatagaaggaagcacaacgattgggccacgtggaggcaggagaggaggggcccatgtcgaggtagcagcaaaggtggcccagaagagccaaaccgaacggtctaaactcaaaaggcgtcgtctccctccatcctccacctacgcttaattctaaatttctaattccccacagaattagggcacaaaaatcaaatcaaatcaaaccaagagcagaggcgacgcgaggagagagaaggcgagctcgtctcgtctcgtctcgcgccattaatgcgagggggagtcggtggatggatggatccagccagcctcaattgccactgcggccatggccagcttcacagtacaacctccataaatcccccaccacctccgctcctccgctgcaaccaccaccaccaccacctgctgctgcggggaggaggaggaggcggagatgtgggcggcggaggcggcgttcgcgaggtcggggtcgtggagggaggaggaggacgagcaggaggcgctgcggtgggcggcgctgcagcggctgccgacggtggcgcgcgcgaggaggggcctgctcaggtcgcccgcgccgggggaggaccgggtccagggcgacgacgcgctctgcgaggtcgacgtcgcgggcctctcccccggcgaccgcaccgccctcgtcgatcgcctcctcgccgactccggcgacgttgaggacttcttccgccgcatccgctcccgcttcgacgcgtcagtaccacactgctctctctctctctccccctgcctctctgctcgcgtggaagcttctagaagcgcaacactcgacactgacatgtggggcccaactggtacgcacgcacaccgggggaagcttctagaagcgctttgctcgccgcgttcttctgtgggcgaagtactcggtttccaaaaacgcagggaagctttgcggccgggagcggctgacacatgggccccacatgccagtcttgcgttttgttcgcttgctagttcagatcctactctaaagctatcgttctgatgaaatgcctagatcatgcggggaaggctacatttggaacgcagtgattttacaaaaaaatttgctgtaattttacgaaacaatttcagctacggcttgtaggatctgtaaatcgctcgtctcctctggttggtttggattttggtgtagaattttgtttgtatgcttgtagtgttggtaaacttgctcatgggctgatctgaagcatctgtgctgctctccatttttttttatttttgttggttgcagagtgcagatagagttccccaagatcgaagtgaggtacgaggatctgacagtggacgcatacgtgcatgtcgggagcagggcgctgccaaccatcccaaacttcatttgcaacatgacagaggttggaccaatccaccactggaatttcccctcctttgtctcagctctgcagcaatgatctactagctgttttgaacagtagcatgatttttaaccacattagtttttttttttactctgggtaaaattgctgtgtaaaaagctgtaaatagtgggttcacaaatgagctctagatgtgcttatttgctgtttttatttttctgaaaggcatttctgaggcatttgaggatctatcgagggggaagagtgaagttgccgatattggataatgttagtgggatcattcgtccatcaaggtacaccacgtgcagaacattttttgtttcctgctggatcaaattgtacgaccttgtaaaatttgacacttggttcttgctgcagaatgacactgctattgggccctccaagttcaggaaagacaaccttgcttttagcccttgccggacggcttggccctggactaaaggtgtgccttatcacatcaatccgtcttcttttcttcgattctcgccgctcaaagatgatgagcaaatctcttctatatgtatacaatcaaccaactctgcatctatcacctgctgacaagagtactagtgtctcaaatagcatgaaaatggttttctggtcaaacgctcatccttctcatttcagaaatactatcgaaaaataaatactacttcagtgctataggcctgtgcttattctgatcagtgcaagaagccttttaaccatgcggcattattcaggactatacatttttactgactaccaacacccaatggattgcaggtgtctggaaatatcacttacaacggccatcatctgaatgaatttgtgccccagagaacatctgcttatgtcagtcagcaagactggcatgcctcagagatgacggtcagagaaaccttagagtttgctgggcgctgtcagggtgttggaataaagtatggtaggtcatttcaccacaatgtccttggtgttgttccttacctccttggtagtttgcgctttgacgttaatcaatatgtagatatgctcgttgaactcttgaggagagaaaagaatgaaggtataaaacccgatgaggaccttgatgtgttcatgaaggtagatcacatccagctttatttggacacacactacctgttttgttggtgattgtctcatgacactgtttgtacttaatttttcaggcattggctcttgaggggaagcagacaagccttgtcgcagaatatataatgaaggtatatggtgtatccctttcagctgctattattatctactttggagtctcaagtgtttgcttctttgagtgaactgcacaaatattttcgagcaaatttcacgatgcataacgaaaacccccatgttttgggggcaaaatgtttcaaggaaccccagatttttataaaatattcatttgcataataatatatggtatttttagttatattcacatatataatgggcacaaaatgtacattcttcttcctcactctcgctctccatgattgcacaaactcaacacaaacacagtgctcactgttaatgacagattaaccagttacataaacacaaaatggtttatactttcgataattgacatgtgttggaagtgcggctaatatgtatatatcacatactattttttacaattattatgcatggggttccttgagacaaattgcaatacatggggtttgggttacgcatgtcctataaaacctagggttttgtgaaatttactcaatattttcatcaagctgtttaaccaaatggctcacttaattcccatccattcaagacaattttcaattttccctacaatgttattttggcttatcatttttacagcatcaacatgatctacctttgaatcatttggttctggcaagatttctgaattgctaatttttatctagccaagattttagggctggacatttgtgcggacacaattgttggtgatgaaatgatcaaaggaatctctgggggacaaaagaagcgcctgacaacaggttgttgcatgataatttaatctccttcatattattggtgctgatggttgaagaaattgggcaattgcaagttgtatggattgcatgcttattctggtttgcagctgtgctcatatatgttgctcttgcaggtgagctgttagttggttctgctcgtgtgctgttcatggatgagatatctactggacttgacagtgcaaccacatatcagattatcaagtatttaaggcattctactcatgctcttgacggcactacaatcatatccttgttgcaaccagctccagaaacttacgaactatttgacgatgtcatcctcatatctgaagggcaaattgtatatcagggaccacgtgaatatgctgttgatttttttgccggtatgggattcagatgtcctgaaagaaaaaacgtcgctgacttcttgcaagaagtatgcagttgtaatctgtgtttgtgatattatgttaactggactgttcttgcatatagttatttacattttctgtgttgcaggttttgtccaagaaagaccagcaacaatattggtgccactatgattatccttaccagtatgtctctgtatcaaaatttgctgaagcctttaaaacatttgttattggcaagaggctgcacgatgagttagcagttccatacaatagacatcgcaatcatcccgcagctctttcaacatcaaattatggtgtaaggaggcttgagcttctaaagtccaactttcaatggcagcatctgctgatgaaaaggaattcgttcatctatgtcttcaaattcattcaggtattttcaatttcgagatgcatccagcagagtagcagtttgatgtctcaaataaatactgtcacaaggaaatgtaacattgtctaccagttaaaatataaagcacacgtataataaagtcgctaaaccttgctaagaataaaaaaaactaagactgtaaatgccctgttaactcattttacaatttcactgctttaaaagtttagcacactgcaatgatcaatgtgcagttgtcacaaatgcttgcaatttttccctacttggcacacgagagttatcttagcgtgcataaaatgttatagcctagtaagttttccctacgtggtgcgtgaaaatcatcctagtgtgtttatgttattgtgacatcatgctcagaatcttggtcacaactcacaagtttggtcaacatgtacttttacatcttggtgtttttactggattgctgtaaacttgactggatggcatataatccgtcaagtcacaaaaggatctcgttgtggagtttccatagtcaaaaagatagatcttggctatatcatttttcacatgtccaaaaccttcattttaaactatgattggtcaagattaacttgtgttgacttcaaatttcctaatggcactcttctgttttcagttaaacttcacctaagttttattttcaatcatttgagggttttttttaacataatctttatgttgcagcttttacttgttgccctcatcacaatgacagtgtttttccgatcaacaatgcaccgtgactcagttgatgatgggattatttatcttggagccctctattttgcaatagtgatgattctatttaatggctttactgaagtctcactcttggtcacgaagcttccaattctttacaagcacagggatttgcacttctaccctccatgggcttacacacttccgtcttggctcttgagcattccaacctcgcttattgaatcaggaatgtgggtactagtaacatattatgtggtcggctatgatccccaatttacaaggtaattgttaagttctgttcatttgctctctggtccgatgttcagagatttttttccctatctgaagattgatcttaatttatcatctgcagatgtcttggacaatttctcttgctcttttttctacaccaaacatctttggctcttttccgggtcatggcatctttgggtcggaacatgatagtcgctaacacctttggatcgtttgctttgttggttgttatgatccttggaggattcattataaccaaaggttaagcttcttgagtcgactcagtattagcacttgagacttgagagcatctttcaagatcttacatctgacatgctgctacctgttcttgaatatctaacagagagcataccagcctggtggatttggggttattggatatctcctatgatgtatgcacaaaatgctatttccgtaaatgaattccttggccattcttggagccaggtaatacctgatttaaaccccttcttgaggttggtagcaaaggcacattgtggcagcaatctgttagcttagtttggtgtatgaaaaatacttgcataatatggaacatcgtaattgcttaaaattatattaaatttctttgtatgaacctaacgagatatttttttattcagaaaaacttttattagccttatataggaatatttgcttctatactaactgtagctttgaaaaatggcagcaatttgcaaaccagaacatcacattaggggaggcaatactcactggatatggattattcaaggagaaatactggttctggattggggttggagcattgtttggttatgcaattgttttgaacttcttattcacattgttcttgactcttctcaaccgtaagtttgtgctaacttcatggacccagacaacttagaactgcaatcaaaatagtttctcattctcacaactggtgctccttcacagctattgggaatatacaagctgttgtgtccaaagatgatattcagcatagggctcctaggaggaagaatggcaaattagccctagagctaagatcttacctgcactcagcttcattgaatggtaatgctagataatgaatccctgtacttacatcacaattcatttttacccttttactaagtcttcatattaactgtgttccagggcataatctcaaggaccagaagggcatggtgttaccatttcaacccctttctatgtgctttaagaacatcaactactacgttgatgtaccagcggtatgtcagggggaggccggtttatatggctgaaatttcttttaaaaatctatgtatattgattcataatcaagttttgcctagcaggaattgaaaagtcaaggtatagtagaagaccgcctacagttgcttattgatgtcactggagcatttaggccagggatactaacagcacttgttggagtaagtggagctggcaaaaccaccctcatggatgttttagctggccggaaaactggaggactaatagaaggaagcatcactatatctgggtatcctaaaaaccaagagactttcactaggatctctggttattgtgaacaaaatgatgtgcattcaccttgcttgactgtaattgagtcattgctgtactctgcatgcctccgattgccttctcatgttgatgtgaacactcgaagggtaaagtcttggctgggctgcagtgctatgtttattgtacaagacatcactatttttgtcattctgatccctgatggttcatttcataggtttttgttgaagaggtgatggaacttgttgagctaaatgcattaagtggtgctcttgttggcctaccaggagtgaatggtctgtcaactgaacaacgcaagaggttgacgatagctgtggagcttgtggcaaatccttcaatcgtgttcatggatgaacctacatcaggattggatgctaggtcagcagctattgtgatgagaaccgtacggaatattgttaatacaggacggacaattgtgtgcaccatccatcagccaagcatcgacatattcgagtcatttgatgaggttaatttctttacaaaacctagtagtcaatttatgcatgcatgacaagcaatagttcaaaagtcattattttgagctatccttttcgtgacatattaacaagttgagcacagattttgatattttttcgaagcaacagtacagattttaataatcgttcataatttgatgttaatcagttttcttatcaatgatggatgtgaacagaaactagtcccttttacacttgatctgttgaactttcattgtgctacttagggaaaccgcgaaattttcttatacaagtatgtactaacatttaaccagcaccctttcctaactcattcatatgctggtcagcttttgttcatgaagcgtggggggcaacttatatatgctggtcccttgggctcgaaatcacgcaatctggtcgagttttttgaggtacaatctgcacaatgtgtttcctcagtgatgatagcttatacaagtttctctgtccttacactttgcgttcgcgaaaaaactgtccttacactttcaagtttgtaaacaggcaattccaggagttcctaaaatcagggatggctataatcctgctgcatggatgttggaagtcacaagtactcaaatggagcaaattcttggagtggattttgctgaatactaccggcagtcaaaattatttcagtaaacacaacgacccttttcacctctataaatcttggtctctttttccttaaacatgtttatgttatggcattccaggcagacccaagaaatggttgatatcctgagcagaccaagaagagaatcaaaagaacttacttttgccaccaagtattcccaaccattctttgctcaatatgctgcttgcttatggaagcagaacctgtcgtactggagaaatcctcaatacactgcggtccgattcttctacaccgtcatcatttccttgatgttcgggacaatctgctggaaatttgggtctcgaaggtatgtccactgatgattctgtctccacttttcttcctgtacttggctggccttatagcgaacatgtggctttgtttgacagggagacccaacatgacatattcaatgccatgggtgccatgtacgcagcagtactcttcataggaatcactaacgccacctctgttcaacctgtgatttccatcgaaagatttgtctcgtacagagagagggcagctgggatgtactcggcactgccttttgcattctccctggtaattttccctgtcaaaaactcctgtcatctcatcatgttttgatgctcgtagtagtaccataataaggctaacaatcgaactgttcttcggcatgcaggttacagtggagttcccttacattcttgtgcagtcacttatctacggcacgattttctacagcttgggctcgttcgagtggacagcagtgaagttcttgtggtacctgttcttcatgtacttcaccttgctgtacttcactttctatggcatgatgacaacggcgatcactcccaaccacactgttgcgcctattattgctgctccattctacacgctgtggaatctcttctgtgggttcatgatcccaagaaaggtacggaaggaacaggaaccccatgcataatttgcacctaacgtcctctaattgtactggacccatgatctgttttccccataatccatattccagtgcacattatccatatctttattttttttgtcacattagcatatatagctatggaaatagtgtttccaatccataaggccacttccagtgcacattatccatatctttatttttttttgtcacattaacatatatagctatggaaatagtgtttccaatgcatattatttattactggggccaaaaatgaattatctcccttcgcaaatttcatcagaaattcttagaggagatatctattttcctggtttgaatatatatgcaatgtctcatccgagacactcttttttctttataattccttagcacatcatctaaaatgctgctatgttgcatagtagtttttagtttctattaacattgtactataatggagcatgagtgccctgatataccagtgcccctaataatttcaccaaacccaccagtaactttttttgtcctacagtgaccacttgtcatgtactagaaccactttagcaattgggaagcaataatggtttgtttaaattaggacgtgattaaagtggctaatgattaatgggcttaaacataatgcagaggattcctgcgtggtggaggtggtattactgggccaacccggtgtcatggaccctgtacggcctgctaacctcccagttcggcgacctggatcagccgctgctgctcgccgacggcatcaccaccaccaccgccgtcgacttcctccgggaccacttcggcttccgccacgacttcctcggcgtcgtcgccggcatggtcgccggcttctgcgtgctcttcgccgtcgtcttcgccctggccatcaagtacctcaacttccagagaagatgagacgacgacgagcgagaagcgagctatagggagcacgacgtacaccaccattaattctctggccagctatagcgctcaaatgtgtactgcaactactatgcatgcatcaatccatttcgtttcttcagaactgcacgcgtctcttctctctgtcgtcacgatgaattcctcccggtcacgggagatgctggagctagcagagatcagagaccagcagaaaaaaggagacaagtgtatagctaagctacctgttgcaagcctgtttggcagatctccaacaactagatctaactcggagctaaagtgaagctgtggaacagccgaaacctcgcctcattctaatttttttcagattattttagcctgtttgagctgaaactgtttggttggatagagttggagcgggagctctatcaaacaggcaagtgctccttgattggcttgatcgttatactgcgtacgtagtggctggtgcggcagcagtgcaatattcggcgagcattttgcagcagccacggtgagccaatgggaggtcgacacctgcaagccttttgactgctgcaaccggcgtccctccatgggggtactcttttggaagtagcagcagcagcagcagctagctatagcagattctgcgtcccctggcctctgctgctgctgcctccgaggactgcaaaacaacaacctagctagagcagcaactactactaacaagaaagaaagaaaaaaaaaagaaaaggaaaaggaaaggtatgaggagtactgtactgagtactaaccatttggtgatcgatcgatggtgcgtggcgatgagagatggagaagaaacgggattgattgatggattgaagatctaacaccttcaaaaggggggcagtaggagcatcttctacctgcatcgcaggtacgcaacaacacatgcatggatcgatccactcgtcccagctttttattactaccatctttccttcctttttttttccctttagagcaagataataatagagcacactttctattattagctcatcttaaagccaacatatataatagattagctataagattgactataattttcttctcatctctctatctctcacttatatatttaatgcatttgtcttagagctagtgataagctagctcttgcatgagagccaacattcttaatttttcgctacctctctcctccatctaagcttatagtaggcttatagctcactattatacttgctcttagtgagtgtttggcaaatgggaaagggaaatgatttcccacccatctttaaatactaaccattcattctccctcttccatttaatcctaaccctttattcattttccaatcccaatcccaccccctattttccattatccaaacacatccttatatcttctacttctcgagaggaatatatatgcagctactagctatagctagacattcgtgtccggacgtataggaaggtattcccagcatcattcatccgtgccgtgtgcagcatactgttttcttaagcccaaaccaccaatagcgtttcacgatgatcgatcaatttttttatatattgatgacagtttgtaataaagaaagaagcaacgaatcgatcaaattttacatatgttaatggcagttcgtaaatggtaatggtcgagctgtctccaccagtgtgtatacatatacatacgtacagtggtggaggcagcttgatctgctgctaatgtatatacaaatatatttggtttgttctctctatatacatacgtatatcttgcgtactcctttcgtttcaaaaaaacacctaattctaagtgtgtatccagattcacatctataatagagttatatgtgtccagatttacactggattaaattttttagattaatttttttagatggagggagtacagaagtgagattgagagagcgatcagccagtggagtgagtagctatagctgagcttgagtgtagcttagctaggggtgacgcgactgttgctgggacacgtggcgtgccttggttggatccatgggctgtgcatgcgtgcgtgtcggaaggcgacatgatcaatcgcctgcatgcgccctgactcttctgacgtacggctatggtttaagccaagctataaccagaaaccggccggtcaatgtacgtaacggtcatgggtcaatatgtgcagctaagctagctatctcaatcgatcgtcgagttattcatatcgtttgtagtacttttcttcgttgctatctagaataaaatttaatccatattaaaataacaaatctagataaaaataaatatatctttattcgttgttgtaggataaatcaaatcctcagtaatattttagaacaaaaataataatagtaggatggtatatcatggtttggccccgttggttagattcctaaattaatttattttgaagcggaagaaatagtagctcaataattgcaatggtcgattcataccattcctagctacctatgtatacacgttgattctgatcgattgggcgacgatggattacacatgcagctagtgtgtgtcgtatatacttatagtatactatatgtactatcttcgttttcaatagatgatgttattgactttaatatattgtttgatcactcattttattgaaaaaaaatataaagatattattttttatgacttgttttcgttattaaagaagtacttttgcatgtatgcatcaattttaaaatctgacaagtggtacaccaaatttaaggatatcatctatttaaaaaaggagagggtatatacgtatatgcaacttggggtgggctgaggaagatcaacatcgagaccgaaaagaccgtagttttttctgtttatgtttatgtttagcgtttgaccgtccgctttatttgaaattcttttatgattagtatttttattattattagataataaaacataaataatactttatgtgtgactaattgttttctaaattttttcataaattttttaaataagacgtacggtcaaatgttagacacaaaaacctactacacatgagacggaggtagtgctacgtactttttctttttaaacaacatatacttatatatgaacgtacttgctcagttattggacgtatctggcaggcaggatgcaggtatacatatactatactactagtagtaacaaataattaacacatcgaagttgtctcatcacgtcaaatatatgaagaggggggtcgtcacgccaggcgatgctagagtccacgggagttgaatttgtctgtccgattcctggagctttccagattgaatcgggtgttgtttaacctgcagtctaggccgggtcaatctaggtctctggtgcaatcctttatacaagaacttagggtttggtcttgacctcggtgtagatcgattcgctttggtgtctgctgcgtcgtctgcagtcggggaagtccagcatatagatcaaattggttcttggcaatatggcatcccatgaagatccgcgcgatcgtcatcgtgatgaaggtggtgcaacaaccgatgaggaaccgattgaagatctgggcggggcttcggaggaggaagacgatgaagatgcaattgtggtagactttgatgaggctaaaaagcatattgatacacagtatgtggccattgggaagttcttctcaaggaggactttcagcgcaaagggactgtttgaagccatgcaaaaggcatggggcttgagacaaggcatggagtacaaacgcctgcatgataaccgatttctactggaattccaatctgcaggggatttcaggtttgcgactggaggcggtccttggatctatcaaggggatgctttcctgatcacggagtatgatggcaagtctagaccttcggatgtgaaactgaactcgctaccagtttgggtgagaatttacgatctacccctgtctatgatgactgaaacaatgggtaaattgattggtgcaaggctgggtgaggttcgtaaggtggcggtggatgatcagggaagagcatgggatgattttatgagagttcgggcggagcaccctgtggataaaccactgacgtgttggctgaaactgaaagacaaggagtcatcttcggtggttcagaggtatgatgtcaagtatgagaggatccctcggttttgcttttactgtggccacattggtcacatggagagggaatgtgatttaccctcggataagcaaacggtgaggtttggccttaatctcagggcgtcaccttataagcagtttgaacatcgtagctgggctctgcctggtaaagttgacaacaacgcgaagagaaatctatggttcccaggtgagaaccagtccaagccagctcctgcgggaagccaaaataaagatggcccatcaggcaaggaagataggaagaagaactcgccagaggaaaatgctccagtaaaggaaaattttgctaaccgggatgagatagaggcagagatccctacggtgcaggaagagttgaagggtttaaatgctaggaacccaggaaaatccagggaggatggtgaggtcaggaagctagctgaacagtgggagcatatggggaaaactcaagaagatcagcctaccttccacgcagcttcacagcaagctaaggagggacaaataaggagtgagactgcaggggagacttgggtgtctagcaaagattcaatcaatcagtacgaacagcttgatgaaggtgctgggaatggccgtgaggaggtggacgaacatgttccacccctatcaacgatccatgaagatatctctcttataaaccagcttagagatgaggaacttggtgagggacataaggaaaatatcgatgatggggtaaaacctgtgctaggaaagaggagtatggataaatctctccttggcccaggatatgatggaccttcgtttgatgttctagttggaggtgatagtaagaggagtaagagtttgtctctatagacagcaaagtcgatccacctgacgggcattccaaaggaagcccgtcaggagcaatgaatattttaagctagaactgccgaggatcagggaggcctcggacagttcaagatcttgtttgcctagtgcaaacacacaagcccaagctggtttttttgtctgaaacacatcaaaatatagaaagagtgtgtggcttaaaatagagattggggctgcggaattgtgtagcagtgcctggagaaggaacggggaggggggggatggactagccctcttttgggatgacacagtacaagtggatcttctatcctacaacttcagatatattgatgtgctcattaaggacgaaagctgccctgtgcaatggcgatgcacctttgtgtatggtgagcccaaagctagcgaaaggcataacatgtggactcttcttcgtcgcatcaaatcaaattctactgctccatggtgcttagtgggcgactttaatgaagctatgtggcagtttgagcatttttctgaccacaagagaagggagaagcagattatggatttccgggaagtcttgtcgcactgcgatgtgtttgatttaggtttcacgggtgccccctggacttttgataacaagcaaaaaggaaggaataatgtgcgagttcgactggatcgtgcagtagcaagccagagttggtcttctctctttcctgctgcagaagtgattcaccttactgtgtccagttctgatcacagtcctattcttctccaagcctcccgagtggatcgcatcaagaaaggggatcggtgtctgcggtatgaaattatgtgggagagggatgagcatctgacagatgagattaaatctgcttggcaactacagggacatatatcagacttaggctcagtggcaagccgcttaaagtctgtgatgggagcactgcagacttggagccgtgataaatttggttaagttagcaaagatattaaagaaacaaggaatcgattggcagagcttcagatggcaggcaggtgtgctagtgatcaagactatctcgatatatccaggaagctggatactcttgtatagggaggaaatgcaatggctgcagagatcaagaatctcttggttgaaggaaggtgaccgaaacacatccttttttcataggaaagcggcttggcgccacaagaaaaacaagattaataggctgcagagaagtgatggaacctggtgtgataagagggaggagatggaagatatgacatcaaatttcttcaaagagctttacactaatgacccttctgtcgagccagaaccattacttgatttggtacagcccagagtcacgtcggagatgaataagctgctttgtaaagaattctctgatgacgaaatttcaaatgctttgttccagatgggtccgttaaaagcgccggggccagatggttttccggcaaggttctttcagaagaattgggatgtattgaaacgggacattattgcggctgttaagctgttctttgaacagagaagaatgccacaaggtgtaaatgacactgccattgtgttaattccgaaaaagaaagagccaaaggatttgaaagattacagaccaataagcctttgtaatgtgatttacaaggtgattgctaagtgtttggtgaataggatgcggccgttacttcaggatgttatcgtgccagcgcaaagcgccttcattcccggccagatgttcactgacaatgctctcatagcttttgagtgcttccatgccatcaatcggtgtaaatcggttgagtctcaattctgtgcttacaagttggaccttacaaaggcgtatgatagggtggattggagatacctagagggagctcttcttaaggttggtttttgttctcaatgggttcagctattgatgacatgtgttacctctgttagctatgctgttcgcttcaacggatctatgcttgaatccttcaaaccgaccagaggcctccgacagggtgatcccctgtcgccctatttgttcctctttgtggcagacggtttatcaacggcgctgagtgaagctgaaagatcaggacggttacaacctctaaaagtctgcaggagagcccctggaatttcccatctcttgtttgcagatgatagcctgttgttctttaaatcaaatatggaacagactaatgtggttaagagtgctcttactttgtatgagcaaagcacaggccaactcctgagcccggccaaatgttctttgatgtttggaaagcattgtggggatgctctgcagtctgacatcagatcccttttgcaagttcaacacacttcctttgaagataaatatcttggtctgcctacaccgatgggtagactgaaggcaggaagacaccaatctttgaaggagagatttgagaaaagattaacggattggaatgagaaatacctctctatgggagggaaggaagttttaattaaatcagtcctacaggccattccgacctatgtgatgagtgtgtttaagcttccagcagggctctgtgaggaatatatgcagctgatccggaaattttggtggggagaagaccgttagaaaaggaaagtccattggatctcgtggcagcaactgattaaacccaaaggacaagggggaattggtttcagggacttaaagctttttaaccaggctctgctagcttggcaagcatggcggctgatccagtttcccaacagtttgtgtgctcaaattttaaaggcaaaatattaccccaatggggacttgtgtgatactactttccttgtggactcttcagaaacttggaagggggtggtccacgggttagagctgctgaaacaaggtctaatttggtggattggatcaggaagcaaagttagaatctggagggataactggataccgagagagcataccctaagggttttgggaaagactgttagattgagaatcaaatgggtctcggatcttatggttccacatcagcaaatttggaatgaagagctagttcgtcgaatcttctatcccccggatgctgaggaaattttgaggatccaattgccacatagccctgaagaggacttcattgcttggcactatgataaggtgggtatgttcactgttttttctgcttacaaattagccctacaggcccagatcagagctgacgaagaggttgcacaatgctcaaatggcgatggtgataggaagttgtggaagaacatttggaatgtgcaagtgccgcagaaaataaggatttttgcctggagagtatcaagagattgtctagccacacaacataataaacatcgacgacagattgtacaaaagccaaactgtgagatatgtggggcaaaagtggaagatgcgtttcatgcta

SEQ ID NO: 8759 - DNA, 3422 bp, Oryza sativa
cgaagaggatgtggttcgccgtgtcaagatcctgaacgcaaaaggggcagcccaagtgactatcgatgccacgcttctggatgagatcagccgtccagcagcgccgctggaatgcaaaccaaagaaagaacctgcatttggcaggaccctttgcatgccaaaaaagatcagcacaggcaaaggaatgctggccatagaagaatgcctggtatgccgaacgcgcagagtagcgctggtcagctgtccagcgccaaatgagacaatcctcgacacctggcgagagttgtacgtgaagcaccgcatcccaaataaggagaaaatgggagatgactgggatagtgagggcacctcgaatatcagagacccaggagttgttcgctagggcagaagcaactgtgcgtgaacctcaaaaacgttggggaacgacgaagaggagatctggagccaaggacgccaccgagcggccgtcgatccattggtcagatgagaagagcatagactcaccatttcccggcacaaagaaagtggatgccgcgaacatgtcggagacggtctgctagactggggcctttaggccatcctagtaggggtgccctgagcgctgaagccaaagccagcgaacacgtagggcaaaccctgccaacctgaggtcagtgatccccaactcaccaccggttttggagcgacaaacattcgtccaaaacacctgacactgcccaccatgggctgagtccgtacctgtccacaggaaggcgcgacgcttattgtcaatggccttaataacccagactgggaggccgatcgccatagattcatggactggaatggagaagagaaccgactggaccagcacagaacggccagccagagtggtaaatcgtcctttccaaggacccatgcatgttgctaccccggaccaacactgtaaattttctggataatgtctaatgatctgtatgaatcataacacatcactgaatcttgtctaatgttggccggagaataccctgaaaccagcaaccagattatttgctaaccgctgggtgaaccaatcactatttaccacagcaacaggacagctagaagcctaacatccagagcagcagagctccttgttaaaggaaggaacaattctagtctagtttcaattaattttacagctcaacaaaaggggttggtcacactgacaaaagaaaaaagactggactgatcgattcactggtaaaggtttgatcagacgacttcgacctttcgtttggaagagactgatgacctccattactttgctcttgtcacgctatatgctgcctgctatacctttaatttcctgtcgccaggcaaacatgttttgaggaccaaggagaaatgtcatcaaactagccagcactgcaatttgcttcacatcccattttagtcggctggtctgttccttgatgcttgcttgcagctgcaggtgcatttctccttgtcttccttcagagtctgcacacagggaaaaactcagtgttgtttccgggttgcgttgtgcttttatatatatatatatatatatatatatatatatatatatatatatatatatatatatatgttactccctcatatccgtcccaaaataaatcaacttttagctatgtctatgtttgtaatagaagttgatttattttgaaatggagggatacttgattactcatactgagctgctgttttacagtgcaatatattggtattccatctagctatatatattctgatgctaacgggggtctttgtaactggactggtacatcgacctatcaggcttctttaggcagcagtggcttcaattcagttttgccattctgaacatgcaaattagtaacacgcatacgtcattatacctgcagctggctctgcagtcccttgatgtgatcaactgctaagtccagcatgtctgaagtactcgtttgctgccacattaatttgtaagaagaacaaattagaaagatcatcaattgaactccaactcaataacctgaagattgttgtctgacgaaaaagttcagacaaggactggtatatacatgaaaagaacacacgtatggcacacaccttgtccatgttgggcaccagggcctgcaacttcctgagcttctcgctgatcctcgttcttctctcctgtcatcatcgatcgatcatatgcctgaagattaatctggcatgcacgatccaaggaggaacaacaagaatgctactggctagatgcatgcatatgaagaacatcttgaaaggttatcaatattcttatttggtaacatatcatgtgcacacaagtttcgcatgcaaattctatacacaccaacaaacaaatatcacaaaaaattctttaaaaaatacatattataatttcaaaaatgctacacctttgtgtaaaatcttaacctcaaatttgttatatcataggtgtaacaatttttttatagttttaagacaataagtatatcagaattttatcatttttgttgctctatctatgtaatgaatttgaagacatgactttatgtgtaaatataatactaaaaatacatgtatattgattttttttctaatttttttatgatatttgttaatttgatgtacggtgcatactatacacgttaaaggtctatgtatctaggatacgcttccatgctagttgacattacagtatatagttcgacccgctacgtacgtacataaaaagttggtactatgatggggcgtagaattagcaagggaaaatgtcgtctatacataccctctctgcgatgctccgtgggtgcgtcgcgcatccacgcttggcccgtactctgaatggcacctggtcgtgctgcatctgcaggtatttctctacgccagccatctccctgggcgcaacaagctgcatcgcagatgcatgtatatacaaattagacatgaaatcatccctcacattgtacacacacacactaataaatcaaactataaatacgaaaaatgaaaaataaagataaaacgcatatatatatacacctgagattcgtagttgctaagggtggcgatgatgtcgtcgttgccgtgcgctcctgatttgcccgtcgacgtggagaacacgatggagttggagtcctcccatgacccgatcgagaacccaccggaggagaaggagcggacgacgtggtcgtgggtggagacgttctcctcggagcgcccatgatgatgagcggcgccatggatgctgtcagtgaggtccgggatgccgtcctcggatatctgggagaggccgccggagccctgcctgctgctagcgaagctcagtggggccttcatcttcttgttgttgttgctgctgctgctcatggcgccatggcgaacctcaccgagtgatgatcctgctggtctagcactcgatgagaaacctattg

SEQ ID NO: 8760 - DNA, 3820 bp, Oryza sativa
tgatgctaaaaatgtaaaaggtgaaagcattccagatgaaccaagaaagagaaaattggatgaattgacagatagtgtacaggcaactgttgggttacactgaaagtgcacagtatcacaatgatgaagactatagatttaatgacgatacagtcaaagaaaaggatttctcaattggaggacatgaatctcattcaacagaactgcaagaaagattgaatgcattgaaaagtaaaaatccacagctcgacgaggcattggatgctgatatagatagtatggaagaggtaacactgtctacattaaactcttttataaaattcttttgaaaatatctggttttgtgtgcaaaatgccatgcaaacaattcatttgttaatgtatattttatgcaaatgaatcatttgaaaattgcatctggcaggatactcatatggatgaacaacatgctagagatgaaggtactcttttacaccctatactagtttttatttttcctgtacattagatctttgtttttgccaagttctactgacattgttattttgcacaggtttgctgcgttcaacaagaacaaggtggctaatgaacttgtcctgtttcttttcatttcttttcttcatgttgtcgttaacctataacattctctaaatgcactaattcaggactgtagcaaggtacttccatcaactactcgtggaccagaagtgccaacaacggaacaattctgtatgccttggtcaagcactcgaaggaacgaaaagaaaaacttcagcaagattcttctatgaaactctggtacattttctgtacttatttcttggacacagtatctgcatgagttttagttgctttttcactggagaatgactggtcttgaggatcccatcttgtgtattactgatctatttcagttctacgcaagaacaatcttccttgtgataaaattaatatgtgcattttttagtgcaattcatgtgctttacttgggaaatatgcaagcacttctttggttccatttccgttctgtttatcaaaactcaaaagttgtttgtttgtttcatattttcaactcctataagtataacagaggccctatgatccttacagcaatttgtattgtttatatcgtcgtttgctctcttctgcagatcctgaagagtggtagtctcatagaagtcaatcaagagcagacttatggggacatcatagtctcagcgactccgcggctcgaggcggcattgcggagtagtgagaagcaatgacttaatttgacgcaacatgttcattggtagttttcgggaaaaagagatcccagcttcccaggagcgtttcaccttgttttatcttctgtagcatgtttatgatggtcagtcagatgtatatacttagttgggcgcatgtagcgctagatggttaggaacatgtagagatgttagttgtttcccccttttttttcccctttagatggatagcttagttatttataataactttaacagttgtaaattgcagtttcctatcagtgttagatcccgtgttcttttcagagtttttgatcgtgcgtgtttggttcagttgtatatgtgagtttgccaggatgttgtctaatctggaaatgatgcagctgggaacagtttggaagctatgatgggaacagcgagccatggtgatttgaaggtactgtagttgggctcagttggaatgtatcattttggtgtatttaactaagtcttaataaagctttcattatcttaaaaaaaagatactgtagtcaaagcagtagcaaagcctcttgaaggagctgatgagtcccacacagtcgccgtcgttcttcgagcttctcgctgttccattgtgaacttgagaagcttatgcttttcttgattttttttaattcttctttctttttatttgttaagtagatgcaattctatttgtcgaagagcggttgaatctacatactgctgaatgtccagttttagctgaatcaacaaattcaggattagctgaattcacagttgaggtatagatgaatctaggtgatccaagagcggagcagctgagccgtgctcggtgctccacagttctttgtacagcaaaggcatgcacggaaaatgcatatagcaggtgcagatcttgtcaatctacactcattttcctgcatcgctgagccaggaaattcgacggtgaaaattggtaagatcctggcacgattggttgctcagcgtcagccggagcgcctagcgttaaatgggccgaaatacccacacgacccacgaggggcgagcgacaggccgcctagtggcccaagtaaatttcgttttatgccaccttttattattgaagttttactttatgccatcattatttaatcattgttttcaagcatatcatcagctgataacagctctatccataccctttttcccagttttttttttaaaaaaattctgttagctcctctatagttgtgacgagtagttttgtataacctatgtaaaaaaaacctagctatatatatggagatatgtatgtctagatatataatcatggtttgtcttttttttatatgggaaagctcttattagactagcggcactggctgggagcggtttgctagttagaccttgtttgattaatccctatgaggctatgcttggttaattcccaagagggagggagttgagcggatttatcccatacctattgtggcgtgaaattattcctcctcaatttcctccaattctcttcaatcactctaaaccaaataagaccttacttggctggaatcgatttcccagttatttttctgtgcactcttgctcttatgtttttttagtgtgcctttttatgtttttcttgtattcatgtatggactaccataacaatcctatttgtgtcgcagcaggcgtgcttactgcctcaacgggtaaaaggaagggatcaccctctcaataagatggcgatggtgattctcaagctgccaaaataatgagaaattcaatcccagaccttcctgaggtaccgaggcattgagttctgatgatgcaggtttagattgcaagcttattatcaccatgactccacttatccaaaaaaaaggacagacaagattaatttagtgctacgatttcttactgaattagtgactgtcctctctgcaaaggctgctaacatctccaacacatcttccagaatttgattcataagtgggatgctttcgtacaacttatagctaatttagtgcttcctccgtttcaggggttaagatgttttaactttagtcaaaatcaaactgcttcaactttgatcaaatttataaaaaaacagtaatatttttgacccaagataaatttataataatgataatttaattattaatttaataaaactattttggttatgtaaatattattatatttgcctataaacttagttaaatttaaagtagtttaattttgacaaaaatcaaaacatcttataagctaaaacatagggagtacaaaggatgctttggtactacaccaaaagatcacaaaatgaactttgaaactataagactaaaaaaattaaatatttgcttataaatataggagtaaattttacaaaactatatgttttatggttcaagttacagaaaaccacacatattttaacacttggtacttaagtatatatattttggtagtttagtttcacaaaaccacactatcgatgaatggattcacccatgatatgacgtggttgttttatctaggatgtggacgtggcatcctattaattctgtgcgatggctggtcataggatgccatgtcct

SEQ ID NO: 8761 - DNA, 14154 bp, Oryza sativa
gggagcacccgtccacgtcctgctcgtcgacgtccacgtctggctgggccaggagaacttccatcgcggcggcgtcaccgcagctcgccgtgaacatcatcggcgagaacacgttccggtcgctcgaccgagggatcgtcccggaccgaatcacgccaagaacggcgcgctcgaagccggccttccagcccccggaacaagcgacggaagccgcggactcgccggccgagttcaacagcgcgacgtccgctccggcggacacgaggatcctcaggcaatcctcgcgcttgtggcgcgcggcgagtatggccgcaacgtcgccgccctccgccctcgcgttcacgtcgcatcccttgcctatcagcatctccaggatctccggctggccgaggcgcgcggccatgtgaacaggcctggacctggagctcctggacgtcttcacggccacctcgtggtccacgccggacgccagcagcgtctgcaccgcgccggcgctgccgcagaggacggcgtggtggaggagattccggccgagatgggtggcgcccgacgagtacccgttctggaggagcatgcggaggatggcgccggtggactcgtagtactccacggcgcaccagaccgcgtcgtaggggtccgcgaggccggcgccgacgcgcagctcctcgccggtggccgtgtcccatgaccacgctcccagcctcaccttggtgtccctctttactccggcctggacatgagatcaaaagatggtgttagtatagctccggctgctgaagagcaagtgcgtgtgctgccagcccgccaccagtggagtggtgcatacctgaagtagctgacgaacgacggcgatttgccggctgacgatcgcggcgaagagtgccgtgcagtcgacattggcatgcagagaaggcttcagagagcgcaggagcacccgagaagtagcatttgggtcagctccacactgcgaaaagatcagacgatattagctgcagcaatttagtcgtgtactaattcaagcaagaacgccggcacaattgtactctaaacgaattgcaaatgtgaaacatatgaagggagaagggcacaggtgtacaagttaaagaacccagatgcaaatgtaaaacatgtgaatgccacaggtgtaccgtgtacgaactacgaagtgcaaaagtagtatgtttgaaggacccaagtgcaaatggaaaaaaaattgaagggcacggatgcaaaaaaatttgggtaagatccgccgaagcgggtagccttaaccgcaatgtgctagaggaaagtccgaagactgttcccgtccctgtcaggggagatgccaaccgtctctcctttctacgaacacgctagatgggttaccgcttcgtcttataaaccagtgcaaacgagcaagaataagcgaggtgggactaaaccacaacacggctatctgcttctccctatgggccacggcccatgtgactaggcacactgggctcgacagcatctggactctgcaaaacagtacaacaccacccgcaacgctcgctatcggggatcaaatcgtcctgcacatctttaatcgcgcaatctcatggaacgagaacgatgtctctacagatgcatgaaggctatgaagccatggagcaaagtacacacttaccttgatgagcgagtccaccacgtccacgaagccgcgggcggcggccgacacgagcgcgtgcacagcgacgcgagggcggacgaggtcggagcccatgaagatgacggcgagggcggcctgcccctgcagcgccgcctccacgacggcctcctcgcacgccggctgcgacgccccggcgcgcaccagcaacgccgccacctccgcgcgcccctcccgcgccgcggccgtcgccgggtacccacggaacaccttgccgttcacgtccgcccccttcgcctgcaggagcgatgcacatttgcgccaaacattagactgtgctaaagaatgtacttctggttgctctagacacaagtttctgcttgtaatgatatgaacatagccaaaacgataatgttagcacaagttgatcaaacaattttctcagattttggacagtaactcagcaaacaagaactgatatgcctagtacagtttctccttttaccgcatgctctctctttcacctacattgctccacacaccgcgggataaggggtaccatcaggatggaccaacacagtagcacagaacagggcacaacaacagccatcgggacttggaaacatagctggccgagtaacaaatgtcgctgttactactatgtctggtcaggtcggtgatgtggagacttggtaaccaatggactggctagccagtctgtgcaagtcctgtggcaatggcactgtgccatgattcatatagcaagagacagaaggggcctcctactggaagaaggaatctggtcaaaattctgcagggtgatgctatccatcgatatatgaaatcttgatgtgtggtttcaccgcaatgtcagctcagcctcgctgaatacagtagttggccacagctaactgaaaattatctaaactggaaccatttatctctttcaacatcatatataagaatatttaactacccatccttgaacatttgctcttagagaaaatgaagttcacggaaagacaaatggagcaagaaatgaacaatgcaggctcagaaataaaagatgctagtcctttggtccttgctactcctacattctgattctgatgatcccaccatcaggacacatcatacaaattgtaaactcctgcttaaccaacccttggcattttatcaagatccatcggacaacaagacaagagacgcattcaattccacatccaggattctcatcacacaataaattcgtcgcaccaccacgagtacagtgctgtgcatgctgctatttaccactctgaaaactctgaaccgaggtgatgttctcaaacagcacttacgtggcacactggcatccccatgccaccatcaatattccaccgggggccatcaggccatgagcacacgcggggctgagcagcggccggcatacgcagatgcccgatcggcgaagcccccacgggccgtacgcgagaggcgctgtgcgttgcatgggcgccaggtgcgtgcagcagcaagggaggatacagctggccgcgcggccggccggtggcaggggaagcagatggctacagggcaaagaagaacacgacaccgtccacacatacggggtgcgcgaggagagcgagcgaaggagcagccatccatccgtacccgcgtcggcccagccgatcgatcaggcgccggtgtgggggcacacatcgatgcgtcgcacctgggcggcgacgtgcgcgttgctgtcagttaatagggaggcccttggcgctgcctgccgtggaggaggccgcggccagatcggggctatactccggtgaggagttgggtttttcatttctaaggcgtgatcaaatacagctggtgcggcttggacgtattggaagcggcggacatcggatccggttacttggctgtgtacccaggtgcagaacatgtgaactcactgatgatgttgcgcatggccagagcccgggagacatgacatgagctgagctgccgagcgacgctggcctttggatggccacctgacctcggactctcggagtcagttcagtctatggactgtgggtagacagggagatattccagtgtagaggatggaagaccccggcgcaaaatgcagaaaagaggatggaagaccccgcaaaatgcagaacaaagagtgcattgagaggtgattattgatgagcagttcatggctgattccacagtctgtggcctgtgggagtcagggtgacgttccaagaagaagaggaggccccgcaaaatgaagatcagagagtgcatggagcaatgattagtgatggacagctagcatgacatgcatgcatgcatttcatgctcaccaaacgggttcttcaatccttttttcctctgtgaaaaaaaaagatcctccacattttcacctcctatgcgttttgggataaaagccacggctatggtggctgccgtccttggcaatggcatttattgatcttttgcagaggccatggaacgcgccggtacagtcgtacagaggccctcatggccgtggcccgtgcgagctcatctgcctgcaaggcaaaaaaaaaaacaagaagaagaagtacacgcatggccgtgcccggctgctcccctacgccccgtcgcagcgcaaaccactcccctagtcccttgccactcccattcaattcaatgctgccccatgacatcggcggatcacccggtccgcgcaccacacctctccactcgtcagccatcatccaccaacactacttctccgatggtcagaaagtacccctagccgtccgatcgcggtgacgcgatcaggatcacaagagtgacgggcatgtgggaccccgagggggttgaatgagtcgtgagtgtgattagggtgacagggcccaatgcaaagtaccataggatccagcaccaaagcgtaactacactctcaagattaccgggagtaagtactcctgcatcaacaggagagatcaaacgaggggagaccggaagagcagagccaagcagatcacgtgatcccacccccgaccaagctcacgaggggaatatattggtttctaccaaagcgttgagctggtacttaagtacttaagcccggtacactatggaggagtacttaacaccagtgccctctgatgcttacacagattcattacattatcaattttgctaaaggaatgattcattatattatcagcagcagtaaacaaagaggctttggtcaggtaaagtcaaacccatctacccctgtcccccaagcaccagtcctctcgagctaaaaacactctcactcacgcagtgtatataattaggcttaccttctagtcgcagcatgcatgatgctggaagcagcagggagaagttactggaaatcagaatctttagcagggtacttgcgcacagtatcgtatccttgcttataggaaatgcgtttgatggtatatttgcttataggaaatgcttggaaaccacattcgccaataggaaatgcgcgcacagcatcgtatccttgcttataggaaatgcattttgatggtacatttgcttataggaaatgcttggaaaccacatttgctaataggagatgcttttgatggtactggtactaaaatacaggcatactataccgtatgtatgcgtgtacaccttgatcaatgcgtacacgtatttctagacaataaagagtgcccaggaagcttccctgcctatttgcttgtcccaattccagatttttatcatcggtatatagaacaaatatgtccgtacgcattaaaaacgaactgcaaatctgcaatgcaaagcatggtcccattgcagatttgcagccatgcggggctggtacttggtaacttaccttctagaaactaatagtagtataactgtaaaaatacaagttcataaaaatattttgctaatgcctataaaaaaaaactttgctaaagaagcacataattcggtctaaaactttggaaaatatctcatgatgagtaactttttccgttatggtttcccaccaaaaaaatgaaaagaagttccaatatcatagagagcgacaataaaagttagcgaagtttggaagtatacttattttttctttccaacaagtcctacttctactcataatttgggcttattaaaaatggcgataaaactttttaaaaaaggatgatatttgtctagcgcgtgcatttatacagtacattaaaatcatcatgggcacatagaaaaacaatactactacctgagcaaccatgaaaaaaaaaagagatcattagactgaacagtgggcaacttttatctagcacctattgggtgtggagatggcacttggcagtgcccgctaggcccatttgaaatgtcgtccaaggtttccaccaactcgaatgcttcaggagaaatgaaactagtgttaagtgaatttcgagaagcatgagtgttcagtgcttccttccgagaactaaattgatggtaaatgtgctcgagctctgcaaattttatgccatttcgccaccgacaccagacgctaattttatggggggaatgcgacgtattcagttcgaatgcacaaaaacgagaatggctaagcattcaaaccgcaccaaacgagagcattcaacatgcgacgaacagagcatagtaatgcggcgaagttgtagaacagagcaggaaacaggggagggcactcacaagcagcgcacggacgagcgcggcgtccccgttgccggcggcgaggaagagcggcgacacgtcggcgcggatctcctcgtgcgccgcccgcagctcagcggcggcgccgtcccgcagcgcggcctccgccacccgccgcgccttgagccacaccaccccggcgtagttcacgtccgcgcggccggacgcgagcagctccccggcctccctcgcgtccccgcgcgccaccgcctccaccagccgctgcgacgcggcctccgcctccgcctcgtcccgcagctgccggtggtggtcctccgccaccggccacacctgccgcccgccggcgatcgccgccgccggccgcagcagcactgccatccctaggagagcttctcgaagggcaacaacctctcctcctcctccactctctctcccccctattcgctccgcgatctccctgtgcggctgcgactctgagctttttccttgggaaacttgaagcggcaaggcgcgacgggacggagcaatatataggtggggactcggtcgctctcggcgagcaacaacaacaggaagccggcacggtagagttaccgcgtgggtgaaactgaaaggtgcaaatacggggggcccacctgtaagcggggatgtgctgctgctccggtggggtaagagcaagttcaatagtacagccaactactatcttcaattcaactatagccagtctaatagctcatttatacaatagttacatactacactattaatacatagtcccatctatcatacacacactgtgtcttggagtccgtgctacagctggctatatatttgtagcttgttgcccttctctctattcatttatctctttaaaatatgtttgcagctggcttatagcctgctattgtacctgctctaaaagggggtgcgtgcatacgtggaggggtgcgtgggcccctcccctagtatggtgggccgggcgtgatggcgttggcgtgatatccatcactctctcctcacctcacggctcggcgcctccccggctcagcggctctcggttgaatccaccatgcgcgccgggcgccgcgaccacaccactcgcacacggcctagcaaatcacggcgcgacgcagcgcaaccacgcgaaaacgtgaggcggcgggcgggccgcccgcccgctccgcaccgcgcgcggcgcacgagcgattcgcgtcgcggggacgaggagatgcagtacattactatacgtggcttggcagtcgcggtcgacgtggcgcccgataaaaaaagccggtgccggcgctgccgccggcgcaaggctaggggaaggggcctcacaatattgtctgtcgatcgctctttccccgcactccgcgctgctttgctcccgctggcatggcgcgagtgccgccgccttcgctgggatttcagaaaagaaaacaaacacacttgtcgccacaaaagctgccgcgtgtctgtcctcctcccgtcacgccggttttacagttttacaatgtatactccctccgccccataatactccctccttctctaaatgtttgaggccgttgacttttctaaatatgtttgactattcgttttattcaaaaaattttgtgaaatatgtaaaactatatgtatatctaaaagtatatttaataatgaatcaaatgatagaaaagaattaataattacttaaattttttgaataagacgaatggtcaaacatgtttaaaaaagtcaacggcgtcaaacatttagggatggagggagtataagggattttgactttttttcttgcactttttgaccattcgtcttattcaaaaaattttggaattattatttattttatttatgacttactttattatccaaagtactttaaacataacttttcgttttttatatttgcacacatttttttaataagacgagtagtcaaacagtgcaagtaaaaagtcaaaatctcttatattataggacggagagagtataatagtaggctataaataggctaaatgttgagatggaggagagagaagaagaagcaggctataaatttacagtcggcttaaacacaagaaccaataaactttgagagtgacaagtggaccttgtattagttataaagagctactattatttggataagctaagagaaaactataaaaaaccttatagccagcaggtcggctgtattattagacttgctctactatgctcaggtaaaaattacccgtttttttgacaaattgacccttttggaaaacttatttcgaaactaacccctgccaaaaacttcaaccaaaaataggccgtcgcctcagcgccaaacacattggcgctgacgttggctgtgtcagcgccaacgggactggcgctgacattgtgccaccgtggcggccgggccgatccccagctgatgtggcagctacctcagcgccaaccggactggcgctgaggtgggacttggccgcaacccccaaggcccagaccagcaagccttctggatggcttgcgggctgggacctcagcgccagccataatggcgctgaccgtgggacactcagcgccagcccacctggcgctgaggtgggacttggccgcaacccccaaggcccagaccagcaagcttgctggatggcttgcgggctgggacctcagcgccagccataatggcgctgaccgtgggacactcagcgccagcccacttaacggcacattctcctctgcatgtacttcctcccttactgggtcattctcttccctgacctccacatccgccatatcatttactccctcgcccccctccacgtcttcctcaatcaattcttcctttctactacacctctccgacagttcgtgacagctaatgggtgattctatgagtggactttcattaaggtctataagttctttcttccctatcctaccatctttcttccatgcaaacacctcaagagatttgaaatgtgaccccaatactatatctatatatgtttgccattcgatctctccattcaagtctaacataaatttatgtgacatgacaccgccgcccacatcgtatctcccttgcataccaaccgactcatcattccaatccaattcatgcttgatgcgagacattaactcctcaaaggtaggcttcgcaaaaaacactaattgtctaactgtcattccctcaaattggcttccatgtgtactttcatctaccacacaaccaccataatgaagccggaccaatctatccatctacaatttttaacccatgcataaacattaattacttgaaaataatatgtaattaccattgcaataccaatacttcaaaagctaacaacatgtctaatttttccaataaataagtacattactcaaatactacacattattgataaaaaaaactctactcctacaaattacctacccttcaccacacatcaacccctttcaaaccctctcaatcaccacaaatccatcccacatcctaggccatcaccacacatccatctcccatcaaaccctagtgcatcaccaaacatccatcccaaatatattttgtcaaatgtatcaataacaaccaaatggataaagatatgccacctccacacttcatccccgcccatattatccatctaataatccatccttagccaactattatcaaaccacgtctacaaccaaaacaatgcaaaatatccaataaaactttggggaacttagggtttatagaggggtttaccttctcttccgatcccaaactcaatgccgcacaaatcaccttcgattagagaggtttttgggggagattgggcgaggagaacgcggtggcgaccgaaccctaggcgggcggctggggaaaaaacggaggaagaactggctggggcggcctcggccgggctctaagtagccaaggtcagcgccaacttacttggcgctgaggttgggcacctcagcgccgaagcggttggcgctgaggtagctgccacgtcagctaggggatcggcccggctgccacggtggcacaatgtcagcgccagtcccgttggcgctgacacggccaacctcagcgccaatgcgcttggcgctgagccgacggcctagttttggttgaagtgtttggcaggggttagtttcgaattaagtttttaaaaagggtcaatttatcaaaaaaagggaaaaattactccctagtagatatacatacggacagttacacagtcgtactactagtagcacccactcattcactcgtctcgctcaccttttaccccacctatactaccagtagtaccagcacgtatttctcgctcgtttactccggccactacaggctctctggagcccggctgatttaccacccagatcgatctctggagagcctggagcgtagtatgggtttcgcctgccgatgcgtcagattgatcgctaccagagccgatcccgtatgagtgaatgcaggctgctgctgctgctctacgtgctttcccgtggctgtaacgcgggccgggggagtactacgtgccggagccgaacggtcgccctctgttttttgcaatccttaccaccgggctgcctgccctgccctgctgcgctatctgcatccggcctggccgtgcaggtggtccatccagagtccaggagatcgatcgagggagcgagaaggagtcaagccggtgccgaggaagctaggaacgggtcgcctctgcagcggatggagttggcaggagaaaggatatggtgatgttgtcgtagcggcggtacgtgtaagtatgtacgtactcccacatctcgtgatcatgcctgcgttcgctgctcccctctctggttgctcctttggctgttttctccatggagacagtttgctttagttggtgttctggtctaacgaagataaacttcatgttaggacatgaaaaaaaaataagaaagtcatttacacacgattaactaagttttaaaataacttttatatttgaaagctttcacaaaacacaccgtttactagtttaaaaaaatatactaacagaaacagagataaaatacatttcttaattaaaaaaaccactttactctctctcgtcgtgtactcctgctgacatttttctttcttcttcggtctctttgttcttgacagttgacaccaacttcgtttgctactctgaatttagagcgttttgctcatcagcaaagttgaaataatgcacaccaacacggtgcctgcatttctcaggtggaagtgtaacccgggccggttaattacaggtcgagtagtaaaatggcacccagttgccatgtgtgctgatctagctatacattactcctacgtgtctggctctacgtacgtacagctaggccattttgcctttgtcgtttccgatgggaaactacacgacctacttgcagttgtcaacttgtcaagtactccatacacgcacttgccggtgttcgacggcatggcgacggcaagggtgtatcgaggcgccccaaaaaaacaagcctcggagagctcgccctttgcccgatcgaaccaaatacttgtatagctgcattttatactgtactgatctctattatactcgtgcattgatgcgtagtaagctggagtgttaatgtagcatcaagtgccggccacttgtttagtaggagtaactaaattagtactccgtagtactctacgtggttagagatcacaatctgaggaggaacgtgcatgcaaatagtgtgagagctaggagacaagcgctggctgcgccgtaccggtaacccatctggtcgatccgtgcatggcgcaacttctttctttcttttttttttttttaccctttcgctttctctctgcttcttttccggtgaagattttctcggcctctcttcctgaccaagatcaacacatacaagtgtgctataccaacgagaggaaaaagaaaagaggaaacgaaaagaaaaggggaaaaaaataaagggagaaaggctgtcgagtgtctaggcaattcatcacgtatttcgatctggttggttgctctgtttccttggttttgtgtgaaatggaagagatgataggtcgccactcagcaatgcacacacactatggtagtagtactagtaactgccgagtacggagagtcagtagaaagtgaaaaaaggagtgcagattatgtgatggaacagaagggtgattttgtgcaggtttttttgcagcgtggcagaaactggcacgagtcaactcttgctaggggaaggatcataatcgtctgcttgcttgtgtccggagtcacgcagcattcaacgatcgattactgggtctccaattggaaggccgtgatttacgagaattgttcaagtgcttgcacggataaataaaaatagtattaacaatgtagtgatgaatggttagagcaaaaaagaaatgcataataggtgtggccaatgcatggattgcgtgctttagctactcaaatttttctgttaagtcaagtggtattcatgtgtattaggccaaaatccttagctagctagctcatgggtggatcgaatcatcatgagcatgactgcatccatgcattttgacatgttgcagcggctatcaggtagcatttacagtttgttaatctgccacgaccgcatagttgcattaggtgcacgatcgatagatacggtccgaatcttcgaggaagcaacgttgaaagggcaggcttaaggctgactgagaaatcggtccaattgttgggaaaatccagtgttttaagctgcaggtacttggcgtatcgttattatttatttattggatcctttccagccaagcataccaaatgctagcatgactatacttttctttcttctccatttttttaataaaaaaacatcataccctaacaatctcacattttctttcaagataccttgtactactgttgtatgaaatacatggagtatggtttttcaactggatgaaaatattggcagcgcatatatattggattgcaagcaggcaggattgataggactacacgtgcgaccaagagatgcatatgcacatttcagcgcactgtctagacaggagcaagaggggataacagtgagaaacctgtacaaggagtcgaggatgcttcagtccaaaaacaaccaaaccatgcatataccaacaaattgctcgcagatacatataacaagaactgctagtcctcgagcacatacccaattattatgtgtgcaacaaacagttcaaaggccttatctccttgtcattggcaagatggctaggtagctactactctctaggcaatagagcatcgatcctagctgccgttttctagggttttagctggggtgttgtgcattttttgggaggctacattacttgtagccatgtgccacaaggagcttggggctgaggatattcatgcacataatcacacatagtacatttttgggatatataggacggtgatgatgtgttcactaaccaattcaagtcatgtgtagcttgatattataactgataggcattgcttgtcctctccaactagccatgttcgaaatggttagccaccaagctcaactcctgtcgagacccgtttgttgctaggcaggcgctagcctctgagacctaagctgttcttggtcattgccattgagctaatcaaaatttgcctggattaaataaaaacataggcttcgtacgcaagattacttttaagtacttctatgatgcttcgtgcttttgcttacaatatgtatcacaacagagaaggaaccatttggcacttgaccaaaacccaggccgaggacggcattgggtgagaatgagtatgaataagcttataaaagcagcatgtttatctttgtaa

SEQ ID NO: 8762 - DNA, 5063 bp, Oryza sativa
cgttacaaacaaaaacttaaaatcccttatattatgggacgaagggagtaaatcccttcaaatcccatcaatcccatgagagggattaaacgaatcaagcctgatagtcaaaactgaccacctgagccagaacttgtatcgaatcttgtactgtctaatattgcaaattcgcaactgcaaacagtaagatgctactagcaaagtaatagtagcaaagtactagcaattagcaactcgtgtagtcgaacgtgtgtcaattgctcgtgttcagttcagagtagagttcagagagcgttgatgggctagggctactaaaatttaaggcctagcatggcacgaggtggcgaggggcccagcccatcagtactcctgttatttcccccattttaggcccagcccatcagtaccatctcttctttttccattgagtaaatttcagaaaactgtaactttagtgataaatgtatcagtttgctgcaactttagcgacatgtttcagtttgctgcaacaatagcacggaaaattatcataaaattgcaatttttatgttatatgctgctacagttgtcacatatatgtactgtagcagcatataacgtaaaagttacagttttgtgataattttccacgctattgttacagcaaactgaacatgtcgctaatgttgtagcaaactgatagttttgtttgcagttttaaatttactcttttccattttactctctcctcgaacactctcgatggctcgatctgaacatcaggcacgagagacgagagcgtcatggcatcactctcaagcaccacctctctctccgccatgcagtggcggagcggcgaggcggcatccgctccgggcaagacggcggatggaggtgcgtccttttatacttccgtgtacgagaggagagagagagagagttgggggcattgaggtgaggtgggtgctgtctggactctcgggcacagggggcgtcgcgccacgcacgcttggtgtttgaggaaatgcccgcgctgaccaatagatgactggtcaatcggcgacgtgatctgatggagactaatggagttcgcaatctatttcagacttgcaaagtctgcatttttgcgattactgtgtcagtaactccaatggccgtagcaaaattacccataaagtgcggctgtttgattttaggcataatgacgaaagaactgggggggggggatgggttgactttttcttccttacaggctactgcagattctatcctcttcttttacctggagtgtggaagaactctgtgggtgcctgggtggcgttcagctgagctagtacgttaatgttctgtatgtttgtatttcagcttctgggtctcggcacacccagaaggttgtacgtttttgtttagaagttttgattgtgtcgtgtttgtactgttttatccttcgttcttagtaaaattctaatgcaaaaaaagtacgaggtaccatgcgcctccaatatttggaaaaatataaacttcctctatccaaagtccaaacttgtataggtctgtttcatctggcaataggacaaggaggcattgaaaatgatttaatcatcccctgattatatatcaaagtgttccaaaaaatctctatcttgcttaaaatttctctaaatctaggattaatcaaatgcatgtatttgtatgtacaaagtaaagatgggcatttctcagggcctcggcatatggagggaagaacacacttattttactttgaatataaatgaggtgtacactgatagacaagactattatcaaaaacaaaggaggggtactccattaaatatacaagttaggacatatttgcacatgttccataaataggaacacgatcaattagaaccagacagaagcatgatatctcaaagaaatttgtctgcaaaaatgcagaagctatgactggtactaacaatgttatgtattcattgtgtatatattttgttacatttgttgcataaacatttctgtccaaaagtggaactgagggccttcactctagactaatctcgagattcgacagattattcaaactcttgggtatgtgcagctttggacaactagatatgtgcaaggatctcagagaggtgaaattcttcaaccattctgggaaagtttccaaatttgtgcactctgttattgtcaaggttcggaggaatgacaaatgctgcatgccatggggcaaagaaatcaattctgtgcaccttgaaatatgaagttcctcaatacctcgaagttctctcagcccctcacattctgaacactctaatagcccgtcacacagggaaaccgacagagatttcaggttttgagagaaaccttccagtgctcctctagatccaatcaatttatcgttgttcaacaacatgattaagcttttgacaactgggagtttcacatgcactgctctaaattttgggcattgggtgatagtcaattcttgaaggtttgggaaaattgcttctctctgtgatggaagccatatttctaggttgcgcatgtgaaagaacgagagtttctccagtgaggcgaatgtgccatcatccccatagaattcgtcacctacacgtgtgacagcatttattccacttaattcaacaatcttgagaagaggtaattgccccagtggaggtaggcattcacatgccaaattaactagcttgatctcagtaagtgattttaagtatgctggcatgcttgttatccatgatggaagcttctttgctggacatgagaaaatgcataacactttcaaaccacggtttggcttaagaagttcaagtatttgctgtgcttttgaactaatcataggatctgtacagcttcctgtccaacttaatgccaaagacacaagcctatttttcttttgcaggattacattccttgcgtcatcaaaagaagcattttccatattgcaaatactgagttccttcaaactaactaagggacgcaactctgagatggtgtgctcgtgattttccgctgcaatgtaccttggcaatatctcgaggtttctaagttggttcatctgacagggcatttgagttagtaaaggacattcaagaacgtttaggtaggcaagacttttcaagtttttcatgcttcttggtaaaatagcaaggtaatgacagccttcaaggtttaggatttgaagattcacaagattgcttacagattcatgcaaatgaagaagtttttcacaatgagatagatccaaaacttgcaaagcttgcatctttccaactgattctggcaattcagcaatctcagttcgtgaaaggttgaaattcttcaagaactgaaggttgcatattgaatctggtataatctctatatcattgtgggagagattaagataggctaattttttaagcataccaattaacttaggtactcttttgatcctgcaagattgcatgtgtagtacacgcatatctatcagacatttgcagaattcttctgggatgtctgtgattgagcacttcttgtcagacaaaagcatcttttcatctctgagcaagattagtgtcctcagatttcccatttcaaacaattctgttggaagctcagttgtcttcgagtcaacgagtaaggagaggcaccgagcacttttttttgcattttctacaggccaaactaattccttcctggcatctattgctaagtgaaatcccctgctaatcatttgtgcaagaagttgcatcccagggtgcatcttgtaaatagcgtatgctttgtgtcgaggtttctgcattacatcatagtagtgttctgtcattatcttggagaagtacatatgcatgtcagatttgctgcttgacagttttatgagatcatcagcaacaaacatgccagtcaactgttcgggagtaaagctatgaactgggaacagtgaacagtatagaaagcattgctggatattggaagggagttgttgataactgacgtaagttgcatccaacagaagtgggtctgcgtagaaaactaggtcaaatctgctcaggacatgctgccatgcaacttcagtcttccgtatgctcttgagcttgtttgatgcactgagtagtagtgagggcacgccacaacatgtgtcagcgatcatttttcttattggaattagccgcggcggcaactctgcagaattttgcatccattgtgtgagaaggtttgaagaatcgattggtaagagacgcttcaaagtgtatggtctgagagagttggtcattgttacaacatctggaacgcgactagtcacaatcatcttgcttcctgacttggcactctcaaggacctcaatcaatagcttccatttctgcagattctgaccccaaacatcatccaagacaataagaaactttcgcccgcatagtcgctgcttgacaaggcactgaaggctctcagagtccactgtgttgcattgcctggtgtttagaaattctgctagtctgctcaatattatcatatcatcgaaactactagacaccacgacccaaattcggtcatcaccaaatgtcttgacagcccatggatgtgagaacactaactgagcaagggttgtcttcccaattccagccattccggttatgggaagcactgacaggccagctttgccatgatcagcttgcatcattgttagaacatcatccacttccttttcccttcctagtatcccttctggtcgtatgctatgtgctccttggcaaaccataggtgtgctgatatctctatgtttggctgggaatcggattctatatgtctgtgcatagcattcttgcaattcaactattgattgtttgatcttatggacaatgcggcgtcgaaaagggagccttctaaggatgaatgagctgtgtacctgaattgagaggacccttgtttttgttagatagcaagagaccttgttgagcatgtcatcaatgtcaagtgtgagagaccagagcctctgtagaagctggtggtactgctcgttgttggcgctgatcatgagaagtgcactgtcgttgatgccactgatcttcctatggaccatcctgaaaagt

SEQ ID NO: 8763 - DNA, 5239 bp, Oryza sativa
cccccaggggtcgatgggccgggaggaaatcggcccatcgacccccgggggaggcaaaatagacttttgcggaggaatttgatttggaaggattggattcgggattggactcgacgatagatcggggattgagatcttaagatggcacggacactagacaacaagcaaagaaacaaatttcgcaattagggtttttaagagataattttcccgctaggcgccacgacggaacgggcgctacacgccgccatgccggccgccgccccaccgcgccgccacgccggccgtcgcacaggccgccgccccgccccacggcccgccgtgccggtccaaatcttgtgcatgtccaaatcttgatgagatgcgggcgtgccagtcggtttgattctgcaactgacaggatatgcaaatagtagatcaaaacagccgatcagctgacaagccgatgtagtgattctagccgatgccgataatagccgatgccgatagggtgtaagaactcggctatatgtccaatgtagataatggtataatggcaatcggttgttgatgatgtaataaaataacaatataatccagtataaaccaatcggctagcattgatatgatagaataagcactgatccgaaggttaaagcacacatcggctggaggtccaatgtcatgaaatccacaagattagattaaacagtgaaacctttgttgtcatcggctaaatccaacttgtatatatatgtaatccttataagccgatgcaacgtcccgataacttatcggctagcaccccgataaaatattagcatgaacctattagcttagcaagacttatattatcaacacaatctagtaggtcgaacctaaccgatgcagcacgagattgtatatgataatctaatactcgatgagccgatagatctgtctaatgtgatggatataacaaatctatttagaacagcattgtaattgtagagatatatcggctaagacagaagatcggacctaaccgagacagtcccaactaaaccgatgcgtctctaaacacaatggaattagagatagacttgagatatcaggtaggcaaatcaatcaaccaaaccagagcgatccaagagatcgaagcgatgcagccttgaacgatgccgacgtagatgacagattcaccagggcccgacagaacgtaggacttaccctttcgccggagatcgaactgaaccaatgcagccccgcgtcaggtgcccaaatcccgccggaagataagtaaaaacctcgggaaagatggtggcgatgcgctgagttgtattgatcgtggagatagattacatagaccccgggtgtacatatttatacccatgggttgatacaagtccttgtcggacaagaaagaaacttttctaaagataaaagaaaaagataaagtccttataagacactaaacacactttcctagagataaaaggaaactaacaaactattcctaattaatagataacttaccatgccgcattctctttgaactcggtctcttctggataagcttcctttagtagatcaatttccttaaccgaatatagcaagaatccgacaactgacgacttgacaactctcatcggctaatctcaggacttccaagccgatgctgactctaagccgatgactactccgggcttaccaaatttcactgttaacactcgttcgatcaaaaaaaaaagagaggaaggaagaaagagataaggcaggagttagagaggaagaaagaaagaaagagacagagtttgttgcgtgaacgagagaagaggataagtaatagggattatatagtacgtgttgatttttattcccggttagtaacaccaatcgggactaaagttagatctttagtcccggttggtgttacaaaccaggactaaagatcctaggcgcctgacacggtctgacatggaaccaaccgggactaaaaatcatctagtcctgttgttcttataaaccgggactaaaaatcgtttttagtcccggtttttaatgaaactgggactattgtagatttgggtcgaccgatcaatgatggtttctccaccagtgcatttttcattagcacacatttcaaactgctgatatgattttttcaaaaacattctatatagaaaatgtttcactaaaatcaaacaaattatttttaaagtttgtaattattaaattttaattaattatatactaataaactttctctcgttttatgtgaaaaaaatcttactttaaactcaccaaaaagactatatatgcgtctcaggtcctgtttagatcccacctcaaaatttttcatcctgtcacatcaaacatttgaacacctgcatgatgtattaaatataggctaaaaaataattaattgcacaaattgtgactaatttgcaagacgaatcttttaagcctaattgcttcatgatttgacaatgtgatgctgcagtaaacatttgctaataacggattaattaggcttaataaattcgtctcgcggtttactgacgaattctgtaattagttttttattagtgtccgaacaccctcatacgacactctatataatacccgatgcgacatgccaaaactttacacccctgatctaaacaccccctcacatgcatggaatttctatgatgcacgcagagtgcatgctactaggaatcattcttaccggctacttatatcgttttctaatccatctccgacctacgacgatgaacgctaaccctgtgacctagttggacagggccaacctatgcgactgcaattatgcaagccgatgccactgtgtcataatccctccatccaaaaatctaagacttatttttctatcaccaaaatcaagaaaagaaatagctcacttagcttgcatataacgaagaccaaagacacgcaacagtaaatattaagataggtacttgaatttcgatcaataatttaatttagcattggaggctataaatatgcctaattcatttgaaaaaaatagaaaataaaataagtcttaaacttttggttggagagagtatatagatagtgttatagctagctaggtaacgtcagagagggattttaatcacccgggtggacgtttacctatttattgcatgtcaactaaatatctatgaaaaaaaattcaaaaaaaagacaagatatattaatatgaaatatatcacttcataaatatataaattcaaatttgacatctacaaattttaacaaaaacaacaaaattaattgtgaatatacgtaaactaattagattttaatttgttgttttcgttacaacttgtataaatcaaatttgaacttgaatacttgtggagtcatatattacatactattttatcttcaattttcattaaccatggaaaattgaaaccgtgttattataattttacaaaatttgatatatgccatcctgacccacatgtcatcgactcatatgggtcctacttgtcattgagataccgatgacatatcttaaactttgcaaaattataatggtatggttccaaattacccttttattttatatgcgataaatggctagatgtccaccccgttcatgagacgagcacataccatccgttcattattcaagctagcgcgcggcgccggtgatcgcacggaggagagaaacatgcgtctccccgaaccaaagcatcagcagctagccactgcacccacacccacctccgctccgcgtcgcgcgcgctatgtatacacgggagagataatagtaggatatagggagaattccctatatgccatgccaaattagccttatcccttctatgccactgaaaattgtctctttccctctatgccactagtttgaaattgttccaccctcatatgccactgccgtcacccctccggctcatcactgttaataggatggggttagttgtcagttttttgcataaatggcaaaaatgccctttggcccaagttgaggatatggcccaaactaaccgaactcccgcaccagccatccccaaactgcagcagctagctatcgccaaaccctagctatccccaaatcgtatcgacgggcgacggcggcggcggcgacggcggcggcggcggcgaggtggctagggcaacggcaagggctcacgtggtggtggcggcggtggcttcggttcccgtggcggctgctgctgctgcgcgaggtggtggcggcggcggtggctgcggttcccgtggcgccggctgctgctgcttgaggaggtggcggcggcggttgcttctgctgcttgaggttgtggcggcggctacggctgcagctgctgcttgaggtggcggcggcggctggtgcagactgaggcggcggctatggctgctgctgttgcttgaggcagcggcggcggcggctggtgctgattgaggcggcggcggcagctactgcggcttgaggtggtggctgcggcagccacggcggctgctgctgctactcctcaaagctgtggcgcccgcgcggacggctactgcggctcccgcggcagctcccgcggtggcggctactgctgcggcttgaggtggtggctgcgaccaagacaacagcgaaagatgaaggctcaagcaagcaaatcgcctccccaatcttgggtgcctgaagggtatgtgtccattttccccttcccgtttggcaatgatttttgttgcatacatggtaggatgcacttatttttttggcatgcattttggataggatggatcctggtaaagcatatctgttgaaaatcaggctccatgggcaccaaagtagagaaaactttacatttagaacagaggaagtgatatatagcgacagaacaaacttcaaggattttattgatcacattagagagaagtacccatggggggtgaatgaatttgtaacaatgaactattttgatccagtaaacagaaactaccctcaagtatgctcagaccagtcaatgctagaaatgtttgacaagaatatgactagcaaggaaatatctatgttgattcaaattcataagaacaatgagcaagctgtagttctgccacttgctgattggccaacacctaaaaaggtagttagtggggcagaacctaatgcagttaatatacatgaggtgccatgtactccatctcttgcaatgccatctcaggctactatatctcagcctagcagcagcacacaaccagttgttgatatgtacttggaaaatttatttgaacaaaatga

SEQ ID NO: 8764 - DNA, 36549 bp, Oryza sativa
  unsure (1)..(36549): unsure at all n locations
ggcgctgatcatgagaagtgcactgtcgttgatgccactgatcttcctatggaccatcctgaaaagtgtatgcaggtcctggagcaggctttcaatgcaaagcagcttaccctgctcctgcgcagactcagcgtaaagcttttccaccattgcttgcagttgatgttccactgacatgggttttttcttccttttcctttgagagatatgatcaccatggattatgcgcaaacttgaagggagcttgttcatgttaaagaatgaagaacatcgtttgatgggaacttaatgcagccttggttttctctgccaaactattttatttggctcggttaggtgcattacataggaaacttcttagtgaagacaaagtctatatggttgttgtgctgtgacttttcttcctagataggatcattttcatactttattgaaaagtcatagttgtaccacactttccagagttcccaatggtcctttgtcatatctcatagtactgagtaaaagacgaacagtattggaatattattggtggattatttcgtgattgtaggaacctgcagagcaccttcctggtttccctcatgaaatttcagtttatgaacctgctaacttgttcttcaaaaacagatgacactgcattctcaactatctatggttcagagaacaataggtttgagtggtctggactctggagcactgtaaaataacagaggtactgtaatattcaagcttttagctgttcatcactttccaatatacataattgctctgttaaccagtttttgttttcaagcagaacagttttcagctgaactctcctttctctaccatactggcttgatccatatttagatctttggtatttgtgttgttgatcagcatgcttgtccatagaagcattgagaaagatgtatttgagccacttgtgatgcgtatttctgaaattgcgcaacactattttgggacagtgggctcatctgaaactggtgagaagggtcctacagtgcctgaatttccagagaagatcaaatgggaagtgcaacatctcgaagaattgtttgagggcattaaagaagacaaggaggaggtctatgagggttttaagtctgttagccttgcaatctccgagtggcagagaagattggctatagcataccaaaatgcagctagagatcctcgaccttttgagggaatgaaatgggcaatggagtatcatgagatgtgggttgaagacaataatataaaggagctggtgatgagatattggattttgatgaacatgagctttttgaatcacttagatatgtcaagactgcacaaggtggttcagaagctcatctcctggaaagtatcaagagtgggatgcagtgcataaagaatgtgttagccaccattcgatcaagaaaggaagcagacaacaggagctggtgcattgtggaacaggtcttctccccgctactgaaacttttgaaaactatcaatcatctagtatcagaagcggctgcccgcaacaacaagtctgagaactataagatccttgtcaagatcgatgctgaagtcaactgcttacaggatgcactagatttgattgatagaaataagaatgaggtttatgagaacttcagattaatagaagatctcatactaccattattaacattccttaaggccacatacaatgatcaatcagaatctttgagcttcctagatgcagtcaaacacggagtgaattacttggaaggtgtacttgacaagattgagcagaagcagcgggatggaaatgataatttccacattgtcaaagcagccttctcaccattgttgacatgcatgtacaccttcaggcgcatctcgttggaaaccttagcccatgaagataaatcagatgcttttattctgttggacaggatcagagatgatttgtcacagctcaaagatgtacttcagatggttcaagagaaagagaacggaatatacagtaactttgatgcaattgaagaacatattgatgagatttatgacggacatatgaatgttgaaggttccttaaaacttaaccagatgggtggtctgcgagacaagctccagttgattcatgaagagataacaaatatacggggaaaggtggatgactctttcaaggtccaggaggtctcatgccatgtcatgcgcatggctgcagcacatgaagcttcatcttctcatcagttgtcagcatcaaataccttctgcattaccatggaaagtgcgcagatgtggcagctcaaagttataattgatgaactagagacaagattgagacactgccttctatgccttgctgtgttcccagtggatgccatcatcaagaagagactgttaattcactggtggattggagaatgttttgtaacttcggtttctgaaggcaagagcttctttaataaattgctgctgtccaatgggttcattacgccagtaaagaaataccactgtgacaaagtccactcgtgcaaggtgcaaccttggatccgtgggctactgattgaagctgcaaagagcaaagcatttgttgagctcagttcagatggcagctccaggaatgactttaccaggacccgccgtgcatgcttgcatgctggaaagatccttacaaacttccatcctgatgttttgacgatttacaatatcaagcaacagtatgtagagttaaacaagacatggttttctgaaaagaaccgtttgaccactttgcagttaggacaatggcacgatgcaagttatgaccctcgggcacatcacgttgagattaacaatgccaagttcctaaagcaggtcaaatcctgcaagcagttgaagtacctgagtttgagaggcatatcaagaattgaggcccttccgaactcaattggaaagctctcaagacttgtcattcttgatctcaaagcgtgccataatctagaggatcttcctaaagaaatagtaaaactagtgaagctggagtacttggacgtttctgattgttacctgctctcaggtatgcctaaaggactaggcaagctttttcaacttgaagttctgaagggatttgttctatcaaacgccaagagcaaagatctatgccatctcaatgaacttgtcatgctaaaaaagttacgaaagctgagcattagaattggttatagcatagatagcggtcagtttgcgaattttggtgagctctgtgctctccggtcgcttacacttatttggggggcacacccaatatctacacacgggagttctccaagtcatgctgctcctcatgcaatgccttgtgttctccccttaggtcttgagaagctggagctccgttgttttccccttgtagaattgcctcactgggttagtcctgaaaagctgagaaaattgaagaagctctacatcagcggaggtaacatcagtgacctgggtgatttgaagtcctgggaggtgactgtacttcggctaaggttcctcaaacatatgaactattcatggactgccctgcatgattcattcaggaaactcgatgttttggaggcacatgaatgtgaaaatctacagccctggccttcctgcggaaaagggttatggcggaaagaaccgaatggaacgattgcacctgtgttgacctgaagtattgagctgggtccaatagggtgcagaattactgcctggaaatgggaatattgaaggatatatttgatcagcagtatatctgaattctgaagacattgccaatcactgtctggtaagatggcaattggcaattgtcctgcagcatatataaagatattaaacttctaactgtgttacatttctaagcacaaatccttgcatactttcacattgtcgaatgtttatagacttattgggcaacataagtcaaaaaataaaatgtactcgtcgattggttgcataggcttgaaagctgcaagtaacaagtgatcaacttgttttgaagttggctccatgactccatacagccatcctctcccgtcttcctggcatcttgttgtaaacctcctactgatgagtgatgagttgaaagaagatgcacacggatattagagtaccagtctgatcaggccagactgtgttgcaatcaacttcatcctgctgcagtctgcagatgttgcagatagtgaaattcaactccatttttctgaacccttgtaggatgttgaatttcatttcttgagcaaattgcccgatttataaactcatcagattatactagtatctacggttcgggatcggactgtatcctgccggtaccgtacacaaatcgaattcgttagaacctccacaaatattagtgccaccaagaactcagaaggcccggaacacgatggcaacgaaatccctccagcggccaaggcgattcatcatggcgccgatcgcctcttgcggcagcggcggcatcagcagatgctacaccgcagccaccaccgccgcgacgatggccagcggcggcgtccggctccgcaggagaggcttcgtgctgtgcgccgtggaccaccacggcgtgaggcgcgccgtcgtcggcggccagtttgtgaggaagtccgagctgaggcggcaggacgagctgctcgtctccctccacgagctcgtcggcgtcttccgagagctgcagcgcaagctcgggttccggcagtgggacgagttcaggcgcgcgcagcctgagctcgacgtgctgtaccagcaggctgcgcttccagggcaagcggtacaggagccgcatctatggcgagcccatgcccgatttcgacgacgccgtgcacgccgcagttcgggctccccgcattggtgatcgccgtgtctgcagccgttgcagcagctgcgactgttggtacagcgatctggctaacttgcattgcctcgttcgcaagtttgtgtagagatgaagcccttgttttactctcttgtatatgaaactccgatatgtcttgctacaacaatgcttatccatgtttaaatcagatcttacatagctttgccacggacaaccatacgtacatgctatgatgctaaacacagcacacacgacggctaccttctcataacatctcgctactgcaaattactaggagggataaaatggatggaatccaacagatcatcactaccaaatcaccaggattgctatttagcgcacaccttttcatatgaaagttttcatatatttttttttcgattaaagttttttttggacgaaaatttttagaaaaaagtgtgtgctagtaacggacgtttgactaataatagcactataggcaaaatcacatctacgcaaaacttgactaatcctttggcacggtttgaccaacactacaggcgcggtatttttcaaggtgaatcgtgatccgccgatggctcgacgtcgacgacgacgcgtgggtcttgccggtatatgtacctgctcgcccagtagaggtagttgacgaagccaagcagcccgacggcggcgacgacccagtagaagaggtcgaggcggctggtgttgagggtggcgccctcgagccacccgccgccgccgccgccgccgtgccgcctcgtggccctgttcaccacctgcaccagcagcgtggcgagccacgacgagaggccgagctcgcaccagaacagcgccgacgcgatggacttcatgccacggggcgcctcgctgctgaagagctcgaggaggcccgggaacgacgtcacgtcggagacgccgagcaggaagaactgtggcgccagccagaacagcgacatctgccccgccgccgcggcgtcggcccgccgcttcctctccacgacggcggcgatggccgacgccaggatcacggcggcgaacccggcgccgacgcgctgcaggtgggtgacgccgctggcgtagcccgtgcgccgccgcaggagcggcacgaggaagcggtcgtacaccgggagcagcgccatctggaacgcgctggggatgatgaagagcgtcgccggcgagacgtggatcctccccagccgggtgttggtcaagccgccctgctgcacggtgaaggtgaagaggagcgggttcgacatgtagccgatcagggagctgatgaagacggggagcacgcggagcacggcctttgtctcctccacgttcttcgtgctgcagactgaccaggccccgtctttgcctccattgatgcaagctttgtcaaggaatctgccaagatgcatgcaaagacaaaattttagtattgcactctgccaagaggacaatgctcaattgccaatattttctgctttgtattcaaagtagtctagaaaaagtactcagtatttcgttgaacatacttcagactactgtttgtttgagaagctatttcagttacttcagtagagcctccttgctcagtgcttctttcttcctgtgcttcttccagcttctcaggaagttgaagcttcctgttcttgaatgcaaccacaagaacctgggatagatagatcagaatgcagtcaactaacatgcacaggatctcttttcttgagaattgatgttgacatcatgttttgacccaacaaggagcacaacctacctggagtatccgagttagcggacttccttcgggtacatggttgcggtacaaagggagaccagcagcaaccacaagcagcccaagcaggatcaggaacgcgcacaccccaaacccgacatcccaccctttgctgttctccagccaaactatgaggatcaatcctatgaaacccccaaaggagattccgaaggtgtaccagttgaagaagctggactgctggcgggactcggaggggtcttcatggtcgaactggtctgctccgaggggcggcatacaagcacgcatgaagccatcgccaaaagcgctgatgtacagcgctgcgtaaagtaggacggcattcctgccatggacttctctgcagctgcttgcctctgcttccgcgttgcaaggcggtggacggagagagggaaggtaagcttgcagtgcgagcaaaccgtagccctgcatatatgattgccaataattcgttagatggttgaatagaccaagaagcagattaccagaaaaaaatgccaatttctttattattggtaggtttgcgcacagtaattggcaacggagaattaaacaaaaatagtttcctttgatcatattaggcttgatgtagatagttgagtaaaccaaaaagcgaattaccaaaaattccaatggaccaaagaggagtattgttctagctcgagttatgtaagagtctgagaggaaagctcctaacagagcaaacccagatgtggcaccaagaacattagtgactgtagttgaagagcttgagattcccatatgcattgttccatagagataggtaaccatattcagcatgtttgggacattgactgtgcttgtcaccacagtcagaactgtaagagatcgaaacatgtataaaatgcttcagcgatttaaagaaagaaaagaagcttgaaatggaaagagtaactcgtcacatgtctgcatattactagtaactagacaaaatcacataattcaggaaacatggataaagcaagtcaactggcaatcacttacaatatacaaaccatgctgctctgactcctccatgcacctttctattaataggatttcccctccagtccaaaaagcctccgactgccatggtttttctgatgagttcaaatatttctgatgagttcaaatatttctctcttgattactgcctggccattgcagcataagggggtataaatcatagtagatagacagttgaagtcagggactcaggacccaggggtattgatcacagatggataagtcaaatttgaagaagtcagaaaaacaaaatgacaaaaaaatattcttgaatagtatagccgtcacctaccacttgcaagcaccaacagtccaacactaaagttgactatcagattcagagttcctactccctactaaccaaaatatggaggtgtatcctgacaatttttttaagcaatctgtcactggcatgcattgacactgatgtacaaatatcttagataaaatgcatgtcttcaagtccaagccatcattctggactatcttgaaactaagctcttaatttattaattggtctgagaagtcgtctttaaagacgcttcctatgagaatcattgctgctcaaattatgagcacgaaatgcttatgcatgagttacataataaactctaccaattaggttaacctactattactcttgattatcagtccaaaactcaggtttgtaacttacagttgatttcctccatattaaccatcatggaacaacccaattgtggttttaccttttaatctaagcatccactactctacaatgcgtcttcaaggagatggcatcagctcgaacaggatacgcatatgaaaagtataaacaagagaaattaaaacctaaaaccctaaaaattattggttaaaaaagataaccaaaacatatttgctactcccattattcccttttacttgacactgtttacaagtttgattttatctttgaccaataaaaacttttaagttatgatgttttgatgaatgcaagtagttaattatatttaacatgcaaagtactttgataatataatatctccttaaatatttttaaatattttttataaaaaagacgaatggtcaaagtttgtacatgaatagtatctagtgtcaagtgaaagggagcatagggagtagctattatttttaatcatgggccgatgcaattaatacagattgtctgaaatgcacatcagtagcaaaaagaaaaggtttcaaattcaaccacacccttaaccatactagattagagaggtcatggtggctaaaacaatgatttacttgtccattggcagctgaatgggtgattgtccaaaagcaattaaatttcatcaagctgaacttcgagcatgcaacacatatacagagaaaatcaacttctttgtattgttgattggtttcaatttgaaagaaacaaatataattttctgctaaggtttgtggtgtcctgctgacatccttgtttcattggaaggcattcattgagcacaatgttttcaacttttcattcttagtataaaattacatatttttattatgacatgacataattgaagcttgaagaccaagcagaaatgatacttttatgtcagtacagtacatactctcattcttcagtaaactagtcagctatactatttttacaaaccttgttagtcatcagtttaggtaccacaaatattgatgttcttcctaagacacagtttacgcaactactttcaatattgaaaatctattttctggccttgcaagatagcgacagatagagataacatcactgtacgctagattgcattgattgtaacttgtaagttctgtcaagctgccataagccaatggagattataggatatctttgttacgatctatacaacacagacaggctaacaaaagaaaattaatcacaactctttgttttctcttacctatctattgcatactgtttggatctttaagctccaaaattgtcgccgtctgatctaacagtactgacccttttcttgttggcatatctcctagcccagaatgcataattgataaatgccaccagctcgaaggttgccaataacaagaagaagcgatcaaggcgtgtcctgttgaagtttgttccatctaaccatcctcttccattgtctccaagccttgtcattctgttgacgagctggacaaaggcacatcctgaccaggctgctattccgaccagaagagactgcactgctggtgcaatatgctttgcttcaggtgcctcgctctttatgaactgaaccagcccaccaatatatgctatatccatgatgcttagcaggaagaactgcatcaccagccagaagacggacattgggacaccgtcagctactaatgttagcccttgctgctccacgaccatcaacctctttgcttccaccaacatggcaatgcatgctgccattatcccacacgcagaggcaacaccgatgtgctgcagaggggtgataccattggtgtggcctgtgaatatcctcagcagtggtatcaagattctcctgtagcacggttgcatcagcatgtgaaatgttgttgggattgcgatgagagaggcagagggtatctggatcattcctatccctgagtccatcgtgctgccaacctgtatggttaacgtcatgagcaatgtgaagggcaagtaggcgaatatgcagctgatgaagattggaagcatccgagtaatagcctctgttttctcatcaactcgagtagtgctgcagaaaatacaaattgttttttcccgtcatgtattcaggatttgtccacaaatatattagggtattatggagattatgatttccacaaaaataggaattattatactcttggttctcaacatttatttaaaagttaaaagttcatacattgttttcagaaatacattgttttctggggatttttttattatcagggaacttaccaaatatttttgctgtcacatttgtcttccccgtcctcatctacatgatctgatgtactgatctcttgcagctcaataacatgaataacagcagcctgcctcttctttgatgatgtgacaagaacctggaaaggtaccagtaatacaacttcaaaacaatatgatcttctgttttccttgctttgtcttgctacattcaattttgttttagattgatgtgtggaaggactgccctaatttctttattgcttgtaattaatctgttatctgaaatttctagaaataggcatggtgactttccagcaataagcatggaaggtagaataatgcaatgtaatgctatcagacaaaagagtataaaacataacttggataacagcatccttcttgtatatatttgacttccacaaaatggatcgtggataatataaagcaacactaaccagttggcgtcaaaataaatcaatcatacacaaattcgttataattaacatgcataccaaattagaccgacaaacgtatataattgtggcatatgattttttacctgcaatattctagttagaggacttccattgagcttgcgcattccatagaaaggcagtccactggctgctatgagcagccctacaataacaataagggcacacaacaaaaagccaatgtcccaacccagattcttctcgatccacactaggaataccaatccaataagtgctccaagagagtttgcagacttgagccagcttaagaagttactcctgagatgcgatgcttctggatcatcattgctgaactgatcttcaccaagggctggtacgcaatcgcgcatgcagccctccccaatggcaaacattaataagctcaagtagagcagtgttaagttccagccttgcgctggctcacatttgcttggatctttgtttatctcacaaatcggaggatggagtgaaggcaagtgcgcttgcaatgctagcaacatatagccctgcatttcaaacacaaattgattataactcagcattttaaaaaaccctacctcctcatcttagaagcttaaaatgtcctgaaagcatatactatctccctcgtcttaaaatcctgtactaattcttttaggcgaataaaagcttcgatttgattactcattcgaacaaaatgttagcaaatcgaaagtgacacgaaaaatatgcttccaaagtgttcgattctaacatttggggatgccattgtaaactcacctccaccctagtacgattttctcccaattctgcctattacatcttccttaacctcgccggctcgtcctcacccacccaccccccccccccggctccctcctgctgctcctcctccggcgaactcttctcgtagccatcggtgatcgccctgcttctccgctctcgcttgatcccacgtcatccaggtcaaagaggacagatccgcgcgcgagcgcggagaagagtgcacatcccggtggatgcgcggccgatggccggtagctggtggcagcgatcggagagagcggggagaaatccggcgaccggccggaattccatcatctccacggagaagctaatgggggtgaagagaccggagggcaagggcatcttcgggagttcctaatatgacaaagtattttcagtgaaatacgatactttcaactcgaattccgcatggattttaaattttaaaattttagggatcaaatatttttaactataagtaactaagttcgaattaaaatttcgaactcgaactgattatccaactaatgaaacttgataaagttatcttttacctgctactaaacttagattgtgtttgggaggagtactccggcacgtaaaacggagcatgtattattgcacgattaaatgattaattatatattaactattttttaaaaaaaatggattaatataattttctaaaacaactttcgtatagaaattttttaaaataaaacacaccgtttagcagtttgaaaagcatgcacgcggaaaacaatacaggtgggttgggaaaactaggataagaactcagccttattattcctaactcaaactttgtacaactaaaactgatcatttataatagcatgcatgtaaatagtcattgaaacaaattacagttctctaaaatcgggttggaaacgagaaattaaattaccaggatcacaaaggggctaaacacaaagatggcagtggttggtttgatatatgcatttgagaggatgttcatcagcgcagtgaagaatgacacagcgccaaccagatatgtaatcatggatgacgaggtaacaatatccagatgcaatgtctgatggaagtatgccactaaactgaagtttgcgctgttagggcagctgcgcagagccaccaaaactgcaataaataaataaagagtaaatttcacaaaaactacatatactttagtcaaattatcgtaaaactacaaatttaatgtcatatatcacataactatagacttagcaacaaatttatcccaaaattacaggtttaaaactaagtatcataaaactacatatttaataatcaaattatcacaaaacatcatattttggggtttaatttttttaaactaatgttatgtttgagttgtaaatgtccaagttttatgattaaattgatattaaacatgtagttttacgataatttttttactaaaactatagttttgtgttattttaccttaaatctatagttctatgataaaaaaaaatagtgttaaatatgtagtattgtgttaaatttatagtttttgataatttgaccaaagtacttttaattttgtgaaatttactcataaataaataattaaataacagacttaggaattgtccagaaaattcatgcaagtccatcaaaaaataggattccaatcagaaattcatgcaaatatatcattaggcctagctatctaatttctgaagactgtgtgtgcggggcctatcaggctttgctcaaatttacttttgtctcttcttcagaattaatttgaggagtttaaggtctgattctgaatcctgatggaaatattctgtacaggaggtgatttctagttttctactgtactagttttttttacagcttaaattaccacgtattcatgtggcatggggtcaaaataatttagagtagcatcctaccatgtacatctgcgggaaagaaataagtagaaatggttctcattgcaggacgggatgaggctcgaacccggaccggctagctcgcagcttgtgttgctagccagaagaccccgggtcttttctctacctcgaatgttatctaacgctttgtcagttgtgatgtcgttttggtttatttcatatattttttgttgcctttattagtagttgcgttgcaagcaccaaataagtgaaagatatcctttaattgctctgctagccctgatggagacaaaatgaatattggttcttggacatgagattttcgtcagacttttcagaccaaatcatagaaaaataatgcttagatgtgtggatggagataagtagatggtacatagtgtgggaagagattttgcactgcgtcctttatcctttggcctattttcttttctttattgcgagtgaaacacaacacataggtgtccttatacatccctataaatagacacacgtacactttattccttgtgagtagattggaccgatatatcttaagataaacgaaagtcactacgtgtattatcaacatatacttaaaaaataattatctataaatacgagcacccatatcaaatataaaactttaacctagataataggtttcaccataagatatctaacaagttaaattacgtttcacttcatcttcgacctatcgtctgttggagttggatgactatatatataatagtatcaatttgccccacgtgtattagtactttataactttatttcatttaaacaatcttggaagatcggaatgtaatcctactgcaagactcactcgatgttgatatgttggatgtgtcctgcatgcccgttaaattattcgagtgttatacaattagcatctccccactgcacgttctatatgattttccacttattctttttttttttacgcgtggagctgttccatattcggctagcgagcgtgccaatcatgacaatattttacgttacactatttttttgacaaactgatttctgataatgggatataatatctatgatctagaacgttccttcttatgacttactagagaacagctttatattaggtggtagcaaacgtacaaatcatgataatattttctgatgttacatttttttttgacaaactgatatctgataatcagatatgatatattgatatccatgatctagatcgatctttcttatgacttggctgtgttcttggccgggtgcatcttcccaagtgtactatatcgttttacacacgcatgcttgatcctaaactgttaaatacgcgtgtttttttaaaaaatacatgaaagttgtttttaaaaataatattaatttattttaaaaaactaatactttattaattatgtgctaatgagttgttccgttttgtgtgtgtgagggattagttcccatccctttgagccaaacacaagcttatatccgtaatctcgtatttcaggataaccttttgctgaacgatacggttacatagaaattatatgacctttaatagctctaaaattaactcttttgtacagtagtcgtttaagaagatggtaactggacgtgccaatgatctttgttgcttaaaaaatggtggccacaggcttaaggaatggtgcaaaagctacaaattttcaccaaattcagcattagtttgaaaaaaaaaagacgttatcgcttattaatttgaacgttctcaaatggtgcaaatattgtgatcgcttgttaattaatttgttgagatcaaggaccatgtaattgtttcgaatgttgattaaaactttcgaaggagattggaagcggaaccttctctctcacttttgttggacaaggtgcggttatttgtttaaaccttaattcttgtaagaagcacttccacctttcaagtcctcctcaatggctcaccagggcggcggatcaaacatggaagaggactttggcaaggggaccccctctcgccgctcctcttcatcttggcaatcgaccctctacagcgtatcctctccaaggcaacagagctgggcgcaatttcaaagttgcgaggaagaacaactcggttgcggacctcgatgtatgcggacgatgttgtcatcttcattgatcccacccgagacgatgtcacggcctttgcggacatcttacaccgtttcggtacagctactgggctcgttaccaacctccagaaatcccaagttgcggcaatcagatgtgataacatagatctgacagacgtgctacagggtgtcccagcaatgatggcaagtttccccttaaaatacttgggcctcccactagttcttggaggattgcggaagatggacttgcaacttgtttttgacaaaatctcaggaaaggtcgcaagttggagggggaaaagcatgggagcagctggaagaactacgctagtcaagtctgtgctctcagcgcagccaatctacctcctgactgcctaggtgacgaaagaatccctggagcaacttgataagcagagacgtcattttctctgggctggcacaggcgatatcactgggggaaaatgcaaggtcaattggacaaagacgtgcttgccgactagccagggaggcttggggagtcctgaacctaaaaaaattcacaagggccttcagactgcgatggctttggcacgaatggaaagatccgaacaagccgtgggtgggtttggacacgccttgtgatgaaatcgacaaagacctcttcgctgcctcaacaaagataaccgtcggtgatgggaatatgacatgcttctgggattccgcttggattgatgggcgcaggccaaaagatcttatgccattggtctacgcaatctccaaaaataggaaaaagtccctacgccaagggaaagaggacgacgcatgggtgcatgacctaatctttgacgcaagctcaaccatcacagtcaacctagtggaacagctggtccgcttgtgggaagcggtccgaaatgtgcagttagtcagtgaagagccggatcagattgtttggaaattcacaggcaatggccattatacagcctcttcggcctatcatgcacaatgcttgggggcgccaagtacaaacctcaactctttgatttggaaagcatgggccctggggaaatgcaaatttcatgcctggctcatcatccagaatagagtctggacgtccgaccgacttgcaataagaggttggcagaacaacggccattgccccctctgtcgttgcgaagctaagacgggattgcatcctgtcgccacatgcagatacacaaagagaatatggcaccacgttgccggatgggtgggatatcatcaattggagccgtcccagtgggaggaagcccggtcagtccgccaatggtgggaaagcctagcaaatactcccaacatcccaaaaaagggccttcggtccctcatcctactagtagtctgagaaatctggaaggagagaaatcgtaggattttcgatcacaaagagatggcggtaggccttctcctagcaaaaataaaagaggaggctagcctgtgggccttagcaggggcaaaaagattgcgcgaattcgtcccacacattgtatagtttatagcttaaagtcttttttgctttacccttaggggttgtattttctccttctatattcaatgaaaaggcgcactcttgtgccgttttccgttcgaaaaaaattcttgtaagaagtatgggatgaacatacgcttttcattttgcgcaaaatttttagattttagcacagccctcttttaactgatttttgtgtcaaagtcatcgagagcggtagattttggatgttctgtagttctttatgctggagttaaatattctaactgttgtcatttaggctctcttaaaaattgttagaatgtttgatcgatcatgggcctgcagatttcagtgggcatacatatcgtccccccagctcaaaacagtatacagatggtcataatcttgtttacttgcgtgtaacaaatttgcaccatttgaatgatcaaattaataagcgacgatgattctactatggttcaaactaatgctgaatttgctgaaaatttttagcttttgggactgaatatggtgactccacatccaacattacgtacggatcctacaaagttataactaaaaagaagatctacttacgctctaaacttgaagatttctcctctttcatatccttaattcttagttcttaccccctacagagaaacgcctagggtctttcggctaactccacaaggtgatgggctagacgatctgagttcgaagcatcacctcttctaattatttgatattagatccttccctaatattcgtgtttttttaacataaaaaagaagcacagaaaaggttgcaagaacacaatatccaacaaatatgaaaacaagagacagactaaatgaaaacaactaattcattttccatgcatttacccaacaagacacaatatacctctagttacattctcaaggacgataaaattacctatacaacaaatttattttccatgcactacactatatgaaaacaagagtcagactaaatgcatctccctaaacaagaaacagaaacacaaattaatgtgtagctatatattattacaagaaacgattagaaacaatagacaagactaaatctacttaaagttaaaacacaaatgtgtagtgcatgcatgcagtggcttaccatagagaaagactgttgccttggtgcctccatgcttccttgcatccactgcgttccctctccaatctacatacccttcatcaagtgccatctatatatgcttctccaaatcagccttaatgcacatatatatacaccgttgtaccacaaattaacgaacaaaacagactgctgctgctcctatctctctatatgtttggagagtgttttcgaatctcagaagagacaagtaattaatatcctggacatctcatgatcaggagacgatggctaatatatataagtagctagctagctcttggtgtatatactcacgtggtctcctgtgcatttcccacatttttcttcaggtgacgcggcgtatggactgcgcgcggggctccgggacgtggccaaagatctcgtcacgtttaggctgcgttggggtgagggttttgggtaagctaatactatatcaatatacgcgcgagtatatttttcaaactattaaactgggtgtttttataaaaatatatatatataaatatcgtaaaaaattatacaaatctatcttttaaatttataatagttagtatttaattaattatacgctaataaaacataataatcagctaactctcgatcaaactcagcctaatgatgcatgtgtttactactacgtggcttgtcccgtcgctagctggtcagatctccgctctccggttagcctggagcttgcctgtcgctaccgctgcagatctcccccgaataatttggattttctgagtggtcgccacatcttccccgcgcgtgtcctgcgagttgaaattacgagtgtcagtaaactgaaacggcttgtaaagctgtgatgcacatgccgctttgacaaatttcaatatcttatgtccacgtgatcctctattcaatgaagttttcatgtgctgtaaattagtagacatgaaatatgtttttcaaggatgttctgtgtgtaaagatgattaaaataacagtgcatcactgattttgttgtgtgccagaagattcagaagatcctctgaatgctgctcttgatactagtagtctcttgcactgggggcagctatatcacgactaattccatgaggtaccaggaaagtaggaagagatataattgggcattagtaaaattttgtacggtcatagacatacagttgtattggagttgtctctgaatgatatattttgccacagaaaacgaccacttttacacacatttgggtcggaatggtacaaaatgtacatttgagtcgaaatgatcaacgaccaagtccagccaatcaactgaacacaaacagcatgatacaacttacatcagtacatggttaccttttgctttgcatctgtgaagtaaatggtgcttcaagagcaatcaaatctatcacggtgagtcctgatcagctgatggggtgaccatgcgtggattgtgccggtaggcatacttcttcgcccagtacaggtaattcaagaagccaagcagcccgataacagcaaccacccagtaaaacaagtcaaggtggctgttgttcaagcttgtaccctcgagccaccctctatggtgtccatgcctcgtagccttgttcaccagctccaccaggaacgtgcccatccatgaagcgagacccagctcgcaccagaacagcgccgtgccaatggacttcatatcctttggtgcttcgctgttgaagaactcaagcagcccgacgaacgatgtaacgtctgacacgccaagcaagaagaactgaggtgcaagccagaagagggacatctgcacagctgcctccttcctctttctctcgacgactgctgcaacggccgatgcaactatcatggaggcaaagcctaagccaacacgttgcaggtgagtgataccgcaggcatatcctgtgcgcttgcgcatgaacggaacaaggaagcgatcatagacggcgagcattagcatctggaatgtgatggggatcacaaagagcgtcgcgggggagatatgtatcttgcccagccttgtgtttgtcatgctaccttgttgcacagtgaaagtgaggagcagagggtttgagatataaccgatcatggagctgatgaagaggggaagcattcgaagaacaatctttgtctcctccactttcattgtgctgcaaactgaccaggctccatcttcaccatggttgatggaggctttgtcaagaaatctggcaaaaaaaaaagtgtgcagaagagtttataacatttactaaagaatcatattctcttaaaatccatgcatgatgtgtgatacccttaactgaaaaaatgtgtgtatcttgctgaagcttacttcagaaaatttgtaggacgtggtacttcaatagaatccagtccattacggttttcttgtgcttcctcaagtttctcgggaagttcatatttcctgttcttgaatgcaaccacaagaacctggaaaaggcaatttttcagataggcggcagatatggaatggtgattttctcctgagagatggaaatctattatatctataaagcaatagaaaaaagagccaccacgttcgctctcgcggcctaaaaattaccacgttaatcaaagaaaaaaagaaaaaaaaacaaacggacattattcttttggaaacatgacatactaggaacatactcacgcacgcattgtataggtttaggaaactgatcacaactcttaatcggatgaaaattagaagcaaaaaaacaaacgggcaggattctttttggaactgtgatataacaataaatattcatgtatggttatagtgtaggaaacggacaacagttaacaaaccaatcataattagattctttcatggaattagcatccatggcggtattagtttatacggttctgaattgtacacgattcatcccgtagtaataaatagatcgatactcctagcaatgaaaacaaaacgcaaaacacaaatattcagccataaatcttccagccgcaatcagctttaccaataaattagcaagacggaagttttgccgccggaatccacttcaataataaattggcacccaagaatgccataatcttatagcaaaggatcgtctaacaaataaatttgtgtgctacaaattaacatattagattggtaataaaaggaacctctatataagagtacaatttagagataactaaaatttggaatttaaaaataaggaatactagaagatgggtttagagtccataaaaatacaattagaaataacagaaattcgaaataaaaaaataaggaatagtgacagaagagtctagagcctatatatgaatttagaactaattgaaagtcgaaaataaaaaataagaaaaattaaaagtaaagtttagagtccatataaaaatatatttagaaataactgaaattcataatttttttaaaaaaaaaagaagattggaaaaagagtctagagtccatataggaatataatttagagataattgaaatttgaaattaaaaaaaatattggaagaagaatctagactccaaataggaatacaatttataaataacataaagtcataattaaaaataagaaatattggaagaacagtctattgttcatataggagtacaatttaaaaataacagaaatatgaaattaatagataagaaatattgaaagagaagtataaattatatatataaataaaatttagaaataactaaagtaaaaaacaataaataactttcacgcatatacattacagtatgaatattgcgcattggttagttttatcaagttagtacataaataatttaaaattatgttgtcatttcaatctattttaataataaaatgtgaatatatatatatggtattttatgggaaaaatataacgatgatgattgcgcgggccaccatgctagtttaagtttataacctgcagtatccgagttagagggcttccttctggtacttgattacggtagaaagggaggccagtggcaactatgagcaacccaagaagaattagcagtgcacacacgccaaatccaatgtcccaccccttgtagttctcgagccacactattagaatcaatcctataaatcctcctaaggagattccaaaggtgaaccagttgaagaaactggattgttggcgggattcagagggatcttcatggtcaaactgatctgctccaagtgatggcgtgcaagcacggatacagccttcactgaatgcccaggtgtacaagcctatgtgcaatatgacggtgttgaagccatgaacctcttcgcagttgcttagctctgcttcaatattgcaaggtggtggatggagtgaggggaggtaggcttgcagagcgagcaatccaagagcctgcacaagtagattgttaccttggaacttaaaccagtatgaagcagaaactacttgttcggtggctgtgagcaaagatagaaacttatatccagatattaagttttaaactagtgaaagtatctataagttaattgtctgaagaaaatcaatgctaatttaaccacaagcaaacaagaagatgccgatgtacttttttacatagaggtcctttaatatctttatcaagtaggcttcggatcaaggttatgccacagacccacagtaggtgatgaccaaaccatagttaaaaattcaacagaatatattcctttcaaaaaaaaaaaaaagttcaacagaatatgatctggtgttttggcttaattcacacctaactaattctgaaggagatataaaattgttttccttagcaacttgtaagaatcttgttttgtatgtatcccaagttcccagctactttgagcttgggaaaacgatttagcaacctaagcttttgaagtttcaggcaacctgcagctttttcgatatcggtgtgattacagctgagaataatgttagaagaaaaaacagaggcaacatgtgaaataattttcatgggtttctttcaacatctgatgtaactatatgatgctattagtttacattcattagctgtgattaaaataactgcgacgagtactgtgttttttttccccttctcttggcaggctgtcactagtaaagataaaaagaaagtgaaatcaagaaatttcaatggatgatacccagaatatatagaccgttgaatagaccatgaggcaaattaccagaaactccaacggaccaaagagtagtatggttctagagcgagtgatgtacgagtctgagaggaaagctcctaataaagcaaatccagatgtggcaccaatgaagttagtaactgtggttgcagagcttgaaactcccatatgcatggttccatggagatatgtaaccaaattcagcatgtttggaatattttccatgtttgttaccactgacagaactacaagagagaacaagcataaaaaaacacttcgatttcaataggaaaacctactgttagtgagtaattacacaaataacgcaagaagccaggaacaatatattaatcaatggactcagtagagcaacttacagaacataaaccatgcagctctgactcctccatgtacctttctgtctatcgggtttcccctccagtccacaaagcctccaaccaccatcagctacagatgaattagcgtcttcttgcacttgattactacttcttcattgcatacttccattccatcataggaggtatatatagacatatggtatactttttttttcctcgcaaagtggccccagctaaataaagaaagatgacaagtgaaagatcattggctattctatgcaatagattatagatgttgcccccaacagaaccaaccacagacgattgttgacttatagagtcaccactgtgcagcccaactgccaagaatgcagtaagcaagatacgataattatccggcgcactgtatttttccttctctcaggacatcgcgcctgaaaaagtgccaggcaggaggctacaggtgaagcatttcatcgaacatctgaagtgccttccttcgaggccgcagggctgcaatgcaacccaacccagcaaaccacttaaccacccccaatgtaacagatgactcgctcaatcacttcatcggtgcatgggaggactacgagggaataagcaggaggccatgctctcctatcgaagaggaagactgagcaaaatttcaatggacatgctgcaagaatggtaggcaaaaaaaggtgaaaattagactgctacttcagtatgaaacagcaatggtaaaatagctgctctttacgcctttacggtcttacccatggacatgcacaaccgccgtggcaggcagcccagcgcattggctcgccgcggggggcttcccatggaggctggttgttgatcactattcactactcttccccccaacccctcctacccctgaacgcgagcgggcggcggatggttcgggccgttcggctcgtcctcctcgtcggcgtcggcctcggcctcggcctcagagcatcacggtcgtggctcgtgaggagaggcggcgtcgccctcgaggctcgccgcacgccggcgctccgggacggtggggggcggtgatctcgcccgatgggcctcggttgcgcaagctgggccggaaaaggacagacacgaacgcgtctccgcacggttgggccgggccgaaaaacaccggacttgccggcccggaacgggagggcggaggctggggaggcggtggcggacatctccgagggagacggggatccgatccgacccttgctgagctgcgcctgagatgccggccaacacatccactggatgatcctcctcggctcctcgccgccgccggcgacgacgacgacgaaaaggtagcaacagaggtgtgggggaagcagacaaatgtacaacaccttcgtccgcattcagaggaaagatcggacagtatcacagtactgctggtttgtacgtgtttcctggtaggtactcctatatcgtatctgaagttctgaatatatgcctccaagctagtcgtgtgcttcgtctgaatcagtagtggtgattactaaaagtggaatatcctaatgcatatggtaacataaaaaaaaatatagctcttcgccagaataatttatggtgatcatcttctatgtaatgtcagctcaagaagcctcctctgatgatctatgttctgcttaacaaaccatttcctggcaacaaatcttgcgccatactagatcctgtcagacaggtaaaaatggagaaaagaaaagaaaattccattgtacagacacattagttacaaaatacatcatctgcatataactctcaaggtttgccaagtcagatacacctggtggaggaataacgagcaagaatattaaagcgataattttcattcctgtttctgtccataacaggtttttaaccgtctccccggcacatctagcaccggaactatacacttgtgacggcaatgcacaaccagtatagctcgtacagtccttcccatgtatacaagattcgacaccaacacaacctgattcttcacccacccaatgctgaaattatcccagtttccaccatgagaaattgacaatacatgccaggtgacagaacaatgatctagtcgctaccacgtaataaaatttggtctgcatccagatcttcctaaaacttcccagctagagagagccgatagaaactgagggtggcacggccatcttaaaaagggagccagccaccgacccttgccagcaagggcaagcaggatgagagctggctcactacggtgcagcgcccaaaaggctctggcgattgccctggtttccccatgctctctccttccacaggagctcaacctgctcaaagctgaggcctttagtctccggcacgtagagagccacgaagatgaaggccagcaccgctattccggcgatgatcaggaaggtcaggccggtcccaaccaacccgacgatcgagaggaatgtttgtgccacaatcaggttagatacccagttgacagtggctgacatgccaccacacattccacggtatgcctcggggtagatctcggagttcactgcccatggaactggccccatgcctggggagaagaaggcgatgtatagagcgagtcccgccaccgcgaaccatcccagtgcaccttggcaggcaccattgagtgcattcgaacagatatctgatgatgactgcagtatgaaggccattgctaggatggcgagggagaccaccacaccagccaagcttgtaagggccaggcgacgccggccacagcggtcaatcaggtagattccaacaatggtcccagcggcattcataccagcgactatgagggaaaggagcaatgccaacttgttggaggtaaacccagccatctggacaattgttgggctgtagtacatgacagtgttgatgccagtaaattgctggaacgcctgcacagattaacatgtcttaggggagaaaactccatgtagttaccaacaggatgcataaatcaaatgctccttgaggaatgcacttagcacagtgaaccgtttatctccctggtgactaaaagtttaagggactaagaacatacctaaaatgagtgggctagaatgctagatgatgaacatacctgaagaccagctccagcaaaaaatgctagccttagttcctttgacttgaaaatgtccaaatagctcccagtaccatcagactgaaattcatgcattgaagaagaagcaagaagctctacctcttcctctagacggtcagagtcataaatcttctctaggacagaaatagcttttgctttctcatcctgtaaagaaaagttaatgtaacaacaaaatgcagataaaaggagataatacatgactgaataaaagcttaaaatataaccttccagaaaagccaacggggagattctggcaaaaaaagcatcagaacaaactgtagaattgcaggcacagcagcaactccgagcatccagcgccatgttccaggaacctatgacatgtagcatgcatatcattgcaagtttgcaactactcgtactaatgtattaccagcttacgaatatctccactataactctcaagaaagatggttgtatatcttcttttataggacatcttatattgttttctaataatgcaggatttgttatgcatcaagattatgaaaccccaagtcaaattataaggagacgcacaatgataatttaatattgttggtcattgctttataaggttctacttgactgaattatttgattcaaatgacacataatttttcatcctcaggtaagtaaagtggtacttcaagaacaaacagtgaataggctactgaaatcacaaaatcatatgatgtgccaagggataaaatgtgcatttcagataaatacaggaagttcatttaagaaaaaagaaaacagaatgatgtatatactgcagtgaatttcagaaacagaaagatggagcattaacactagagtggctacgcaccaaacaacaccttgttggtgattcatccattgctgctggcaaggaagctgactcttgttcattgctaattaagtgttacacagttaactagcaccaacaggaatgttaataccataaaaggtaaatatatgaaaaggagaaaaaggtagtataaacatggcattgatgctgaaatcctttctcaagggagttcatcttgaataacataacatgtgcagcttttccatggttcttgtgcaagagtaccgaccccaagcttgttattttttcattaaagatatgatgcgagctcatatatatacttagttgcagttaacagttaagttccccatggcagtgcaagacctggtttgtggaagctcaataaaaaaatttcaactgcaatgttttcagcttgaacttgttccgtttatagttgaatgttaaaagaacttaaactgaaaactgctaatgtgtaggaataatggaataaaatatgctaattaaatggaggttgaatgtctacctcagtaaagccaagattgatgaggtaggagaagaattgaccaccagtaatcatgagtacattagttgacaccaaacctcccctaatttccgaaggagcagcttcagcaatgtaaactggcgctgtgactgatgctatacccacacccaagccaacaagaagccttccaagaatcagaatgtaaggaccaccagcagcacacataacaagtgagccaagtgcaaacagcatgtcagccacaagagtagacttcctacggccgtatgtatcattgatccagccgccgccagctgctccaatgatggctcctaccaatgccatgctaacgattgtctcctacggaagaaccaaaatcagttggtgcaggcgtgccatatggttaatgaccagtaatttgtactagattagattgaacctgtaagaaataattgtctctgactgctggaaagtcatcccgaatatacaaaagggctccagatatgacacctgatagaataaatttcttagctaagagcacaaatttatcatactgtcttctcttcttttcttttttttttttggcaaaagtatacagtacagtaattctgtgaagttacacacactcgaagattttgctagaaattaataagaatgatgcaagcattgatttcatcccgctgctaaaattaatatctatctttatgcagtactgtagagatcatagcacgaactcaacaaaataagtccactattcataaatctcatttcagacttccacttcaaactttgtttgtttgtatcaatgatatctaaccataggcttcctgaacatactgtcaaatatcaaattggaccaaacaccatctgaatgtttcatcatatgaaaatgaagtaacccaacaagtccaaagcaaccaaaaacatgtcgcttattactgcgaggggaaattcatcgagaacagctacacttgatgaaacgttcaggcaaaagttggaaggtaaatggcacacatgcaaccatatacctgtgtcgtagccaaagaggaacccgccgattcctgcggcgcccgtgagcgcgagcacgtagcggttgctgaagaaattcatgtgcttcttcccccctacgtcgtccaggagcccggagctcccgggcatggacaaatcgatcgtcatgccctccgctcccaccaaatctgaccgaaccccccccccncnnccccaaactcctcccaaaatccaaacttcggcaaacaatcaccaaaaaacaacgacctcaaaatcgctccacaaaaaaaatccaatctttgcccagatgcaagtaaagcctgctctacaaaatccaacctttcggccgcccccgaggtcacaggctcgggaaccaaccaaaccggggagaagaacggaagacgcgcgcagaaatttctagggacagagagagatttcaggagccgcggtcccggaccaaggtagaaagggagagattccaggggacggggcgacgagagaccagcattcggggaagaggcaggggcagcggcagcgagccagcgaggcgcggcttaaataggaaagctgcgctcgcacggctggcgggctgggtggtggttgggcaaatgatcggaggagagagctgggggagaagaaggtgagcttgcaggttttgaaggagaaattttgttgggttcagatgatcagatcagcatcgtcgcatcatcgattggcgatgaagccgatacgcttcgagtttccttttgattggttgacgaaagatatagggagacgccaccgtggggatcggaaattcggaattcggagggggaaaccgagcgagaccgcgagacggcgagagacggaccacggacctgaactcaggtcgtgtttggttgaaattaggaatgaaatcggatcgaaaacggatggaattatcatatttgtttttattttttttgaattgaaatcggaatcgaaaactcggatacggaaatgaaatcgaatattatcgaatacagatacggagcgaatacgagacggaacgaatacgatagcgaatatttaccagtatataaaaaacccctcaaattgagtttcttgattaaggaaaagatatcgcttattattttagttcaacatctccaacatttatatcgtcaattttatagacgatcccacaaccctatgtgaaaatcgattttcatggctattgctcttagagatccatatgcaaatatgattatcattttctattctcaagaccttttactagatgtataacttacttaccattgtataaattggagatgttatttattttacttcacatcttcgaaacttgtaatgtttgttttatactttaaatgctttcaaatacaactgttataaactacaaagtggtagatcccgttgagttctacaactttgatatggaacacatctccatcagatgttgttgtttgaattgcagttctgagatcttgtaaaaattaatatggtatattataatgaatatttagactccttaaatgacctcaaataataaaataatcaataagaaagttgtagatctcatcgagctctacaatgttgatataaagtttgtctccatctgattccgtatgaaaaagttatgtatatatacgttttttttttaaatttgctcaatgtctgcggatataaaaaaaatccggatagttccgaccgtattccgattccaacagataaaaatccggatagttccgaccgtttttcgattccgacagatagtacccttactgtattcgttttcgttccgagaaaaaaatccgaattcgtttccgaatccgggaatttccggatagttccgaccgaaactatccgaatccgaaaaatggtccagacggacggaaactatccgaaccactttcacctctagttgaaattaaaagtttatgtgtgtagaaaagttttgatgtgataaaaaagttagaagtttaaagaattattttggaactaaacacggactcaaagctgatggtaatccatacagcaacacttcacagatgacatcgatgaaattcctccacaaaagaaagtagatcttgtgctctcgattcaaaaggcaaaagaagtttaatggaaataaattactgaaagttgtaatgtatttccgtaatcttacgaagtcgctgataacgagagaaaaaaagaaaaggctataattgcaaatggagaaatcattaatcgacgaacaaagataggctgcaaaatgagttgtagccgtatcattttatccggtattagttcatttttcgtcacatgaaaaaaaaaagcgtctagacgcaacgggagagatgtgcgtgggccagtggtgggcccaccgcccgcgcttcgaaaccgacgagaggaaggccgtttctgctgaaccgcatcgccgaaagccccttggtccttggagagccaggaaacgtggctcgggctcggacggtcagatgctcggatgaacacatctccgccattatccgatctgtttattccgtccggccgcgcgcgttggcgtcagagagcatccgcgtccgttgggtgtggatcagcgcggtgaggtgtcgccgccgcctgggaccgggtggcccggggggccatccagcccaactgccgcctctcacgagtcacgtcaccgcggctgtgattgccctgtgggaggttgacggagatgcgctcgtggcggatgggtgagcggctcgtggctgcggaaaccggccgcgtcgttgtcgtcgcagggcccccgcgccacggctgcgaaggaaggcctctcgcttgttgcgcttgttgcgccttttgcacgtgccaccggcgctggtgaagtcgtacgtcattctcctgggcggtcagttccactgctttgccctagctgggcacgctgcacgggtgaacactgaggtggtgtttgagtcatgaagatgaaataaaattaaatgttttatgtaaaatgagatggtaatgacgtgtgattaattgagttttaattattataaacttgaaaaatgaattgagatggtaataacatatgattaattgagttttaattattacaaacttaaaaaataaattaatatgatattttagaacaacttacatatagaaagttttcgcacaaaacgcaccgtttaatagtttgaaaaacgtgccacgtttatctaaaagtttatccaacttttgttggagattcgaacggggcctgattagtgatttgttgggtatgcagcatcgagcatccggccaagccaaaacaccacgttccagtacacctcgtcaattggccaccatgctcgtcaggcttaagcccgcgtcttcggcgcttttcatactgcggtggccgtgctcgtgactccgcgagcgagcagggttggcagcatccagcgccctagcagccttagcgcacacgtcaagctcgagcacagcttgtatcttcatcaccgtcgtttcccactccttgttccggtcaccaactcaccatttgcattcatttgtggagttaggatgtgtcctaacgtgctcgatattagaccctcgagatctatgcaccacggaacattctttgagtaagtattatttagttaatagaagctcaacaggtgttgacatgttctgataatgaagtgctgatagatcatagaatgatagtgcagcatgtttattgattctttgagttgcagacattcatagagagccattgaatttgatcttagaccccctgtgaattatagattaccttgggcacaaccctgccatattctcttttgttccaagggataggagattaggggtgcaacgatgcacaataatcaatggatgcgcgacacgccgacacccgcggcttctctctaagcagacattgttggagtaccccaatttgttggtggtctcggtaaatatcgacctgaaatcgaatgccaccaacgaactaagtcggaagtccaattcgaatgaatagtgttcatttacatctgcttatcggatagttttccttgggaaaaacattggctccatgtggcaaattcattcggaaaagcaaaaatcccacgtagatgcaaagttcttcgtgttcttagcaacaaggggcagtcacctaacatcggacaaacacaaccttgtgtctagccaagttgtccataccatcccttatgtgtcgactgtcgcattgccagatttgtgcacacttgttcacccaatatccatacacccaacgggttcaggagaatattaaacaactgaatttctcaattgggccataggtatagcatatcatcaataattggtggtcccaagcatggcaagccatggcaaaacaaagtagagcagtgctcgacacgaccatcagcctagtcacttcgataatttgcagatagcgaaacaccttcgatggtgttagcagatcgctaagtgggttagccatcacaaaaaaactggtggacatggcgtgctacgggactgacgggggcaacccttaggtaaaattgtagctttcccctaataaagtcacaacaaattttgcaggtgtgtcttgctcggctcccatcaggctgcatgcttgcaacttgttggctttgtaaggttatgtaaaattcctccacgatcttaatataattggcttatgttctcctagatggtaaattttttgaaaaaaaatatataaaaattgcttagaatatttttttcctaaaacaaccttttaactttagagtagttaatttatccatttgtaaatttaaatattatcacaaaatcatataatacattattcatccatccaacaaggcccaattttgaagggatgaattcaacaagaacgattcaataggccaaggcataaagtaacaaattcaatgttggtttggtttgaagccctaccaaaacgttgatagtgtcaaaacctaggcactaccaaatttgacagagtagatttgctaccacctaggaaaaaatcggtcttaatccaaattccaccaaagtattgtcgaagttatcaaaatattaatagaatccaaattagcaccaatccaaatattgccctcatagccatttttttggggttctgctttttatgagcctaataacttgcagcttatctgaacatgtctacataacctgcttacctggattttccacctagtgtgttttcaaggttgctataagttgtcgaagcccacgacacaaagcctattagattcgaggcatgcaaagatatggagctcacagtggtgaccatgcccaaatttatgcccctctgacattgcactctccctagagcactatccattggtcgtggagtactagcgcattgccgtctaccggtaccactggaggacaactaagggagagagagagagagagagagagactagaggtaccattaacaaagatatgcaaaatcatctttaagctcatgtttttcatcactggtgagcttcagtggctatgggcttcactgcaaagcatgcctcctcaccgagtcgcaagctcgtgaccatcgctcatcgggtcgcaccgataggaggacccactaggcagcaaaaaaaaacatccttttgaaatattttaaaatacccttggatcatctcttattgttgatgaccaggtatggctagagaaccaatcatttcagagagccattgaataacccatttttgcaatttgcgtttgtccttggaagttggaagtaaacgcatgtcttcacatttgttcaatactccctccgtcccaaaatgtaagcatttttagctatgaatctggacaacagtgtgtccagattcatagctaaaagttgctatattttaggacggaggtagtttctctttttcaccactcattacgattctttttgttgtgatcatataagatatgtgttgttagctatttaccagtcttgaaaatttgcccatgctatttgtgtggtgagttacaaagttattgtggatacataagtacatactagtaatttgttaaatctagttaaatcacttgccaatactctggaacaatcaagtagtcttcgtgctcgaaacgcttggaaaacatagcccgagcacctgtatcatatcagtctccaaacatatgttacctataaaaaaaaccaatgcaactagtctattttaactcatgttgttattctctagttcttccttcaagcagtctccacgtcgaaagtctctgtcacactatttgcccacaactgttttataagtctgacaattagttgaggccatccatgcagacaaggcgtctaacaagtttggtgtgtagcaaagaatgaatcttcgacctcgtcggctatgagcctatggtgttctcgatgtattgaaagtgtttaatgcttacataaggataactcatttgccacaatgccattgtaggtatgacatataatggccaaggtaagtaagtcgacaataaaaacaattgcataagtgatgtactaacacatgaagaaaaattgaccagccgcatgagagaagcctaatggcaaagtaggataaacttgagggttcttcgatgagtaatatataatttctttccataaaagcacatacaacataagatattttatagaaggaatcttataacataccagtgcatacctttgtgagttgttgcggtaacgtagaaatcatcctaagaacacttgaagagctaggttaagttgagacaatgaaatggtcgatgtagattatttgttctatcaattaataatgaatggatggtcaacatatgtatggttgtgaacttatgatattggagccacatgatgctccctaaaaattaaggtggaatgggttttcatgatatgaaactattcaaccaagcgttattagaacagcagtcctggcgcctattagtttttcctaagagtctttgcactcaaatttttatatccttctggtgacatcattgatacagtttttaattcaacatctccagttacttggaagagcattaaatatggctttgagttattgaaaaaaatgactaatatggaggataagtgatggtgccaaggtgtggatttggtgagatcagtgaatcccaagggtgttggattgaggtgacaggcaagaaagaagatatcaagattaaagtgggtatatcaactcatggctgcagataaaaggaatgggat

SEQ ID NO: 8765 - DNA, 77484 bp, Oryza sativa
  unsure (1)..(77484): unsure at all n locations
tttgactgtcaggcttgagaagccagcatcctatgatcagattaaggcagctatcaagtaagtgtagcataaattagaattgcccttacagaaagtgaagaggctaaagtattgggtaccagaacgtcatctaagactagcaattgacttttgtttgttctgttttctagggaggagtctgaggggaaactcaagggtattctgggttacgttgaggaggaccttgtttccacagacttccagggtgacaacaggtggagatctgtttaaattcgtcttgtatttggatactcggttactcgaagcccctgacctcttttgctctgtgtaacaggtcaagcatctttgatgcaaaggccggtattgctctcaatgacaactttgttaagcttgtgtcttggtatgacaacgaatggggatacaggtaatcatttctatgtgcattagaaagctatacttgttttttagttcatggttgtttggttcatatcgcgtaggctagctctccattagaaagctatactggctgttttgttcatatccttggaattttaacatgttctatggtagttctctgaactacattaccttggtcaggttgaacccttgttttctaatgtattactggttagttgcagttcttaacacaaactggatcacactccagtgtgccctctttcttttgctagttggattcaatattagagaattctgcactagtatctttttgccatactgttcaaataattcgtacccactccattttattactgtccaaataattcgtacattaacccactcctttttatttcagctctcgcgttgttgacctgatccgtcacatgtacaacacccagtagaagatggtcactctttcggaagaaatggagtagagtgctactgaaaataagtcggaccttttgcgagctactccagtagagcttcattagctgtatgctgccttttgtttttgctggcttttcgcatgatgttttattaaaactcgatgtaatgttaatttgtgtacttcatctccggcactttataaatcgtggtttttgaatttgaaagttcaagtggcattagacgaataatttcttgaggattagttggctgcgctgttgattgtagatgcttggttcatatccatagttgttgatattcacggcacgggtttgctgaaaaaatgtcgcctttttttctgcttgatttcagtcggattctttcgtctgatcgctcaagtgctcgcttgctctctgctccgactacattggcccgccgccatgtactcggttgctctttttttacagccaaacgtgcgaagtgttttcatctccttttttagaaaggagcctggggccctgcttttttatagaaggcaaatcctttttatagaaagcaaatagagtaaccaatttatcgctggggactccagctgaaggacactcgcagctagcgcccaaaacagagaacttggctatcggaaacaacactaaccagtcccgactcttgctggacgagggtcgttgaataacttcacgaatgttgtctaccaaagactgggtcggaatttcttcagctttcaaaagtggcgatgagtttgcagcgaaaaatcatatcatttctgacacggcggacacgcgggccgcgcctagcttaacgcactcgacgtgcaggcgcgtgaggcccgcgaacacgcggggatacttgtcgcggtaggacgcgaggcgcgccccttgcctagcgacgtccctgcccgcgcacagaagctccggcttctccgacgagacggtgaaccacaggtcgtggatcctgcggccgcgggccatggcgtcgtcgaccgcgcggacgatgccgaccgacttgtccctcgagaagaagctcaggcccaggcggcggatggcgtgccggctctcgtgcgctgccaggatgctctgcaccgcgcgcaccatcgcgtggttgctcctcgcggactcggatagggtggatgtgaagccgtcgtcggggtcgtcgtcggggtcgggtgcgaaggagtcgacgtccagctcgatgttggcgagcatgccggggacgcggctccaccgcctcgagaggaggctgcatcgcacggcgtcccgtgtgtccagcttgtccaggatgaggagcaggacgtcgtcgggcagatcgctcagcagcgtcgtcatcgtgtttttgtcgcggtctggcgttcgttacctgtggcgcgcgcgcgagaccgagagcaagcgccggcccgcgcctatatctttctcgtttatatgtccgcgagacgccgagaccgcgacgtttggtcgtctgccgctgcaatgctgcatgctttagtcgtcttgactcgtttccgattccatattttcgccaccagaatcccgacgaccgacgtgggaggtggcaggaggcgactggttggttgacagacccagattggaatatgggctggattcactcgttccaagttcggcccatgccaaaacagcccacttcatcgaattggatcacaattcctgatttccaagcccaatatacctataatccatacgggttattactttgagatattctgtctacaaaaacaaaccggcatacagccttgagccttctgtttggaaaggtttaggcccctttaaatcaaaggaaaaaccataggaattctaaaggattttatcctataggaaatgggaccacctatacatttgtcgataaattttctcctaaaattttgacagatgtaattatagtacaattatagtgtaattacactgaaatttatatgtaattacactgtaacttgcatgtaattacaatgtaacttgtatataagtttcacgtaattttgaattgttaaatctattacaagatttgttttggtgaggaaaaacaatcatagcacacacatatgtgtaaggatttattctcacaacctctattttaccgaaataacatattatagagagatttttgaaagttacatacgagttacactatagttacagtgtaatcacactactgtcaaatttttgggagaaaatttgtcaacaaatatatagcaaaatcgatgggaagggacataatcctatagagtcctttgaaacaaatgattgtttcctattaattcctttgaaattcctatggagtgaaccttactaaagcaattttggaggaaaacaagcatgaggtcgagacctcatgttttcctcttcatgtgtctaaggttcctgcgtttttcctgtgtgctaatcaaacgacagttcgaggccccctttgaattggaggaaaaatggaggaaaacaaaggaattgaaatcctactctattcatgcctttgattcgtaggaatgagaaaagaaaaaacgtaggaaactttcctattcctacaattctaaaggaaaaacgtagaaaatttaacatccactcaaacctcttggaaaactttccttaaatctatctctctcatctgattcttgcgtttttcctacggtccaatcaaacgatcattcctgtgtttctcctgtgttctgcaatcctctatttttacacttgcatttctatcagaatcctatgtttttcctattcaccgttttttcaatcctgcgattcaaatgggccctcagggatctaataagtgtggcattcaattcctacgtttttcctattcctctgttttctcaatcttgcgattcaaaggtgcccttaattgtgcatacaatgaagtacttgaatatcgtgattatcttgtgtacttggggggatgatttgatactatttataagaaaacacgtgaaacttctcttggtatcaccttttgtgaataagggaataacatgtctcctcgctatgctatggaaatagatgttacattcgtacttcttatatgtactaaaacacttttttatcatataaattttattctaaatataaccttccacccaccctttcatcttaaccatcttccatttgattctttcactaaggccctgttcttttctccaacaaaacttggataaaaataaagatttttgtggcacacatttcaaactgttaagccgtgcgtttcgtgcttctatatgaaagttgctctaaaatatcagataatatgttttccaaatttataacaattaaaactcaatcgatcatacgttaataccacctcgttttgtgtaaaaaacttaatcttcatcttcattttcagaagaaaagaaacaccacctaagtctctcatctataagtcataaccatctctcacttaatttctctacctattttctcacatcaatcaattatttaaattttaccttaaacttatttttttccaaagatagatatgttgaacatgtgttgggctattgtctattcacagctccattgtttgtttgttggtttattagctacaaccaaaatttaacttttgaaacttaataaattagagttaattttgagattttttcatcgtatttgtttttttacttttaaattattaagacacgattttaaaaatattatttgtaaattattttttattgcttccattattttttttttgaaagcttagagatctagagcaaagcgaggccgatcttcagtgctcaaccgccgcagcttagcgcgccaaaaatattgctatcttctcaaatttccctccaattcccctactcccccttccgtctctctcctccctcgtcggccccgcgccggcgccacaatctctgcctccgcagccgcgcccgccgcctccggagatgtactccccgccccacgccgccgactcggactccgagggatccctcctctccgacgtctccgcctccccgccacgccgccgctcgcctcctcgcccggcgccgcctcctcctcctcctcctcctccgcccaagcaccgtactaggcccgccgcccccaccaaacccaagctcaagcccacgccgcccgctgcctccgcgcccgcgcccgccccgccgcctccgcctacgctccgcgccgccgcgctctccgatccgcacggcctcgccgcgcgcatcgccgccggctctgctctcaccgcggcctccggcactgcctcgtcgtcctccttccgccgtctcgtccagtcgcgcaacccttccttcgatccagccaccgccttcacggctcccgcttcgtccgctccctccgaggttccgagcgccgctccgcggccgcccccgaccgccgccaccgacgcgccgccgcagaccaggcccaagcgggtgcaccccaactccgtgtcggaggtagcggccgcgtcggcggcggcggagcagccgaagcgggcaagagggggatccgagggcaacttcgtgcggctgaacatcaacgggtacggcaggaggaggacgttcaagaattcgcaggccaagcgctcgacgaaatgtcgatcctggcggcggcagcgcgccgccggtgcaacaccccgttctcagggcgacgaggaaggggatctcgtggcggaggccctgctggagcgggagaagcaggcagctagcgatagtgttctggaggctgtcgagagtgtgagggaggacccatcggagcaaaatctcaagagcttgctgaatgcagcatatgggcacgattcgttccgccaggggcagcttgaggcgatccagcaaattgttgcaggggagtcaacaatgcttgtgctgcccaccggtgcgggcaagtcgctatgctaccaggtatgcttcaaaatttgagctattaagtttatattggtcggtgctgaaaagttgatgatgctattttctcaggtgcctgctatgattttgcctggactgacactggtggtgagtccactgctttccttgatggttgatcaattgaggaagctccctgcatttctgccaggtggccttcttgcgagcagtcaggtaaaggcaaaatgtttgcagttgctgctagttccatccattcttgttttgactattgtgtaacattacctcatttatccagacatcggatgagtttcatgatacactacaaaggctgcgtgcaggggaaataaaggtacaattttcttaatgtcgacatctgatcagtttaagcattctccagtgactacagccttgatgctgccttatctagagaacatttccttactatctttatcaattcttccagtgcagcatttttcttggagtaactagaacatgaatcattaagaagcacaaatgtattttttttttgcacttcaatgttttgctaggttatgctgagattctttatttttgggatcaggtgctttttgtttcccctgagagattcttgaacgaagaattcctcctgatatttagggacacactaccaatatctcttgtggcgattgatgaagctcattgcatttctgaatggtgagctgacattgttcttagttcagttgagaagacatgatacttctttacagttggtactgtgttattacttttgtgttcacatcatttttgtgatacatcttattaattttaccgttgttttgttttcctagtttattattcacttgttgtgtagtgttagacagttagtacaactgtcttgctaagtttataacttattcctgactgaatgtacaggtctcataattttagaccttcatatctgagactccgagcgtcactacttaggagaaagctcaatgttcaatgtattcttgcaatgactgcaactgcaacgacccaaaccttggaggagataatgaatgccttagaaataccatctgataatctcattcaaacatctcaaataagagaaaatctacagctgtctatcagcacaagtgataacaggtaggccacttctctttgcacccatgaatgcaaccagagtcagtttaatacgtatttacatgtgaaagaaggtatgctatctggttttcaagagcatttgcacgtatgcagactgaaagatttgatgttattattgaagtctcccccttttgttgacatgagaagtattatcgtctactgcaagtttcaggtatgttttttttttttaaaaaaaatcctaaagatgttccaaagaccacgcatctgtctatataccctaaatgtgtatgcactatatgaagatttgacccctttttaattattgcgaacaggcagaaactgacttcgtctctaagtacttgtgtgataacaacattactgccaaggttgacattaatctttagcttgatattaatttgctgcgccaactttaattacatattctattgttttatagagctaccatagtggacttctgattaagaacaggagccgtgtacaggagctattttgctctaacaaaataagagtggtatgtggtttcttctttagttctttggcatgaccttttctcgtcaaatgcattatgtaagacgtggtgtctaacatttgttttctccatccttgagcaaaggttgttgcaactgtggcatttggcatgggtcttgataagagtgatgtcgaaggggtatggatatacatacattatgatgctcaaactgtatgatagaattgcatttgctccttgtttttaagtgaacttcatttctacactatctcaaattttgtgtatctcataacgttaagcataactaaattatgttaatggtctgactcgagcattccacccttaaaggtgattcactatagcttgccagaaagcttagaagaatacatccaggaaactgggcgtgctggaagggatggacggttatcacactgtcatctacttcttgactcagcaacattctataagatccgtagtctttcacacaggtgaatctttttttcctaatcaacatgctctgcctgccacagttttcctataatttcaccgagcaaccttttcttggcagtgatggtgttgatggatatgcaatgagcaaatttctttaccagatattttcctctgagaacacaactgggtgcatttgttcattggctaaagagttgacctcacgcaagtttgatataaaagaagaggtttgcaccttcggaccttcctcttcaggccagcatgcacctagtttcttatgtcatgcactcatcctactacctacataggcctagtttgctcgcactatgttatactgaacgggtcaaatggatatcaatttttggggcacgtgtgtttgatggctatttgctgtgctctgtaagaatttgcaatgtcactaaattttatttcttagcttaaatgatgtcttagtggatgagctgtctagcattcaattgttcagaacatcatagagaaaattatcggtatgatgccccaagaagattccagtgtttagtttacggaagttgtttccacattctattaatctcttaatgttactcttccagtcaaaaccacattgccattccatgcaattggaatcagctataatgcatttaggttccaggaatactacaaggaatagcatttatagactttttctctgaagccgttagacagtttcttcccctaatattttacatggaatccacctttcccaccaatatcttcatgcacttctttataatactcttatcctaaagccttttagttcctgaatgaccgaaaatattaaatggtccagcaaatttttagattcaatgatcttatcttcttatttttctaacaatgcaggtgcttttgacaattctcacacagctggaaattggtgatcaacaatacatccgtttacttcctcagttcagtgttacctgcacactgtattttcacaaggtatgccacaggcttctccagtgatctggaccttttttgatttgcgtgtcaagatgctcagttgacgatcttcttgtctgtcatgtaacaatgagtgatcttaattgttcaccgcctagacacttaattaacatggcttgcctttacttaaaaaaaattcatggatttaccatgttcattgttattttgtcaagcaatattcatttttctttcatatcttgatcattggattaaattgatgcagacatcaccacaactgcttgctgacaaggatatactaattagatcggttttgaataggtaacacactatcaacttttgttccaaaattttttctgaatgtgctacacatttctaagatgtcgattctgaattcgtggagaaagcagatcagagatgaaggatggacattatgtctttgacataccaagaatagctaatgatctgaagatcactatgaatgaagtatttgatcacctacataaactaaaggtttgcccttctcttctaaattagctagaatgttaaacatatttgtttgggctgcatcatctgttgcaacttttttgaaagaaaggataggagctctgcctagtgtatgaactgagtagaaactcattcttgctagttgcttggagtcatgctattttaacctttagtttagcctatcattatctacttatttacttcatgttgcttacatatgttctggcaaactctaccattatcggtcttgcgctaatggttatcttagaatggttattgctgttattatccagattccagaagatatgatcacgtagtataggcttatagtctggttgtggtgactgttgaaccactgcccgtttttcttttctatgatcatctatattccttttaaaagactctagtgatgccaccaccgctgatgtatggggctatcaggctatgagaccagtatacacatgattgctatgctcactgtatatttgttgtttctaatggtttgcttctttttcaccttgattaaagtgaaaaactcacaaacatgttagttttatttgtagttttaaattggtcacactgcacgatttattattaatacgtgttttattgtcacgtgaaaatgcatttaagggtttatgtctcactttggaaaactacaatcctataagcatgtcccttttctttttgtttcataaagatgaagcattttgtttcaaccaaacagaaacaatttttttttcagaaaatggactcaatttttttatttctataatccgctgcaacgcacaggtatttagcaagtattgcaaatatgtatatgttgaagccttaaactttctttgttcctctgttatttagttttcaggagaaatatcatttgaattgaaagatcctgcttactgttatgtgatcttgtggaggccagatgacttcaatgctctttcagcaaatctcacaaaatggctttctgaagtagaaagctcaaaggtgcttcttaaattgcctctcttgaatattcattttgcttcatattgtaaattgccaatctttactacataagttctgttttcttttgtaaggatttaagttgtggtactaatacaagtttggtcttatgactactaaaaaagggtcttatttattttgagcaagaaagcggattcaatgaaattagagtaaaaatagaagttagatatactgattcatggaatctgctgttcaaacagatcagtaagttagatgctatgtttgctcttgcaaactttgctgtcaaagggtgtaaaaggacgggaggatgctctggttcccagcacactccgtgcattcagaagaagattatggagtacttcagcaaggacgatggcacctcagagaatgattgccgcactcagctgcagaagagcaggtttctgtactctttttctagatcgaacttaacagagcattacttgccatttgtttcttgtgatgttccaatctaaaatttatccgactgaagcatttcatcttactttttttgcagcccattcttgcaagccgatataaaggtaagcactgatgatgtgatacatttcccttgtgattctgtataatgcaataattccaattgtatctccaccatacttctaggtgttcattcaaagcaactcattcgcaaagttcaccccgagggctgttgcgaggattatgcacggcatctcgagccctgcttttccatctgtcacttggtccaaaaatcacttctggtctgcctctctggctgccttttctcattattttcctctgtcacctatttacctgaacctgaatctttgctgacaggggacgttatgtggaggttgattttccactggtcatggaagcagccaaagctgaactggttaaacttgtcggaaaaggggaacagtgctagcagttggcgatcaagaacagttcttgcccccagctacctgtacatacatactcgtatgcttgcaagccaccgcggccacccaatcagataggcatctaaaggaggtctgcgcccactggccactgccctgattgtttcctttacttaaaactactctgattgtcttgtcgtacgcttgacactgactgcaatttgtccttcaccttgtatatatataggcacgtaaagaaggcgttgcagtgagcatcctcctgcagaggaaacttctgctaggtatgcgtgtgtctaccccaggaacgctttcccgtcgagctggctaagaggcttttctgccatatgattgaggggtgccagctcagtaattctgcttgggtgaagagaatgatgccgctcgcacgactggagtatatcggaagcaagagtcagaagcagaacccattcttcttgtacagacaacactgctccatatctaattatcgttctccttttcctttccaaatgagaatcaactcttcgacgggcgggtaaagtgtgaagtgtcacagtaaagcaccggaaacctggttgccactgcagtatctcctctcttcaccatgggccatccttgcgtagacccaattctgttacgtttccactgcaaaaaatctccccaagtcccaggtggccaggtacatatctatttccccgccctcctattctcatttgcttactcccttcgacccaaagttaacatgacacatgatgtatggtgtgatatattttaatactacgaatacgaatttaaatattatgtgttatatcttgtactagattaatttatttcggatcgaaagggtattataccctgaggtggatgcgtgctagtgtaccgtagcatttgccatggggcgccccatgtgctttccttctgtctcttggcccattcttgcgcggcttcacttcacgtggagcgagagcgagccattcttcacggggcatgcggcttcacgaaaccagattcatttgacgtgcgtgcggtgattgctcgtcgcttcgctggatctgagtgacaaagggtcctgcacttgattgcgtattttcaatcagtatagctggtgtatgtacgcctgtacgggggcggctgtagccggggacaccgtgtctaacctaatctatgtgcgacgaaggagaaccgtgggctgctcaagacgatgtttgtgaggttgcatcaaaagatgttacccgcacggttgccgcagtttaccaggctgacacgacacggcaaatgtatttttagcgttaagccatgtgttagcaggtttaatgttgggattaaaaccgctgaaaacgaaggtggttgttgccttcagaattagattagaaagatgctccacatcaatttactaaagtacagcgacgtgtaaggggagcgaagaggcatattcggcggctccaacctggcgacccgaagcatattcagcctcctgcccaacaaggcatttagcaccgaagtcctacgtgccaacgtgcagggaagttcctcgtgctgtgcacagtgcacattgtttctttgccgttgaagattatacagtacattctttttgcaacacgtacatattatgctatgtagcccctttggaacacataacttcattaagaaaaagaaataattatctttcagggtacaatacactaccatatttaagataactcgagattttaagaatcaattatctttcagtgtacaatacactaccatgtttaagataagttctacttgagttatgtaatgaatcacaatgccttcatttaaaaaagaaacaattatctttcagtgtacaataccatatttaagattactcgagattttaagaaacaatcgataggctgagtagtcaactggcgataatatgaaaaaaactaggtcttctagcttcgggtttattttttctaaattttataattatttttagctataaatttaaataaaagtgagggattatatctataatctttagaggaactaaagattactcaatagaagaaatcgtatttaccataagctcttaaattagaagcattattgtttagagtactcagaggtgcatgggtcttaaaataacagctgcgcctacaatttaatacacaacactacataccttcgttacagagaatattcgctcctaaattatgaaaacttggaggcgagaaaagaagaagagaaaaaagaaaacgagcaagcaaagaagaacctaggaaaagagctcgcaaacaaagaccgaaccgttccaaaaaggaaaaaaaaatcaataaaccccagaagaagcctctcctcctctcgactcctctcctcgccgctctcgttgcttcctcgcggggagttggaaccccctcccctctccctctccctctcgctgactcgctcttcgaggagaaggcgaaggctcccgcgccgcggagtcggagatggccgccgccgccgccgtggtgaactacccgctcgtcgcggcgctcgtggcgttcgcgctcgcgcagtcctccaaattcttcaccacctggtgagtcgagttgccctacctctccctctgcgcccccgctcggcggccgctcccctccacgcgctgcgtttgtgggtgacggtttggctccatgacagtggccgttctcgatcgctggagacgtgtggttcggtgtttttgcattgcgtaatcggtgggaatcgtgggggcgaggtctcgttggcttcgatgttgcgtttcgtggtttgcgcgttggtagaaacaaggagctgacttggagaattgagatttgaggcctacgaggagctgaggcgtcctagatttgttttttttttttggttcgctggcatggtttggattgtagctagcccgtagatcctcacggaggttagagagatccttttcctatttctgtattttgcttggctttgacagtgtgatctgcagcaactgcttctgtagggggtagaactgcttttcttgggatacttttgtctagaagagacaaacaggatttctaaatccagcgtgatgtgagagttggacggctactgtagtgcgcttgcacgatttcgtttacatttttggtacgttttgtcgtgaactactggttgagagcattacttgagaggcactaataacagggtgttttgctacttagtgccttattactatagcctgagggcattttagtgccctgtgaaatttttactgggcaatttgatatatttttctgactcacgttggttctactttatagtacttttaggcaagagttgtgcagattgcttgcaaataatgagtgtagtaaaattattaattaaagtaagcttggtcttccttgatatttctggaagatttaagacaatagttggtatctgttatgggcgtatcagacatgaaatagtcgtaattgttgtatttaagtatcaagtgtctcacatttttgtgttgcacagtataatatgctttgttgtgcaggttatttttgaaatcactaggacaatagttggtatctgtattctgttatgggtttatcagacataaaataggcactattgtagtatttaagtatcaagtgtgtcacatttttgtgctgcacagtacaatatgctttgttgtacaggttattttttaaatcaccaaaaatcactaggtgatttcaaaaataaatacacattgaattggcatcaggacaggatcttttgttttcaaactggaaaacatctatctttctaatttcattaagtaaggaaaggaaaaaaatgttatacaaaattagtagataaaggactagaccaggaacagtatatacaaggactacatatggccctcgtgaaagcttgccagctagaaatttagataatacttcatgtatagtctgtcaggaattcgatcactcctgttgtcttgttctgatctaatgtgtatgaggtgttttgccttttctctaattgtattgctatcttcaatctgaatgtgaaaggggggcgatgaaaatcttgaacaccagtaatctatatatatgaataacaaattttcccaaaaaaaaaaacaatatactttctgcaatttaacctgtcagaaaatcataggtggcgccggaaataattccctattgtgctaatgtttatcaattacctattgtactaatgttttattgttttattgaaaaccctaaataactattctatcattgattaactgatttgatgcaggtttaaagagaagcgttgggatgccaggcaacttatagcttctggggggatgccatcatcccactcagccacagtgacagcgcttgcagtggccataggaatccaagaaggctatcgtagcgccacctttgcaacttcagtaattattgcatgtgtggtgagtagatgttcttgattcttatttgtatctttaggtcttagctgcttctgtaacttctgttgcatgagtatgatactatagaggaaaatatgagagaattttgcattcatttcattggttccacacaaacagatgcccttctgcatatatgaaatactttgctcagtgttagttagataagacatttatgttttttttcccactaactagttctatcatctcatttttgccatttgatatggtctaagcctacatgtaaatgagtgagtttagtgtcatggatggaattacaaatgaaaaattaaatctcatatacaacactgatctatatttgtgtttgctcttgtacaatgcaaagcttctgtttcaagtgcatcttcatgacaatatccattgcctctgcctcgttgaacagtactacctagttgggaaatacaactatcttgtttgatctaaatgcttatgtctatattatttgattttctttttttctttaacttgtgtttgtaggtgatgcatgatgcttttggagttcgcttacatgctgggaagcaggcagaggtttgtctttctcatcctgaaaggtttcagccttctgtttgaacaggatataatagaatgaaagggttttccatggcagcttctgattgtatcttcatggactaataaacagaattcgattatctatagctggcatttaaatttttgacatgcagtgttgtttgttgggctaatatgtcagctttaatattcttgtccttcaacttctgtttcttgggctcataaaatttgatatccttattggttcaacacttttggcctgaattcatggacctatccacttttatgccagcaagaaaatttagataatggcaactgtatgtttaacttctgcttggcctgaactctttaccttttcacttttatgtggagaataaatttagacaatgccaactgtatgttgtagtttgaactttgaagtgacatttccttgtgagaaaacgttcttgttcttctggtcactccgccatcagttaatgttgaattgtagatttggatggtccagtaaatatgtgctatctgatatgctctattttattttaaatgactaaagtcagagcatactaatattgttgatgcaaatctttcaggtattgaatcaaattgtgtacgagctaccagaagagcatccattatcagagacaaagccattgcgtgaaattcttggacacacagttcctcaggttagcttagtttgcatgattctgtcgaattttagctatttctgtggccttgtaaatactgatattcaaagcagaaagaaccgtaggaagattctctaagcataaaggcagatactagatacaccttgtagcaccctaatataatgcaactgtcgaaagttcatgggtatgatacaaacacaatatcgttaacaaacacttaaaacttctctgaagaaataaacagtaggttaagtcataggacatcttacagatacattatctactctgttttttttttggggggggtggggggtgcgaatatgcagttctcattgtttcaagaagaggaggttttgcatgtgcctcagcatttttacactcttctactaccatgctcacatcggctattgggcatttcttatgcttgtcagaatcatcaccagatatacattatatgctcgtaatctaaatgtaatttcgttctcttttttatgtcaggttgtggccggttgcatcattggaatccttatagctgttgttatgcgcttagctctatggagttcttagacacgcattactcgtaggtatttgcttgatcacctcatatcgcatcgctgatgagttgtgaagcatgaaaactcaaatctcctcttggatgtgatttgtacaaatgctcagttttatgactatactataaggttcctaaccggtgtaggtctgcgttgtaggaggtagattgtagttcagttggtgctgtacatcgtagaaatttactgtgaattggaagctcatgtgatcaacctttgttatacaactggcaatgatcatgctgtcaacttttctttctggcacgcagtgatattttaagttctgcatcactgtccttagtttattattttactgtgctgtgcttgttagacctagaatgttactaccatacaaatgtcccaaaatttggtcctgggcagtactcagtagtgtgtgtgcctatgctgttttactgtcattcatagttcagactaatctgttttcctctgaatcctgaaatgcaagaactttttgttatttcctctcggtgaacctgatatatttgatatttcagaatttctagtgcaaacaaacaggaattgttctctgtttctctcttacacagatcacagatcaaacaaaaatattttcttaataagtatgagcaaagtactcggagaagttacacggagagaattattaccaccttgtatatatatgtaagtattctaagagtaaagtttgaagcctcgtccttattatatgtagctacaacgatgaggtatacatgtgctcaggctctcagagcttgcacggcgacgatgctccggggtggtgcaccacgatgaggttgtacgcgtcgagcgtgaggaagtcgtccagctccggcgcggtgcactgccggctgaagatcctgccggcctccgcgtaccggccgcgccggaacctctcggcgcccacctcggcctccaccctcgccatctccacctccacgacgcgcgccagcagctcgggcgtggcccggacctccacgccgccggcgtccagcaccgcgccgtgccggagccactgccagttctgcacccggctgatctccgcggtggcggcgtcctccatcaggttgtacagcggcacggagcccgacccggatagccacgccgcgacgtactgcacgccgacgcgcgtgttgtggcgcaggccctccaccgtgcgcgccccgcgcggcggctggagcaggtcctcctccgtgacggcgacgccggcacgggcggcgtcgccagccgccgcgtcgatctggttcggcctccctccgaggtgtccctcgaacacctcccggatcgccgggatgagccccgggtgcgccgcccacgtcccgtcgtgcccggcgcgcacctcccgcagcttgtccttgcgcaccagctccagcgccgcctcgttcgccgccgcgtcgtccttgatcgggatctgcgccgcctgcaccacatcagcaaccgtttggttaatcaactagctcgaggagctctccaacgggcgagtggatcgatcttttttcgatgactgaccatgccgcccatggcgtggacgccgcggcggtggcaggtctggatgaggaggtgggagtaggagcgcatgaagtgctgggccatgccgacgagggcgcggtcggggaggaggcggtcggggcgggcgcggnnnnnnnnnnnnnnnnnnnnnnnnnnnnnnnnnnnnnnnnnnnnnnnnnnnnnnnnnnnnnnnnnnnnnnnnnnnnnnnnnnnnnnnnnnnnnnnnnnnnnnnnnnnnnnnnnnnnnnnnnnnnnnnnnnnnnnnnctccccctccctatccccgcctccttctccgccctctcgaacacccccttccatatcctcgcctccctgcattaaaaaaaaaagttacatacatcgatcagttcaacccaaaaacgtatgttggtgataaaaatcaggtaattcactccatattctaagcactctccctcacgcaaggttccttaagtatcaaacgtggaatgaaagcggggctatttttttttattaattgcgtaccagccagaatttgaacttagatatgcccatgtcttgatcatcacaagctttgtgccagtgcgccatggatggatgtgtttgtgcgtgcttacctagagtgctccatcttggggaggtagaagaaggggccgaagtcggcgccctggccggagcggaaggcggcgtggctgtggaagaagtagaggccgaagtcgacgaggcagccgatggccggctcgccgtcgacgaggacgtgcgcctcggggaggtgccagccgcgcggcctcacgaagagcgtcgcggggcggtcgccgagcctgtactcccgccctcgcgccgcgtcgcggtaggtgatcgtgccggcaaccgcgtcgcgcaggttcacctgcccgcgcatcaggttctcccacgtcggcgacagcgcgtcctcgaagtcagccttgcacccacaataaccacgacgtcacgctcacgccacgtcaagatcctcaccgatggcgcgccggagttgtgtgctgcttaccatgaagaccttggcgccggagtggaaggcgttgatgaccatcttgcgcggctcggcggggccggtgatctcgacggtgcggtcggcgatggccggcggcacgggggcgcacgcccagccgcctgcctcgcggacgggcctcgtggccgggtcgaaccgggggagctcgccggcgtcgtaccgccgctgcgcctcccgcctgcgctccatggcgtaccggacggcgccgcggaactcgcgctgcaggccggccacgaaggccagcgagtcgcgggtgaggatggccgcgaactccgggtcgtaccggccgaggatgtccacgccctccggcgtgtcgtagcacgggcacggcggcgctgcggcgttggtggccatggagtcagtcgagtggaattcgttcgagcaccgatcccaagtgtgagtagaaaatgggagtgtgcagagagcgtgcttccttccgttgtataactccaaatatatacgcgagaggtagtgtaaaatttgaagactatcgtctttgatgatgtggcaaggatgaaattttgtcatttttctccaaagagatcaagattgcactagtttgtaatgctgaagcggactctggaaattatcatgatgctaggttttgcagagccactacaatttgaaaaataagtgtcatatgcacaacaacaaacatagcaaccataatccatgcataaactgccttatatagcaatgcagtctaattgtaaaaagaaggaaccacagttcaaagtacttaatttgtaggtgtggccgaccgttgattgctggggattttgttttacttaccagttaccaacctacatagatgtcaaaagctcctggcttattttcagagagtaaccatacacagttcgtttcttttgtgagagaggaatttatggatggactaatgaagaggtgctccaggtttctaatacaaagttaagtaattaagccctttcagaaaatctgagtactgaagcctcaccaaaatgactaattaaggccaagtttcgttgtctatgcgcaaagcagctagctggtgttgtacaagccaattcaagctgaattaatcgcgcatacatccaaattcatcacccaattaagttctgtagtttgcagtttctgagctaacataaccgtgtttgttcactggcgatggtcgtgttaagcgcgggaagctcactgtgtcccatcagctaaaactgtatatatgttattccaaataaattgcattagcttgtctaacaaatgacactcaactcacgccactaacctttgctgctttgcccggcgtgtgtttatataaggcgttggatgagatggatgacgatgcggcatgcatcagcgtgcatatggagacggatcagtagacgtggtggttacgataaggcagacggggagcaagtgcggtgcgcatcaatcagctcgatcgcgtgcgtgcatgggcacttacgtacagcacaggccagcagcaggaggaggtaataagcgtggcttgtttcgttggcgcaccgagagaggcgagtggctccaaaccgcagcctttggctgcttgtgcggtttctctccttatccgcatgaactgcccaatttggcccatttggggaagggagagccgtgccgtcacgcccccaacctccattcgccgccgccggcagccgactatacggccagcctagatgaaaaatctcttcgggcctttccgaacaaattaacctcacggcagcggatcgctgcgggttgcgcaggtacactgggctctcgcgttttgcacgcaacgcaggcgttggacgggttcgatcggccggcggcgaaacgtggcggttggagaacaggagaagcagaaattaagcgtctttcacgatggcgttcttgtgaggtttttcttgtttcgttcctcttatcgtcaggtgagcgccgaggaggcaggtggtgtggccggctgcaaaagaagcggattccgcgcgtgctggcacgggtctcgtgcggcacggccgcacggtgattcgtggcgccgtgtgtgcccgtgaggttcgattctatatcggggggcgaattagactgtcgtaggagcaagagcaagtttgatagtatagtcaactattaactccaaatcatctataatcaatttaatagctaattcatacaatagttatatactacactattaatatctagtctcacatatcatacacactatgtcttgaagtccatgttatagccggttataaatctgtagtccactgctcttctcttatttttttatctttttaaaatatgtttatagttggtttatagcttgctactgtacctgctctaagagcaaggataataataaaaccaattgcttacttatagcctatctatcagctcactcatacagtgcttaactcttcactataaatatatggtccacctatctgtctcacagatatttttatttatatacctaagccgactgtaaacttacagcccgcttctcatctctctcctttcctgtctcattcatctcagctgtctgttatacttgctctaacgtgagtgcgtgacggcggtgttgatgggcgatagaggcgtggcccgcactgtggttggccattcggcctactcagcctcggccttggcggcctggcttgaccaggagccgcagcccgcagccctcgcggggctctcggccggttcgccagaaggctgggcgggtacgctatgccgatgggctgtttttcacttgtttcgccgggcctttccggggacaatgtccgcatgtgtgcgtcgtgccctttctcagccagaggctaatatacttttcctccgcagccactctcaaacatgttaaaaagtagtactgtgtcattttattatgccccattaatacggctccagatttcagatttagagtttgtatgttaaaatgtatgttaatatgcccgtgctaacactacgatgacgatatatgataatacagatcatacaatttaaaatgcatcacacgtgttctttaatcttcatacaaaatttaaagaatggcataaaataaataccgtttcttgttttccttcacaatactgaagttttaatcctaaaaagtatgataatttacagagaaatttgagcactcgatacaaaactcactttatgagcttctctcatcctaggtggcttgttgccatgtggtaaagaaaaatcctgcctagcttcaaaatagaattgctccacctcctacttccctgatttgctcatgtagtgaagcaaatgacatgcgatttaacgggaaaaaaacactaatattttaacactgcttgtgacatagctagaatgagtatctctgaacaaatatattttttaaggaaattcgagttcaataattaggtatagctatcagtcaaagagcatcctcagtagctcaagcagtaactacttaatttactgattcagtttgaaggagccgaacaatctactacagactctggtgcattagggcctgtttggcgtagagctggagctcagccaaacagtttcagctccactaaaactgggagtggagttgggtggagctctctcacaaaatgaactggagttgtggagctggnnnnaggcngntncacaactccactccagacccaacttctgggttaaatttaggagttggagctataacaaacaggcccttaatcacgaaaaaatgtggatcagcaacaattatcgaagcaagaattactgaatcatgagtactaaataaaaatgataagcaccaaacctagatcggcatgagtaccaaatggaaattgataatcataagtactatcgcgacattgaaggtgaaatacagttccatgaccaaaatgaactattctagtctaatgatgtctcgccagagctcattctgtcaactattgccaaacaaataatgtgcatataaagtcacacaaataccaggttattgtgtatgctagactaatgagaagtaatttaaatgagaggcaccttagcacttagcagctagacatttatttctccatatatatttctacaatcatatattgacatataccacttgtataggaagcagaaaagactaacaaatttgtacctgcgttcacatgatacaatcattctctgtgataccaagaactacactgataacaaatttggttcttacatcatttggctttttctaattgtagaagccattaactcagaaggttcaacctccatttttctattcttcatcgcattagcaatcttaaaaatcatgaaatatgcatgtacacccgttggttactttcaaataccaggattcaaagtcatggcaggatttacatccatatctatactacaaatgcatcaagatacatggtgtaaaggtcatagaaataagtgattgtcctgccaaaaaaggtgtatttggttgagattggctttgttagaaatgaaaagacaaataagataggcaagatgatcttaattttagctgctagaattaaggccatgtaataacaaataggagaatttcaaaaaattaaatgattttcctattcaatctaatagtgttttgactttgtgattccttcatatggaagggcagccaatttgtaacaaaggcggaaactgggactatcagatcgtaaaaaatttctaaacaaatgcataatctcggaagtgaagcctaacctattttccttaacagctgaacacatttagaacaaagtcagaagctgagacacctgaacaggacaatttgttaagctatttctaaaatctagatctcatgttagtccatctaaatgttgtgcctatttacattctgagctttaaacttattatacatattttgaaatatataccatatgctgaatctgaataacacaatttgctttctataggtattcataaaaaaaatgcagcaatcctgtataacgtattaacgtatacccaaacaagatgatcttggttatatctactggaaattatgcttggaattgattcagtaaaatgaacttggccaacaagcagaaaaacaacagccgtgcagcagtcttagatctatgtacaccgaataccttgttttatctcaaagggaatatccgcgacagacgttaatatgttcatggcaaatcacaatcgaaaataattaagtgatgacatatgcatttcagcatatggcatcactttattattatgcatttcacactaaaaattatcaaaaatccagtgttaattaagtgatgccaacaacaaagaagattgaaataaaagtgcttgtgatagcacctcgcaacataataatcacgtagagtggatagcaagcacaaaaacaaaatagtgcagaggagcacaaaaaggagcaagaaatagtgcagaagaggataactggcattaccttaaatgcagaggatgttgagcagtagtgacctggagcagatatgctacaagaaaatgtaagctgttaaaacaataatattcagttagaaaccaaactatttgtttccattgaagattgtttaacagagtaaaaaaaaatccatgtgagagactacactaaaccgaccactgcagccggcagctgtataccgagccaaccaaatgaaatcaaatcagaaccttggagctgcattagtttgactacaaataagcgtgagaccctggggtgcagcggcgattgaacctgagatctacttctctctttttttctgcaatgtgcccctgtgccggcatgaagtatgaacacatgtgccgtcgttcacctatacagctccagcaatcatgtgccatcgtttttattgatggaagagtagaaaaaaaatctaataccatgggagattgatttattgcaaggagcagggtaatctgtgaccagctgaatttccagccactataggagcatctccaaacctccaattctgatattttggctatgattataggtctcgagcaagcaaactgatgttgcaatgattttagcttcaataggaaaaaaatgggtacaaatcagctgcatgctaaagatgccatcaataacaaagtaacttaacgggatttacaaaatgatcagagagccatgatctgactctatccctcccaaggttgcgctcctacagaacaaaaacgagacaataagcaagtttcaccagcaaaatgcgtgaaacaaatagtaactcattgcacagatttcagttggcaactaaacatcgaagtttgtgggataaaattttggggagaacttactgctagcatatgggaatttgcctgcgcaatctgccagttagcgagccgcagcttctggcccatttccgctcaactctatgattttgctgcatgcaccaaaacaaagcaaaaatagagtcaaaccaagagcacatagcatcaaaatccccagccactcaaagcctcaacagaagggatgaactgatgcaaggaatcatgtggtttcagggacgtactccctctcctcaaggagccccagaggttccgagttctcctggaattgacacaaaatttagaaaaaaatatcaccgttaaattagtagcaatctcatgaggagatcgagattaacagagagagatgggatcttgccttaccagctgcacaattccctccttgcccgcatccgctgcacacaccggtccgtcatggtccatgggtgtacctcctcattacagccccgcccttggatatcgagctcacgccattcgcggccatcctccccggtgcagcagcggcggccgcctccgcctccaccgctggcagtgccaggatggcgatctggtgggggagcaaagacgacagcctccatggtggctcgtctcaatggaggaggtgcagtggcatccataacgcgaggcggagatcggggatccgcagtgccggggcggggtagggtttggggatttggagtggcggcacgacggcagcggcggggtaggatttagggattgggtgtggcggcgattggcgagtggcaagaatcgcggaggcgatgggtgaagggaacgggcgaaaatagcggtgcgagagagaagggggcgcgtgagaacgggagttacgctgtcacaccattaagatctttcccaaacctaaattgaatttataatccatcagagaaaatatcggtgtaagagcaaaataaaaccctaataaattaatgtaaataataatcggatttgttatgtggaatttttattgagttctacatgtagaaattcgctaacaagatttttagtggaattctcagagctctagaaataattttaaccaattaaaattgagcacaagcaatatttaatcctagaaaaatccatttccttctttttcccttttttttcttttctctttttctttcaattgggccgccggcccattctctcttccccccccccctctttccgctgggccggccgacaggccgaggcccagccgagccggccgcctcccttctctcccccggggtcaccgacaggtggggcccacctgtcgggcctgtccccttcctccagccggcgccgccgcgctccgcaaccgccgccgcgcccacgttcccgcctcctccgggccacgtcggccacgcccgcgcatgcgccgcgtctcccgcacccactccccctccctctcgcccgcgcccgcgctcgagacggccgggattcgaaattcgaatcccgcctctctctcctcctccacctccccacatcggccggcgattcccgcctttaccggccacgtccgggctccccctcctctatttaagcaccaccgccaccccctctctctttttccccatctcgccgagccctcccgagccctctaacgccctagagccgtcgccctccccttcgccgccgctagccgccgagccgacgacgccgtcgcgttcgccatcgtgcgggccaccgcgtccacccctcttccgttggccgccggaacccactccgcgccgttcgccggtgagcaccgccatggccgccgccttcggccggcgtcctcgccctcttccaattccctctccctctctaaccccttccaccgtgttcgctaggtggttccagagatcgtcccgctgtcgccgccgccctccgtcgctagccgtcgtcggtcgtcgtcggtgaggtccctcctccccttcctctctctctcccgcgccgccgcttagccgcttcgccgcccgcgtcgccgcgacgccgtcgccctccgccgccggccggtcgccgtctcgcgccgccgcgcgccatggccgccgggccggcttgagccgtgcccgcgcacgccggccgcgagccacacccgccgtccgatctacccaggtagatcggggccgtccgttcggccgcccacgtggctgccgcgtggccgctgcgtcggcgccacgtcagcgccacgtggtgcgccgtcctttcccggtccgtggactcggtccaccgcggaccgccctcctcgagtcactgccatgtggggcccgcatgtcggcgccgccccatctctctcccgggatttatttattgcgcaataattcaattaaggatttttctgtttatagtaaaaacacagtgaatcttctaaaattcatatctaattcacccgagctccatttaagcccattcaagtatcagtaaatcaagaaaaatgtgtagaatccattgaaaatggttttgttctctgtttcagtagtattatagcctatttgtattgtttgctttgtatgtcgcttagattttggctctcccgacgctccggtgtaccttaaaatagtcgccgaagttcctccagctgcagagcaaggcaagtcatgcttgccacttgaacatgttgatcctatattgcaaatgctccattgtttttcttcaaatactgcattgttttataatatcaccatgggatgtttacctactgtcatagccatactatcttgtaccatgttcctttgttagcttgggatataacatgactagagattggactagggaatgcttagctttgcttagttcaactagcacacaatggggaactacattaaatgcatagatatcagattctaggattgatgttggttaatgctcaccactccggtgttggttaattaattaatattaaatggtgggccgtgggtgcatggttttgatggtcgcgcacagggcaattaaggaccggttcgcgggaaaccctggaagaattcctcgtacttaccacaagccagcgtgggcaacggctgggcttgtagtgtagctttcctctagccgacgcatccaggcaagggtgggcgtgatggagtttggatgggccctgcgacggcctatgcggcttccggattcacctaggcatgagaggggactgcccgctgccttgcgaggagtgggggtgaaacctgaggtgtggtgtacttggttagagggggttatgcgaagggtcctgtcacggcctctttccggtatgtcgtggtggcatgtcggcgcgcggaaacgtgtcgtggggctgtgtcttgtgggtatagttgtacacctctgatcagagtaaaactattcgaatagccgtgcccgcggttatgggcggtcaaccaaattcaccgtgattagactcaccctagactagtctaatggaattgaatagtataggtggatggttgggcctgttgcaacggggtatagcgttggacagtggatgattaatattgattaattattacaactgttttactgctttcaacttctgtttataaatgcccgctttatgcaaatgaaccattatagctatcccttgataattccctgcatcatacccctattccggtatgacttgctgagtacagtgggtagtactcagtcttgctctattttccccaaaccccagaatttgagtatgcgtcagatggtggtttctctgaggagtaggcttcgtccgtgccgtcgaggatgcctgtggagtggtgttcccgctgcagtccaagtcaaggcttagctccagttatcctttaagttttccgctgcatttatgtaagacttttataatatttgtaagacgtggatctgtatgtcaactttgtcgtttgtgtaccccggccggtcctggacggggactttaatgcacattctgcttggaattctattcgggaatttctgggcgtgacaagcgcggagggaagggggtctcatctggcacgttcgattagagttagatgaatatgagccattggatttgatgaatgagtaatgtaggtgtaagagtgagttagtgaattatagggtagaagatagatgggaacttattaattcatccaattgttgtaacataatcgcaaatcaaaatctatatatttatggagctagaaaacctatctccatgcaatctttagtccaaaaatgtgctaaacaggatccaaatatatggcatagttgccttctttttatcagacttagataaacaatatctatttaattacaaagtaaagtgaaaggagtatctctaagttgtcatcgaaccttatttgcacaaatattactagagaatataaatagtcaaacaaaatttaaaattcaacttcgttatatgtttagaaatagtaatagcatattagaaataaggatttgtagaatatttaaagattgatacgcttatatttttatcgtatccttcattacatctttatccttaagaagcatcagaacgtcacaattttataaccagtgatatagtgtcgggatacaaaaggaaggtgagaggctaagaataaaacgagaagctcatctacatcaattgtatgaagtagtatgagatagaggagtggcaacaaggacgatattgtgcatcttacgcaagatttaaagtgcaacccgaaagaaaatcgaggttagtgaatggacctactagcgatggtgatgatctattgatggtgttgtttggggtttgttggtggctatattttagggcatattacacgcttgcttgaaagtgaagaagcatggccagcttcacatattgaccgcacatacaagtctaaggcaaaagacaactatattccgcgctctaccttgtttttctagggctcaaaccgtaaacacaagttgctatgggtttagggaaaccactccagttttcatcctaatcgacatctttaacacaaatgagaacttgatcgattcctcgtattgttcaactcacaatcatacaacatgagagagtgtgaaagtcatttggaatagatatatgggatgttgagaaagacagtataaaaatgatgtaataggtataatcatcatttttatcatgatttgccgacattctaagataccaaacaatcagcctcatcggatgagcatatgaaaaaaaaaaacgccaactgacgtattagccaaaaaaaatatataatttgtgattagaacttttacaatttcgtggcagggggaggatggtaaggccccgtttagttccccaaaattttttccccaaaaacatcacatcgaatctttagatgcatgcatgaatcattaaatatatataaatgaaaaaactaattgcacagttagggagaaaatcgcgagatgaatcttttgagcctatttagtccatgattagctataagtgctacagtaacccacatgtgctagtaacggattaattaggctcaaaagattcgtctcgcggtttccaggcgagttatgaaattattttttttattcgtgtccgaaaagcccttccgatatccggtcaaacatccgatgtgacatccaaaatttttttttcacgataaatgaaaaaaaaaaaggccatactgcccggctccaattatccatgaccgtctcgttctcctttcctcactccgatgcacctgccctcgccgactcgccgttaaatgccaccgacacactccactcctcgctgccgccgccgccgcatctgaccacccggcgatggcgagaccggcggcgacggcggcggcgccgaaggcgccccctccgaagcacctgattgcgctcgccgtcgtcgccatcctcggcctcgtccttgtcgccgacttcctctgggcctcctcctcccccgccgcccccgcctggtcctccaggatcgatctccccggccgcccggccgccctcgtgccaccctcggggaagaaggtgatgctcctagttcccatctcgcagcgcgcacacacactcttcgattgctgcctccggtgccttctagtgttctgtgtggtagtacggagtcgcgcgcgattagtgagatctggttggaattaggtatgcctctgtggtttggttggactagtagaacacatctgggttgattggtatcttcccctcgacaccaaatgccttgctctctagttgcacttatgagctatagtttaggcatcacctttgatagtactagcaggttgattgcttcctgaagggtcttgatgtgccggttgtgaaatttgcaacagtatttttgcttcttaggagaggaagaaattaatcatgcattcatgcctgcaacttctggttgagatttcagagtgaagagctgtttgcgaacagtaatctttaggagaacccgcaaaatctatactcatgctaatgtttatgaactgtaatctctgtgtttttgaattaacataggcatggaagcagcaaacacatgctaaatcatgtccgtttcaccatttgtttgagctagaagcagcaaaaagccatctgattttcattccgatcccatgccggattaaattaagactacttattttgctgtaactgccagtttttgtttatctaggcatatacagtcctaccatctaatctaatatcttggtcctacacatcagagtaaacacttaattatgtttgatatcttatttctgtgtatactgcatgaatttggcaagtgttgtaaaaaatgtaaaaactcatgtatctcacttcgatatttcttccccttcccattagttttattatataatgacttatgctatgaggactgttggcgtgatctataattttgtatggcattttcaagttgacttgttttttaagtagtcgtttttttttaattttcttgtgcagcaaacaaaggaaaaaatatctataggttccacggacataaatgcaacctttgcagatttgccagcaccagaactacaatgggaggagatggctgaagcacctgtgccacgtttggatggtgctgctatgcaaattaagaatctcttatatgtgtttgctggatatggtaccattaaccatgtgaggaagcttccctgttatctctcgcatccagtcatactttgtgctctttttcttgtatttataaaatctcttgctgaagaacaacatatagcatgcaacatatttaattggtgagttggggttacagcaacacattatacttgttccctttcagcaatcaatgacctagatgtgtaattggacttatcgttttggatcactcaagttggctacctgcaccattgtttttaatgaaatataaattcacataatattgtcaagttgtatagatgacctgtgttccctagcttgtttaaacatgatcttccttactaaaacacaattgaagtacttgtgcttttggttagcgtgatcccattataatcatttttggctgaaagtttaatattaatggtgtgtgtatatatggcttagtattgccagattgtgaattaacccagtaattccttgccctgctgattttgttggtacttttaagtttaccataagttaattcaagatgccatcaagttatttaaccttttctaatgttttccatgtataggtgcattctcatgtggatatttacaatttctcagataatacatggggtgggaggtttgatatgccaaaggaaatggctcattcacatttggggatggttacagatggaagatatgtttatgtggtaacaggacagtatggtccgcaatgtagggggcccacagcacgaaattttgtgctggacactgaaacaaaagaatggcacgatttgcctccattgccagttcctaggtacaaacagtgttgtatttaggcattattgtacttgtatggtcatgcactcccgttaatcttaatactacttttgaagtttggatatttggtctgttgtatgctgtcaaggaaaaacaaatattgttttgagcccttatttgtttctttctttatcccaaatctattgttcagatatgctccagccacacaactttggagaggcaggcttcatgtgatgggtggcagcaaggaggataggcatgaacctgggcttgaacattggagcattgcagtaaaggatgggaaagccctggaaaacgagtggaggagtgaggtaccaatcccacgtggaggccctcataggtctataactccccctccacatgatttctattgttgccatttttgttggaaagtaatgttgctatacacctgaatggtcttgatgtttagcatctgttgtattcagatttttatgatgccgcccacaatatgtatgcttctaggctatttctttgatcaagtatctaaattaaaattagttctgggccagaaatatgtttgtacgccatacaaagttcttatgtggcatataagtatataacctgtttccgagaatggtcctgttgttagcttagcagcttaatcatgatttttctcttttgataccagggcttgtgttgttgctaatgataagctacttgttattggtggccaagaaggagattttatggcgaaacctggatcacctatatttaaatgtgttagaagaagtgaggtatgctgatctgtagctcaatcactatatatgctaatttctgcatattgtataggaatttgttttgtacattttgaagttcgacatggatcacttttgacaatgaatagtggaaagtctggttccactgaaggcacaaaatgtataatgtgttacccagtagatggtgatttaacttttgagctgtccgcttaacctgttttagcactttgtgaaattttacacctcctagagacctatgttcattgttttcttgtaataacttttagattttgttctatagtcattttgatcttctgcctatgcaggtggtctacagcaatgtctacatgcttgatgatggaatgaagtggaaagaatttccacctatgccaaagccagattcacatatagagtttgcttgggtgaatgttaacaattctctcattattgctggaggaaccacagaaaagcacccaataaccaaaaaaatggttttagttggtgaagtgtttcggttcaacttgaacacactggtacatgcctttccttgctccatattttagataaaacacttaaagtgataagaaatgatggatataacatgaaacatcacctatcaactgcctgttgtttgtttgtcgtgtggtggtttagatacttcttgttttgcatcattcttctgtttataagcacataaacccagtacaactcatcatcataaaatctatccacagaacaatatgaagccaagaaaaaatgtaaatcagtaaatggcaaacactacgaaaggaaactttggaaagtgcactgcatgtcagtaatttcctcagcttgtcaactttgtattgctactaaaactattttggcatacaggaatggactgtgattgggcggttacctttccgaatcaagaccactctggtaggatactgggatggctggctgtatttcacttctgggcaacgagacaaaggaccgaaagacccttctcctaagaaggttgtcggatgcatgtggagaactaagttgcacctgtgagatttttagaaggaaaactgatatgaccattgactaagcccattctttatgcattcttttgggtacataactgttccattcccctatggtgggcgagttgtttattatcatacgaattgttggctttgttgtgcattgtcacatcatgccactaatctgttgtatgcttacctttttggttatatcatagaatgaccgacttttacgcaattttgtacagagaatcagagataattgatcttctgttcagtgattggagtgtgacagatacatttgcacttgagttactctaggttagcaatactggtatccagtgggtaagcattcttactgttacttataaactgcttacatagttcaacataaataaccaccatcaggagactctgcagtaacttctcaactggatttgagcccatattcagtatcctaaaaacatcaacttggtatttgactcttgagttattctggcagttgacttcagctctatcaacttaacacctgtcacatgctctctgtggatgtaagtgcatgttctctgatacctggtactttatacccgtgttaagctttattaaagtacgctggatggttcgctcattatgatttatgacctaatgtttctgttagattccacgtcttggtgttctccaagacttggtttgtgccacagattgttttcaacttgttactgttgatgaccacaaaaccccattcccatgaatatttttgcacaggaccatggtcattggcaaagcaggccatatcgggaggaaagctattgctgatcgtgtagcgctttctggcttcctgccttttgccaatcttttcatctcttattaattcccctttgttttgatgtgcatcaacattttttaggctctcatcgaactgcactcctgctgcatccagcttttcctgatgtttcagcttttcacaaggccacacacaatggcgctattagcgtgtaaaacaaccatatatccctatactaagtagtgtctgtatagtgctttcgttatctatccaaaatgtagtctaaatcatgcaacgaagtgtcgttgttgggatcacaaatagtctattgtttatatagtcctttcatcatccagcctaatgtaagtcataatcattcaacaaagtgtcattgttgggctcactttttcttctctataaaaagccctaggcatacacaaagcttatatacagttaatcacagcatcacacacatcaattggcaatagtctcctccagaaaaaaaaatcaatgggtaatagtttcatggtaattactacttagtcccttgccgtgccatttggggtccccttctcttccggtctaatgaagctgcaattagcacatgtgggagactttgcactttgccggtcatctactggcgctgtaggccatccaaaagcaacatctcagtcggacggagaaaaaatccccatcaaatcgcagagatttcacgtgaccagtccattgcaggatggtgatatctctttcctcggccgcatgctcatgatagacgcatggcacatcgctggtgcctggatttctaaacctgattagatatttgaagtgaagaagcttctttaatctttagtttggccctcttcctcgcttataagctgtataagaattggtccttggactctgattagggggctaggggccaaaggtaggataccggccgtgttcttgttcagctgttctccttttctcggtagaatagtcgacatgtcttagacaatgaacaccctttagtaaataactgggtctttttgtttgagctgcggcttacaagctacaataaaatttgaattttccggtgtcaattagtctcaaatattgaaatatcaagactagaggtgtaaaagtctaaccataaaattattttctgtttagtcacgtgtctacggtttaaaagtaatactctgtgtccaaagatacacaagatttttactataccggtatccatatacatataagggattttagctatataccagcggagggagtaacagataaaaaaaaacattgcctcagcaaaagtctctagtagttaagctaaactgctagtaccatttttataccaaaggaagctaaactagaacggtagaacctataaaccactgctgctccaactttggtgaacacccacggagttgtgccaaaaaagttagtgggggcgaagggcccaatttggccattttcctagtctagttgcaaggcttggagagagtagtcaccgccttcaccagccgaaaaatcgtgtagtacaggagaggtcgccgcggacgacgcgtgcgtggacgggcgcagcagcgagtttgcatcggcggcatcgcacgcacccactctcccttggcccttggatacatggggcaatcgggcacgcagccacgcaccacgcgcattttgggattcgattgcaaaaaaaaaaaaggagtccaccgaaatggacgaatttcggaaaatttggatgaattttaatcaaatttaaaccaaatttgataaaaattggtaaaaatgaaccatatttaggtgaaatagaagtgaattgttgtcttggaccttaccgaaatgggtgaaattcaccgacattcggacctttcggaccgaatcccagaatcttgaattggtgaacgggacatcagccgctgtcgtctagcttggttttcccgttaccagctcgtcggcttgattcagctattgcgtttgcatcatctaaaacgaggcggtcgagaggatggggaatcgggatagtagcgtaggttggtggcttcaattttattttcctcctccgcgtgttgtgggtgactgggtgatgggctcggtagacttggcccgatacgatggcaagcacgtggctgggcgggggatcgaacggggcagatttttgggcgacatggccgcgcgggtgagtgagcagtaacagcgtgaggattataatattttatatgataagctattgcatttgcattattgcatagtatctggcttgcccacaaataaatcacgctgttaagaggggttagtcgctgtaaccaaaaacatggtttatactactctataggttggcaaagtttggtttgtgaaggttttttttttttttgcaagattttttaaggattttagctcggttgtgcaagggcgtggagctcagtggctgcatttacttaaacaaattatttacatcctcagtttactatgtaaaggatcacataaataagaaattaagtttttgaaaaataataaatgaaaccaattgagaataataatatatatggaccctcttcctcctatgtcgtctctttcgagaatgacggcaatcagaaattaattcaaacgaatatcagttggtgttatcgataaacgaatgtctctatggcaatctgcatttggatcgagggttatgcttaattggcacctgcaacgagcgtatttcaattattgctatctcacgtagagcacacaaccaatgattcctaagaattgaggtgacggtgcactcctatatgtccctcaaatatgggacaagaaaaaatcaagtagagaaaaattagtcctcaattgtactagtgatagagcaagttgaaaccgtgcagtatgccatgtggttagagctcacaaaacttaaaccgtggtaatccatagatgagcacacaaaatgaccatccaatccaatgagttgattcactctcacaacggcttctatttggatagcatatattttatagattttccacatgaaatagttccatttctctaaatttttcagaaaattcctcctatttaaataggctcttaagcttaggcttacgtgccacagctatagttataattttcaaacttaattttagaacatattttatttttacacacttggatttaaactgctaaaatagaagtgtaaaatctgtactgtaaaattatttttgttgcatcaatcatcttttttcctctcacaagacacaacccaaacaatatcttatgaaccatcacaaattcatgatgaagatatatcttacattaatgacatttataaacggctagagacagattttcacccagcccccgaactcaattcaatggcacaacaaccggactacaggagacgaatccacgacgatatgtaagctacgcaactcctaaaactctctttaaaagacggtagtcctacattgaaaacactccttaaactccttaacaccgtacaccacagttacaaaagcacacgtgtcgtggagcccgaaaatcgaccgagagggaaggaaccaggccaaaaaaaccgcaccactccgcgcgcactgtcactgacgaccacggggacagtagtcaccaccaccaccaccactgtggctcggtcacttcttcccaatctcattctcatctccctcttttttttccaccaaaaaccaacccctccccctccccgtcgcagcgcggcgcagcccaacccaaccccaccaaaacccgcaccaccccccatcatccgctccaaccccccgcagtttggtctccccacctggttaaancactcccccccacccccaccaccatgcctcccttgccgcctcccctcctcctcctccttgcggtcctccttgcaaccgcgccggcggcggcgcagtcggcgacgccccgggaggacgacgtgcggtgcctcaaggaggtgaaggccgagctccgggacccggacgggcgcctctcggcgtggagcttcggcaacacctcggcgggagccctgtcctgctgtcgggggtgtcgtgctggaacccgcaggagtcgcgcatcatcggcctctcgctctccgggttcggcctccagggcgggatcccctccgcgctgcagttttgcagcgccgccaccacgctcgacctctccaacaacgcgctggtgggggttatcccgcccgcgctctgcgactggatcccgttcgtcgtcaacctcgacctctccgggaaccagctctccggccagctccccagcgagctcgccaactgccgcttcctcaactcgctcaagctctccggcaactccttctccggccagatccccgactccctcggccgcctcgaccgcctcaagtcgctcgacctctccgacaacaggctcgacggccagatcccgccccagctcgccacgttcgggaaggactccttcgccggtaacaagggcctgtgcggccgccccgtgtcctcgcgatgcggccgcgcgctgagcggcgcgggcctcggcatcgtcatcgccgcgggggtgttcggagccgccgcgtcgctgctcctcgccttcttcttctggcgttgcaccgggaagagcaagggcggtcgccgccgccgccgcggagggagcgagtccggcggcggctccgcggaggacgggagctggtgggcggagcggctgcgggcggcgcacaaccggctggcgcccgtctcgctgttccagaagccgatcgtcaaggtcaagctcgccgacctgatggcggccacccaggacttcagcacgagccacatcgtggtggccgggagctcgcgggcggggacggcgtaccgagccgtgctgcgcgacggctccgctctgacggtgaagcggctccactcgtgcccgttgtcggagaaggcgttccgggcagagatgggacgggttgggcagctgcggcaccctaacatcgtgccgctgctggggttctgtgtcgttgaggatgagcggctgcttgtgtacaagcatatggagagtggagctctttcttcggtgatgaaggagccaggggaggcaccgctggattgggcgacacggcttcggattgctgtcggggcggcacgcggtcttgcttggctgcaccatgggttccaagttccgcaaattcaccagaatttgagctcaagtgcagtgcttctggatgaggactatgaagctcggttcacagatgttgggcttacaaggctggtccgaatggcaccaggcgagggtggagatacaagccccttcctgaatggggacttcggggagtatgggtatgtcgccccagagtgtgctagcaatccagttgctaccatgaagggtgatgtgtatgcatttggtgtgatactgctcgagctcgtgagtgggcaggaggctgccactgtaacgggtgatgcggcaggtgaaggattcaaggggacattggtggattgggtaaatcagcttaaggcctccggccggatcggtgatgctgttcataaatcattgcgtgggaatggccatgattcagagattgatgagtttgtgaagatagcttttgcgtgtatcatggttcacccgagggagaggttctcaatgtaccgggtttaccactctctgaagagcattggacagggtcgtgatgtctcagagcaatttgatgagttcccgctggcctataacaaggatgaatcagataccatgtaactaatggtggtggtcttgcttgggattgtgaaccgccctcggtcaggctcaatggatgcttctttgtgtagtcctgctacttgaattgatgaagagcatgctgaggcaaccatattggcatgataattattgctggatgatcaattcgatgcttgcctcatctcctgtcgagataatcgtgtaagctgtaagattttagtctgtattgtctttttacattattgctagcgcttgtagtatctcgctttatgcctaaattctgatatgaccttccttcttggaacaacttgcctccttccccaatctcctaagaacaatattggcagtgaacaaaattaatcttgaccaatttatctaaagtttacaggaatgtttcgctctgtcatgtactcatgtccttgaaacctttttcaagtagcatgttatatcatttgccatcttctctttgtgaattttcttgatgataccatgtaccttattcacatccacttaaacaatgctgtataaacatgatttatcatagttactattaagtgcgcccttatcagttcataatttttcagttttgatgtcaaaatctgtatagctataaactgggtgttatacttgtcaaccttggaccatctacctgtggtcactgctctatattctgaccatacatttgaagcatcacgattggaaaatgtcaccttcagcctcgcttttagccattgttttctaatttggttgtgtaccggtatcttgagtgttatctagttgtcttacttgatgtattgtatgctttctttgatttcaaagtcagctcttggtggcaaagaacaattatcaattccctttgcacatgccgttccacaataattgtcaccatcattgaacaatcgtaaatttgacttacctgcggtagcgaatgttacctttagactacttcctgttaagattttcttcacagttaacaagatgatgcgtgaagtgactctacatagataagtataaatcgagaggtgaaaaaacgggccgtaccttttgcaaccctgttcgaatcatgtgcttagctggtgcctgcagttattgtactatactgctagtggctgctttgtccagatttgcatgagcatatgctgcacagagaaaatgcggtgagatcaagacaaaaaaaaaaacgcggctgcaccatataaatcttttctactactcccaatgttgcttccaccaatcaagcgaacatgtcttagcctaattacccaactccctcccaatccagttcgacttactcactgtcagtctctggatcaattgacagcgctcatttaccgcggttacatttcgcaaaagtttggtctgtgtgttgctgtgtgcttcggagttacagcatcgatttgctggatgtgggctcaatggacaacggttggcatctgcagatcggctgatgctgggatgatgatcggggccttgtctctgaatgataatgatagtcaaggacgaggggacaacggagatttttcctcaattatccgtgcgactgtgcgagtacaaacggtgaacgcggccgtggattatctcgtttttccccccctccaacccctcggcttcgtttccacggcgaccagtcgcgtgccgtgtaattatcgcctcatttttccggcggtttagctgtttttccccccggcggatgttcggaccaacgacgttgaacacccctcggcacgatatgcctttggcggcttggcctcgggctggcacgatgtggtaagctggcagcgcgaagcagcagcagctctcgttgcgatctgtacacgcggatagtctccgcgccagatcggaggttggaagttttgcggggaaggggtggattgcagatttggaggctttggacgacgcgagtggtgtggtgctcggcaacaacggccgtgaccggtccaagtcgctgggcgcatgtcgccgtcgcacgctcaggttcccatcgttgaccgacttggccgagctgcgagcgagtcagtaggattttacggcctcatcaacagccacaaggtgacaaggggggaagagtccttccaattcttgacgtgcggtgcccgcaaccaaacagaactgcagaaatgttaaaatgctgtagatttccatgtactcccatcagagatgactttgagaaggctgaaactttcatatcactcttttctccgcaggtaggatgcagcttaagctactggtctcgaatacagatgcgatgacgatggcaactcccttgggagttgaaactttgcgggcattggcctaactagttcgcctgatgcaataaggttgaaggctgaaacacagattgctcagcttgatgttagccatctaaaatccgtccacccgacaagaaatccacactacagatgtgtgcacatcccatgttccctcgtgcttttatctcagctgccctgttgcacatgactacatgaggcaaacgatggtcccggaaggcattcttatgccattttcaatcaaacaaacatcatacaggcaggcacgaaagatgaaatagacccacccaatcaaacacatttctgatagccacaaatgatttggtagggtgaaatggaacacggatacagaaacctacgtctagtgctaacaccgctatgccaaacaagctcaacaaagagaaacaaggcaccccagcacttctgttacttgctgacgagtgtttctactacaggaaatgaattagcaacagagtgattttcactggtaatattcgtcgcataggccaagcgtgaaatgtagtgaagatcacaccacataacggtacgtcacatatcttccagcggtctcactagcacggatgatctttacaacttgcccacgcttcatgccgtaatatcttgctattgggtccgtaatttgaatccgggggagctgcattcataatacaaattcaatgtcatcagaacagaatgtgctactgcagtaaagtttacagaaacatctgcatgtggagtccattcaattagttatctaataaggtttgaagttatcttgataattgcgaagacacttatattttagaatgaggtgtcaaaattgggggatgtaaaaaacgtaaaaaggaaacagaggtgactggtactcattgaatttcttctattcccttcagaaattatgtatcaaactaaacagattgcaaattaacaaagaaatagaatgttagaacatgaaaacaaagagcttctcagatcaacatccccagcacatcgggtgccttatattcttcccattatccaacatgacacatgccatagtaaagaatcacatgcaactgagtaagtcaatgccattagagtatttatcatggtaactttgtaacaagacaagctcgtcagcgttaagatctgaaagtgtcgcattcgaagcatataaataaacagaaccttgatatcctattgtattaggttatgctgctaccacctcatataacattaaaactgcattatcacattgctcaactagcagctttgactctaaaacaagaaccagattgtcatttatcgtgattgtctactgaagtgatatagaaaccttgacaccttgttctgttaaactatgacctaacacattttatagaaccagttatcttaaaactaacatgaacaatgcaagttcgcattgtaaacaggacataataaacaacaataagttaaaagttcacaaaacaagattactttttttaaaaaaaactcgaccaacctaggaggaactaggtggcatttttaaataagaacttgggtggtctgggcttacattcacacacttgaccaactgagttaggctcagtatctaaaacaagatgacttaaaacaacaacaacattatgaacagccctggtttccactgccagacaaagttcaacagcacataaacctgaatttacttctcttaacaattagaaaaaaaagatcgataaaaagagcattcagggaatgtggttaaaacttaaaatgtatgcccccactactatcaattatattcattctaacaaattttattcatttgcagcactgaatgtcagagagaactgttgatttattagtttattagatggtttacagcaaggagttaggttacctgagctgcgatgtgttaactagagtgcagcagataccaaacttcgaatgcagtacaggtaatgaaggggagtttatgtaaacaagccacaatgtctcgaaaagtatcaaggctatgaggctatttcctcatagcctcatactttcctatgaggctactagtaattactagtcactagtctatttcctatgaggctatgataagtatcaggaaatatgtgacatgtttaatggcgacacaaacaatacgtatgtatgcaagcctcctggaaaattgtcatgattcaccaatagttgtccaaaaatgctgcccacaaaaccttttactgttgtgcagatatcaacacatgaatgaaacatcgatgacattatgctcaaatcaattcaaatactacacctatgagaaaataaaaaatgtctatttccagacctgagtctctttcacggtataccgctccagcagcgtcttcttctgctcaggcgtcaggagctcgtgctctggcacaagggtatgatccttaatgttcacaagcagttccgcttcctgcacaaacaagtgctacctcaaaccactgctctccacggtgccagtaataaatggggagtacacgagtacagaggcgaatggatgtggcaagagggcggacctggaagacctcgaggtggaacttctgggagacctcctgcacggcgctgcgggcgaacgcgctgagcgcctgctgcacgacgaggatgccgttgaacacgctctcctgcttcatcctctccacgtagctcctgatcgtcttcaccccgggcttcgcgtccttggggaagaagacgtagatctgcgaagaggggaagaagaggaaaaaaaacaaattcgcggcgaccgctcgtcacaactcacacggtgtgcggcgcccgcccagtcggaaaacagaggcggcggcggcggcggcggcggaggaggaggagccgtacctggtcggcgccgttgtccttcttgtggcggctgaagacgagatggtcgcggtcgacgggatccccgaagcgtgcgacgaagtcgcccctcgggaggtcgatgtccaactccgtcacgaggtagcccctgtcccgcagcatctgcatcaccgtgcggcggatgcggaaaagccggctcgtctcctcctccgacgccatctatctcctctcccttccgccgccgccgcggggtttcgctagggttttgtggggggagcgtccgcgccgacaagggggaaggcgggagcgggaggaggatggcggcaggtagggtttcgattgttttgggggagaaaaggctaagctcgccggcgccgaggtaagtttgggttaagtcggtcggtcggactcgcacccgagttgggttcggtggatttgggccgagcaaagcattggtgctgggccgaattcagggaggcaaccaaacgagagagagcaaacccccgatcacaggtgaagtaaaagagaaacagatgcaggttttggcacagccttgttttattcgtgaaaagaaaacttttaggagttacattagacgtttgattagatgttaaaagaggttttcagacacgaatgaaaaaactaattttataactctcttagaaaccgcgaggcaaatttattaagcctaattaatccgtcattagcacatgtagatgtagattattgtaacacttatgactaatcatggattaattaggctcaaaagattcgtctcatgatttccatgtaaaatgtgtaattagttttttattttatctatatttaatattctatgcatgtatcaaaagattcgatgtgatatttttgggaaagaaattttgggaactaaacaagcctaaaatggtcgaggttttactgtaacttactgtaaaatttctcgcagaacaatcatcacaaaaaaaaatctaaaaagcagaacggctgcagttaatattgcagcaattttcagacacaggatgcaacatccaacgatagcttcaataattcaccaaaagcaatcatctctgcttgaaatgtttcaggtttttactccatcaaaatccgagcgaactaaacaagcactgaccatagatcattccaagtaatgctgcaagaaattactgcaacctaaagaacttacaggatcacagcaacatggcagaaaatgagtcaatgacttattcagagtagttcatcgatagtcaagcactgactcgaaaatgacttatactcatctcattccgaacttattcagagtagttcatcgatagtcaagcaactcgagtcacaaattctgacggaaaggcaaagaggatgaacgcgatactacgaccgcctaacgaactgaacagaaatctccaaggaacccgagttacaatttctcccgggaagaaaggcggacgaatgcgatactactgcaaccacctaaagaatcgaattgaaatcttcgaggaacatatctgacaccgatcaactcgaagaagactggaccaagaacacacaacactagaaagagaactgccatcaaaaacagaaaacgacgaaaccaaacaacctacgcctgcacatcgtcgatggccttgacccctccgagctccgtgatgagtgatgaccaccgccgccgccgccacccgccgccaccgccgcgtagatcagccgcgatcagccgtgtcggcggcgccctccggttttccagggcagcacgcagctagcggtacggcggcaaagtcggcaggccatgccgtgctcgcggagccacacgtcgatgcacgccttgtggaagacgtggtcgcaggagagcgtgcggacgacggctccggcatccttgtcgtactggcacatcgagcagtcgtcgccgcccagctcccggtccagcgtggtgacgccggggagcatccacacccgcgcagccggtacggaggcgttcacggcgacgacgacccccacgatgcctccccaggagacaccggaggtgacgaagagaaactggaggaggtcggcctcgccctcgtccatgggttccgcgctcgtcgccgaactcgacgccgtcttgtggcgcctcgcgcagcccttgtcgttccgggcagaacccggcggcgcgcggtggaggaacccgcgcaagccgccgccgactccgctcaccggaaagtgagcaggacgtggtacgtagccaagacggcggcggcaatcagaacgcgaggtatggcgtcctccccctcgccgaagacgacgacgaaggcccccaactgggtgagggtcaagacaaagaccgaaacccagagcagaagccgacaactccatcgaaccatgtcgcggactctgtctctcgccttggactgcttctgcttttggaatgtggcggtggcgatggcgcggtggcaatggtgatggcgaggtaggcctcgctggctggcctacctggctgcttatcaaacgtgggtggtgagcaccgccgccgtcgatcacagatcggacggtggaagacggtggttctggaagatgccaaccagttagttccatgtagtttggaggtggaagaagagggatgccttgccttgccttgcgttgcgggatgaaacggtattgcactggaccccacttggaaggccaccggcgagcttagcgtggtccccgcgcgcgcaccgatgccgttgatcgcagatcggaaggcggggagtgttcggctagttcgttaacgagttcttgttcttagtgagcaatatgatttggccgagcaagaaacaggaggcttatgcggctgcctgtgacggattgggtatttgggttttggaatggtaattgtggttttcagtttcctgcgaagctaagcaatgccaagcaaaaacatgcagtaggctatagtacaaccacttcagtacttcactactgtattgcatccttgaacttgttcagttcagttcagttagtttctgctgtagcaagttatctctgaaaatgaactaacacactactgcatgttgcatctgtgataaactttctaaatttctaatcaaatgaacttgcaaagtgcactccatagctacgggatacaaactagtgttagaactaagaaccaagatggcaaacccacacaaaattcagatagttcagatagcattgcagaattttagaccctcaatggcatgccgtctctctccactgaatttagctggtcatttctgttaaactgtatgatcaaaaaaagacttacagagttaacagtgtactgatcaattactgtaaaaatcggcaatgccgccgaacgatttctgaaccaatatgtagttctcaacacaagacaacatatcgattaatcagtactaattcaggactagttattggcttctgccttcttgcatcgacaaattcaagaattggcatccccaaaaacttcagatgttcatattccatatccagatattcagacttcaccttgttacaggggaagcaacatgggacacagttctggccaaagtgaatcagaaggaactaaggcaatactactaccgaagaaatctaacataaatcctaagaagaatctaacaaaaatcctaagaagcgcctcaaaaatcatgtggcgagtggcggcgacagcaaaaaaaactaccagcagcagagggaactatccaaggaccagccatccaggtcagacatgatcacacacatcagagtggagaagaaagcgttagaatcctaagaaccgccctcgaagatcagatcggtggtggcggcgccggcgatagggtctcgtcgttgtctccgctctccaggcctcgaagcagcgatggtggtatgtctccccgcagcaggacatggtgatgacctcctcgcggcgcttcatgccctcgcggcaactggtctccttccgcagccacgggaggcagccctctcgtctcgtgcgttctgtgtcgattcgaacttcgaactttcgaaggacggcagtggcgcggaggagtaggaagcacgaggttaaggtggggcccagtacaaccgccggcttatctagaccgttgatcggagaacaaacgttagatcacttgccgtgacgaagtagagctcctaactaattcgcaggggttaacggaagtgcattaggattcgtgcttcttttgttctcggagatgacttctcgtcgcgagatcatacacagctctacgtcgactcggcacgcgagtcctaaaccgaaccgacttccgatgcatgccgactctctgtttcttctaccagtataagtatcgcccccgtcgacgaccggctgcaacaaagatagtaccacacaatcgtcgcttgccacacaatgacagaatccacaaagatcaagtattgtcgcgcagattccggctccggctccaagcccttgtcagcagaaacaaagacacgtttgatggcagacgggaagaagattgacgaagaaaagaaagacggcactgcagttcgtcgtgtcctcttctggttcgccgtcttggtcatccggttcgcgctcctgatggcgatgcactactaccacgtacggatgatggcgaaacttgaaggaactaataatgatggttttggcctttttcttacatgtagccactatgttttaatggctggctttattataaccagctgcatgggttactagctagctacatgggtgcctagccgttttgatggctttgttccaataatatcgttagtgtaagctatacctttttagtatgtcccttcttctgaatttaaagctttactgtaatgaatatttctcatatttatatatatattgtttcatccgatagtactgttaatgcacctttgtattgttttccattgggaagtctatctattttagattttcgttatgctttgtgcggttgtcctttcctgtactatcatcgtggaagatttacataattgcacaggctgttccgttactgaacaatgagatgggttggaacaattggctagggtctagttaggggattagggttttttttttgggtggggtaaacacaagttcggtacgggcgaggagagcgcaagaacaagatgatgatgatgggtgagggcgcgcatgaacatgtggcggcggtgagcggcgtggagggaggaggaagcggtagcgacagtgagatggccgcgcgccatataccaccagctcgacgcgacgcggcattacctgccgtcgaacgaggcggcggcggtggacgcgtacgcgtgtgatgggcttaggatgtaacgagttcaaggtgcgacggtgcgcgcgcgggcggagccaggactggacggagtgccctttcacgcgtccgagggagaaggcgcggaggagggacaccggacacgaggccgtactgcgactctggcacggcgtgcctggacttccgcaagggcgggtgcaatcacggcgacgcgtgcgagttcgcgcacggggtgttcgacaattcgagtgctgatctcgcgtaactgccaggatgagaaggcctcggcctttttctccttcccatcaggccgaacaggcataaatccttccatccaatggatttaggaaaaagtatacttcgactccctcactatgacccgagtatgatttatatcctccaaccacaaaaccagatatatcgatccaactatcaaaaccggtgcaaacaatgcctctgtgtggttttagaggtggttttggctgacatggcgcctacgtggcggtcttgaccgggtctttgtcctacatgacgcttatgtggcattagaataaaaaacattaaaaaaatatgggacccgttgacatcctccctctccttcccttcttcctcctccctccctctctcccttatctccctttctctcccccggcctggtggcgtcgtggtcgtcgttgcccatggccaccggacgccggcgccgaccgccgccgctcccgaccaccggcgagctccagatcctcccccgtgcgcggacggacggcgagctcctccccgcacgcgcacccccaccgcaccgccgctgctcctgaccaccggcgagctccagctcctcccccgcgcgaggacggcatgcgagctcctccccgcgcatggacggccggcgagctcctccccgtgcgcggatggcctgtgagctcctccccgcacgcggacagctgtcgccgtcgccgtcgttagctccctccgccatccacggctagctgtacgtcgaagcaaaatcaaaggctagctcgccgacgccctgggaagcagcatttgactgcagcacggcggcggcgcagccggggggatggaccctatcctcacctctaccagcacgacgccctcactgggtggacgagctccctctgccgcctcccgccatccgcaatcctgcttccgccacccagacccgtcgccggcctccaccacgctcgaactcagctgtcgccgaggggacgggacccacggaagccggcggcgcaccgatggccttcgtcggccttccgcctccgtcggcttgtcccaccgggcaccggcgcacgagatgacatgtggggcccacatgacagtgggtcccactattttctgtgtgaatgacatgtcggtcccacgtatttttttttgtttttactctaaaatgccacataagcgacacgttaacgacacgtgggacgaagattgggtcaacagtgccacgtaggcgccacgtcagccaaaatcgcttccaaaactactcagggatatattttacaccggttttgatagttggaggagtcaatatacctggttttatggttggaggttatgaatcatactcggaccatagttgagggagtcaaagtatactttttccatggatttaaggcttgttttatttccctcccgggcctcattcccatttgtgctaaagcccagattccctggtcctttttcacccctccctaaaaccaaaatctattgatctcccctccctccctcagcccaaggaatgtttccttcttgggaaatattctatgtttagctgctaatttgctgtgatgcatctcggttgaccggaggtaacagcaattgtgtcccaggactggtactgagttccgcaacgtgaaattgacatatgctgacatgcctaaaagaacagcatcatagattcagagagaagcaaggtgacactgacaaaacatatcccactgaaagaaactgcattacaaaaacaccatttacaggtaatactaatactgaagctccaatcacagtctccaactgctgaagctctagccacactaccggaaacatcacatattcagatagtagcaaggcggagattaaactgtgaatctaagtatctgacagaacaggtactgtgaaagactacagtgagatacacatatcagcctaagcaccgtgtccgttatggcataaaaatccaatgagagctcataggatccagtacactgaaggagctcaacgtttgtcaaattaatcatcaacacctcgaacaccacctcaaactaaagattagcattcaacttattagtaggccgaatgaacaaataatccatcatcaaatttgtcagccatctgaacggctgcagataccatcttaaagatcttcaggaatacactaacacgcaactatccaaaatatactgaggaacttacacaaactaaccatcttcattcaggtctctagtccatcagaccccaaatcacacgagagatacatcattgaacatcataacaatagtacaaatagcacaacggcctgccctaaatagatcacaggaatcacagctaacaagaatgagtaactgttattgatcatttattcagatattcagatagcaaaaaaaaagaaagatattcagatagcagcatcaaaaagccaagcagatgatggaaagaagaagcggttgaatgcaacactatatatgacaacttaaagaacaaactagaatcaaagtgagtgacaaactttaattctttatttaagtcattgacgtgatcagtacaaaatcagactgagtggatgtccagtgttcagtctacctcccctatgtgttaaactaataaggattctaagaaaagcgtgacaataaatcaaaaatatgctccaagcttccatctgttgagactatcgtatgataaaagaagcatttcgaagagcgagatggtatacttcagttcagattggcttatatcaaaaacagaaggacatatatcaaagatcatcagctagtcatcaaggcattcaacaccacatcaaactggagataattccatcagcaaccaagttacaaactctgacagaatgagcatgactccaaaggccgtactgacatcgatcggcttctagaacctaacgagaagagccccatgaatcttgcgtggctgctaagaaatctaccaacagaaacagagagagaacctggccaggaactgatccaaactaaactcgaggtgtcggacgtgccccgttccgtgattccgtctaaccctgatcatggcgacgcagatggccgcagaagtggctcctccaaactcgaggtgtcggcggagctcgacgacgtcgccgccgccggccgcggtgggtgctgctcctccgggcccttgggcgaacctgtcgccgggggcggtagcagctggtcctgagcctccaggtcgaggtcgcccggctcctccggagcaatcctgacgtgtgtcgatgacgacgacgacgacgacgcagacgtctcctgtggcggcgggttctgctcctccggcaacggctgctgcggccgcgctctccacggcagcacgcgaacgctgcgagccttcttgcggcattccgggcaggacaggccgtgctcgcggagccatttgtcgacgctgtagtcgcagtccttgtggaagacgtggccgcaggagagcgtgcggacgacgtcgccggccaccatgccgtaccggcacatcgagcagtcgcccagcgcgcggtccagcgtggtgacgccgccgagcatccacaccaaccaccccggcgccctctcgtacaagtgcaagccgaggttgatgagcccaaaggcgacgaatattgcgatgaatccccccttctccatgcctctccttccccgatcctctcctctccccccctcgcgctctcctcgctttgcgtttcgtagagtttggaggtggaagaagaggccggagccttgcgggatgaaacggtattgcactggaccccacttggaaggccggcttatatagcgtggaccgcgcgcaccgatgccgttgatcgcagatcggagggcgggtagtgatcggctagttcgttaacgaattcttgttcttggtgggcgtatgatttggccgagcaggacacacgaggcgtatatgcggctgcctgtatcagattgggttttggaatggtaatcgtggttttcaggtttctgcagagctaggcaaaaacatgcagtagtacaactcgatctgtacaagtgcacaaccacttttgaaaagagaagtgtacgaccacttcactactgcacattgctttgcatccttgaagttgttaagttcagtaaagtcagcttctgctgtagcaagttatttctgaaaaatgagctaacatactactacatattgcaggtttgataaactttctaatcagatgaacttacataatgcactccgtgggatacaaattggtgttagaattaagggaggacaaagatggcaagcccacacaaagttcaggtagttcagataacattgcagaattagacccacaatagtatgccggacattaatacgattctctgtacactgaatatttagcaggcgatttcagctaagctgtatgataaaaaaaaaagacttagagaattcctgcagtatacataacaaacaacattgtacttgtcaagatcaatagttcagtatgcagttatcatcgcaaaatagcatatcgcttagtcagtactaattcaggaccacttcttggcttatgccttctttcattgacaaattgaagaattgacatctcccaaaatcttcagatcttcatattccatatccaaatattcagacttcagtttgttacatgggaagcaacaagggcaacaattctggccgaaaagaatcagaattcagaaggaactctaacagaaatcagaaatcctaagaactctaacataaatcctaagaagcgccccaataatcatgtggcgagtagcggcgacaagaaaactaccagcagaggaaactattgaagaaccagacatccaggccagacacaatcacatgacgcatcagagtggagaagaaagcgttagaatcctaagaaccctaaacccgaagatcacatcggcggcggcggcggcggcgacagggggtccaggtcgtagcagcccgggcacgggcagacttgaaatctcgttgttgtctccgctctccaagcctcgaagcagcgttggtggcacgtcttcccgcagcaggacatggtgacggcctcctcgcggcccttcatcccctcgcggcagatgatgcaggccgcgcagccggtctccttccgcaaccacagccacgggaggcagccgtgtaggagctccctccacggaacgcagatggggcgcgaggacgcgagccggcggcgtgctacgtccctctccgccattgctgccccgcccaccctctcctctctgctccttccttgcttctccctcccctcctctctcgtctcgtgagttctctgtgtcgattcgaaggatggcaatggtgcggaggaggagggagcccgagatttaaggtggagtcggtggagtcagcaccgcgccggcttatctagaccgctgatcagagatccgacggtagatcacttgccgtgacgaagtagaactcctaactaattcgccctaattcgcaggagttagttagcaagtggtgatgattagtgctaatcgtctgtaccctcgccgtccgatctgcgatcgacggcacgggtgctcgcggccgacgctttataactagccaagtgggccatccagccttccaatttgcaaaccagccactgcgccaccgccaccttctcttccaaggcagagcagagcaagagagcgaggaggcgatcagcgcagcaaccatggacctcgtcggcgccatggcctcgctcgtcttccttcaccttctgtgtgcggggtggcggatgctgaggatgtggacggcggcggggtggccgtggccgtacctggcggcggggtgagagacgctgagtatgtggtataggcggcggatttggacgctcggcggtgtcaggaccctggatcaggcgctgcgaccacagtgcaagctgtgtaaacagaagatgatggccggcgccgtggtccgcgcgctttcctgcgaccacgttttccacaaggcctgggtcgacgagggcctccgcaaccgcaagccggcatgagatgcagaatatgcaaccgtgtcgcccgctgcatgctgccgtggaaggcgtcgccggcgaacctgatagaccccaacgctcagaggtttcagcacatccgtgctcgcggcggcgtcaggacactggaccgggcgctgaacgacgcatgcccgatctgcagcacaggatggtggcccgcgacgatgtccgcacgctctccggtgggcatgacttccatgaggattgcgacatcgcgaagtggctccgcgacaacaagaaggcctgacaggatgaggccctcgatcgacgatgtggaggcgcaggttctctgtttcatcgttaagttttttgtttctgatggcagttttctgttactagtctcgcgtgttcttaggcattttcttgcataggtttctcgtttattggagccgatcagtgttagttaggtacttaggttcctcggagatttctgttcaattcttagggtggtcatagactcatagtagtatcacattcatccgcctttctatccgtcagaaatcgtaactcgggttccattgaagagttctgttcagttctttaggtggtcgtagtatcacattcatctgttttgtgttaccatcagaaattgtaactcaagacttttgatgaacaactctgaatatatacttttctgctatgttgttgcggttctgtaagttctttaggatggagtaaaaacttgaacatttcaagcagagatgattgctttcggagttttggtgaattcctgaacttattgttggatgctgcatcatgatttctgaaattgcaatgagaaatgaatattcctgcaatattaactgcatccgttctgttgttttagacttttggtgatgattgatctgctcttgtcaatgccaataaggctcattgcactggcataattctgcttgtaatattcagtttgatgtggtgttgaatacttcattgactaattgacgagctttgagatactgatgtttattggatcttgtgactgtcccaatgtattcattatttagtaatggttcaagtaaaaaaaaatggtgcatagtgctgaactactagtagtatcattgtgttgaccatgccagtgttgtgcattttttgtgtgcaactgtgatggagtgagatgagtccaggcaatttgaatcgaaacatgtcatcttgctcctgcatcataaaacaggttattttgcttctgaaagagtgaaactgataaatctgataacctggtcacatgagattttgcactttcggagttttgcccatatggaaattgccattcagtcagagctgtaattcaggatttgttttatgaaacatctgacagaatttgaaatatcaatattctagcgctctgaatcatcggtacatggctcctttcctttgctcatatgggagtagctaagagctcaattgccactgaatcgagtttttttttttcagtcataggacaatgtctactgatgcgggcttagaacattttgattcactctttgctgcagagtccctggtctactggcgcgtttatgataaagcatttacaatgtctgaaaactgaactagtctatcaatgaagtgaaccttaggataacacttgttacatgcaaagcttgtaaactactccgttcagtaaagcatctgttagtccattcagttcgactatcaagtagcaattctgaatttcacagtagtctttgacagtatgtactttgttcgatactcgcttactcagattcacagttaaatcttcacactgctgctctctgaatacgtgatgcatcttgctgtatggttagagcttgcagttgaagattaactgtcaatagagctttattattacctggaaaatgcttttctttttttttttgaacgaaaacaatttggaatactaagaagtaacttaggctgtgtttgcaaccccatgttcccaacctctctccctcgttttccgcacgcacgtttttcaaactactaaacagtgtgttttttgcaaaaaaaattatatacgaaagttgcttaaaaaatcaggagacgatgccaaggcacttcaggagatgatgccggaaaagatggatgctgacaagtgggatgagatgaaggcgcaggcagctgcaacaatacgcttgagtctcttggattctgtcatgtaccaggtcatggatgaaaaaacgccgaaggaaatttgggacaagttggcaagcctgtatatgtccaagtcgctgacgagtaagttgtatctcaaacaacagtcgtatggtttgcaaatgcaagaggagtcagatcttaggaagcacgtggacatcttcaatcagttggttgtggatctaagaaagttagatgtgaaactggatgatgaagacaaggccataattcttctgtgctcgcttccaccgtcttatgaacgtgactaccctgacgcacggcaaggataatgtcaaaactgaggagataatttcgtcgttgcttgcacgagacttgagaagatcaaagaaaaatgaggcaacggaggcttctcaggctgagagtttgctggtcaaggcaaagcatgattatgaagcgggggtgtcgaagagcaaggagaagggggcacggtgctataagtgtcatgagtttggacatataaggaggatttgcccgttactaaagaagaggaaaggtggcattgcaagtttagcagctcgtggtgatgattcagatagcagcagtcatgagattctcacagtgtctaacgagaagtctggagaagcgtggatgttagactcagctagttcctatcatgtgacatcgaagcgggagtggttctcttcatacaaatctggtgattttggtgttgtttacttgggcgatgacacgagttatcgtgttgttggagtgggcgatgtcaagttcaagatgtatgatggaaacgaggtgctactttcggatgtgagacacatgccgggactaaggaagagtttgatttcgcttgggagcctacatgagacgggttggttgtatcaggtggattctgataggaagaccatgaatatcatgaaggacggcaagactgttatgacttgtgagatgacgagctcatgtttgtacaagttacaagggagtgttgttgcaggtggagtcatggaagatgggtatgttggtgttgcggtacacgatcctgaaggcggcgagcctggcgtaggctcgtcgggcggctcggcatgagctgcggcagaaccaactcaagtcctggtacacggagattcgagcaagtaacaaatttaggttggcgtggcatattcgccaaggtggagtttgttagagtttgtgtcgaatatgtgtacgtagtcggttacagtttaggacttggagttgtaataggtattaggactagagtaagagtgtagcgcccgttccgtcgtggcgcctagcgggaaaactatttcttaaaaatcctaattgcgaaatctgtttctttgcttgttgtctagtgtccgtgccatctcagatctcgaatccccgatctatcgtcaagttcaatcccgaatccaaatccttcccaaatcaaatccctccgcaaaagtctatttagcctccctcgagttcgatgggccgaactcctctcggcccatctccccctccctcctcggctctctctctctctctctctccccgctctgcccgtgagccgcgtcgagctctccctctccactctcgtggccgttcccgccgatgccgcccaaatcgccgcgccgcccgcgcacgcgcgcgccgtggtggccgaccggccagtcgccgccgccgtcagcgcctgccgcgcctgccccgcgtctgccgcccgtgtcgccgctccactccaaaccgccccgccgtcatcgccgtcgtcatcgactcggccccgcctctccccgcgcgtgcctccaagggacggaggcagagctccccccctctgccgcgtcgccctctctccctcctccttttccccaaagcggcaaggaggcaagccccctttcttcctccctttttcctttttcccttcctccgccggcgtcattcccctcctccctgtcgccgatttggccgctagccggagcgccagctcgctggcttgaccgtcaaaagtcggttcccctctcccaaaccgacattgtcgcccatataaacccaaccttcccccctttcctttcctctcccattcgcctccactccattgtcgccgcctcccgtgctttgttcgctgtcgccgttcgccgtcgcgcgtgtcggaggagccggcacgagcgattcaaaggcggcgtattttgtggcatatggctgaacaaagcctagggcgaatagaccggcatccagtagcggttcaaccttggagaggctttggttcaacctgtttttccctctagcagacaggaagaaaacgccataggagatacaaaacaatgacgacactgagacacgatatttggtaacggagttcagccgtagcctacatctccggggcactgattacgtgtgctcctccccgatccatcatatacagcgtatcagagttacaacgactcacggccacttaattaatcatgtgttaaaaggtcgcaccgttttacgtgcaggagggatgggttcccatcctgcacttgcgaacacacccttagcattcaatattgatagagaagaaattggcgagagaacctgcgttcgaagggattcgaacccaggccagcatgttgctcctggcagctccctgccagccaagctaggtgccgttcttgaaaatgcttttctcaatgcagtctttttctgttgagggtgtgtttagttcacgccaaaattagaagtttggttgaaattggaatgatgtgatggaaaagttgaaagtttatgtgtgtagaaaagttttgatgtgatggaaaagttgaaagtttgaaaaaaaagtttggaactaaactcggccagagtgggatatgttttttcagtttcacagtcaaatcatcacaatgctcctgtctgattctgttacatgtcttgcttggccagagcttcatcagttggggattagctgcgattagagcttcagtagtacctggtaaatgctgtacctggcaaggtagagagacggctagcttagactttagagtacctgtaatctgtgagattcttgccttcgataggcccaggggtgtcctaagttaaaatggcccagcccaactctgccgcctcacacagccgcaagcatgtgattaccagagttgctggcacgatgggcccacccgtcatccacacgagggccacgccttgctaggagcgcgcggatttcccggctcgacaagaagggaaaggcagaagccgactcgaaacaacgcgaagcggcgcctctgactcgcttccgttcccatctcttcctctccctacctcgctccgccgccgccgctcccctcccgacccgcctcgcttcctccctccgccgccgccgccgccgccacggcccggccggatcccacccggccgctcgattcgaggtcagatccaaaccccagccctcccaggtccgaatcgcgccgaatttttttctaggttttggtacggatctagggtttggcttgccgtgggaaattttcgtggggggaattctgtcgaatttctctcggcttccacggtctggttggattcctgctcatggccgctgggcgccacggaggatacagggactacgaggcaagggagcgggagctcgacgcggaggcttccaggaggagcaaggagcagcagcaccaccaccacccgagcggccgacaccaacgcggcgactccgacccccgctgcgaagctgaccggcgccgtgacggcggtcgcagcaggggcggcagggagttgtcgaacgggtacggccaccgccgctctccgcctcccaggagtcgcctctcagcgaggctcggggatcgcgagcctggcgaagttctgagcggtagtgcgtcagatgactctggtgggaggccgcatagagcgagggagaatggtgtatcaagttctagtagggatggtgaatcggtggtggctgcatcggcctcatcacctagcaagaaaaggaaattctcaccgataatatgggatagggatagcccaaagccaatgcattctgatgtggcgaagggcaagaaggcggtggactctgtgcctaccgagcttcctctccctccccctccccctctgcctccgcaggatcacatccctgagaggttggctgtggagaagtcgccgatggatgtggagcctgctgttgcttccgagagtcctgagcagttacaggagcatgcggagagtagagtgatggaggaggaagaagagtactcaacaatgaggaacatatcaacttcaaggtgggctggtgctaatgatgacgaggaagagggggcaccacacaggaagaagaaaagtgcatcgcctgcagactctgctgagttggggcagaggaagaaggctcttagcccagaacttggtgaggttgtggccagtgatatctctggagggaggaccatgtcaaggtcgtctgattcagggaggttgggtgctgatgagaatgaggatttggaagttgataaagatgattatatggacgttgacagagatgatgatggtaacagtgatattgcaaatcatcagtcaggtatggactcagagtatgaagtgcgccggtctgaaacaccagaaccagtgaagccaccgcacagatgtataaatatgcttcaaggttgcagaagtgttgatgaatttgagaggctcaacaagattaatgaaggcacctatggtgttgtatacagggcaagggataagaagactggtgagattgttgcgttgaagaaggtcaagatggagaaggagagagaaggtttcccattaacatctcttagggagataaacatccttttgtcttttcaccatccctcaattgttgatgttaaggaagtagtggttggtagtagcctagatagtatttttatggtgatggagtacatggaacatgatcttaaaggtgtcatggaggcaatgaagcagccatatagccaaagtgaggtcaaatgcctgatgctccagctgttggagggtgtgaagtatcttcatgataattgggtacttcataggtaactgttgatttgacgctctatttttgtttgccaagtatcctcaaacctatcctgatgcctgtatactgatatgcattttccatataccagggatctgaagacctcaaatcttttgctgaataaccgtggtgagttgaaaatatgtgattttggactatctcgtcaatatggaagcccgctaaaaccttacactcaattggttgtgactttgtggtacaggtaggtctttggtcaacatcagattcatccccagtgttttggcttgccattaatttttccattgtgagctctgtttatcaatctgacctgcctttttgctccttctcagggcgccagaactattattaggaacgaaggaatattctaccgccattgatatgtggtctgtgggctgcataatggcagagcttttggccaaagaaccattatttaatgggaaaactgagtttgaacagctagataaggtatttcgtttgacttgtgattttgcatccttgcaattactatatttttttcagaggtctcatgttggatttcctttcctgttgcagatacctataaaccttgatatatattatatttgatcatatctcatggtgaagctacttttattgcagatatttagaacacttggcacacctaacgagaagatatggcctggctatgccaaattgccgggtgtaaaagtcaattttgtcaaacaaccgtaagtgtctcctggataatgcatacctaatcgtgttggtctgatgagtgtctatatgccattgtgatgaaatttctgttcttttatcttgtcaggtacaaccgattaagagataagttcccagctgcatctttttctggtcgtccaattctgtctgaagcaggttttgatctgttaaataatcttctaacatacgatcctgagaaggtaatgtgctactgctattttttttttcatgatttatatcatgcattcatatttaaatacttcaatctgagcacacctgttttggctttacagcggttatcagcagatgctgctttgcagcatgagtggttccgtgaagttcctctacctaaatcaaaggatttcatgccaacattccctgctctaaatgaattagacaggtacttcttcgcaaccatttaatctacttgtagtgttgcttaaatatctttgtttcatgtagtgaaatttattttcctaaaattccacaggcgtaccaaacggtatttgaagagtcctgatcctctagaagagcaacgattgaaagaactacaagggaacattggcaaccgtggtctttttggctgagctattagcaacttgtttgggctctattgatcctgactgtcatgcatcattctgaatctatgaggtcagatacactctgaggtgagatgtgccatggacatgaagtatcacgcatcttggtgtctaccagcaactgatagtgttctttagcaggcatggtgctggtttaagttgataggtacctggcccatcatagaaattttgttgcaggattaactccaaccagattgatcataaaagcagtctaatctgcctgcatcgtaaggtgtggcatgttggcttttattggttaacagcagtttcacctttggaacttctgtatgtaaaatattccagattggtacgttgtaaacaatgttcagtgcgttggatttaaaataagaatattccatcattttttttctatattctcctagtgccttttcttttgatctttccattttgtttgcaagagacaagagaagcgaaggggaaggatgccttttgcttttcaccaggaaatcaatggacagtaatacaacttgaaaggtaaatatattcaaaaaccatttacctcaagtgatgtattgctgactaaaactgatgagtgcacgtgcaaaagatcatttgtgatgaaaggtcgtggttgaaggttatctgtgttttcataggtctttttaaatgttgtctggaatctggacagacacatgttcccatatatctaaaaaagaaatgaaaaaaaggggttactgattaaaggaaaatggaacagaaaaatgaaaaacggaggatactgttctgtaggtattctccttggcatcttaacaatttgtgcaaaacaatgcttgtaagtaacagtaactgatgtttctgtatccaccactcaacagtgctgttcagcactatattttcactcccatcccatctggctatgcaccaatcaactgtaggatgcaatgagggaagaatgaaatgtttctttgtagttactgttcataagctatctaattgtgaatttggaagtgaatgtttggtcttttttttttctttcctgttcggcagccaactttcattttcacttatataaataaatctttaaaagagagaaacttcagtatcttgttactcattatacgtggtggactcttccatgtatttgatcgcttgctcccttgatgttctatttcatggactatttatctattcagggataatgttcaccaaccgtttacaaataatatttggttcttctgttgtatccttctaatctgaatggttttcaactcactgggaaacaagtttgtcttgcatcgattgatgctttcgttctctgtataccacatttttaggatattattagtaactgtctaatgtattgtgactcttgcaacctggaaaaaggtctttttcctttatctaaatgataatgaggttgaattaatcagctaagcatatctgtaaatattaaccattagctaagttatagtcatgcgaggtagaagtggtgagatcaaaagtcaagatgtctttatttttatgcaacatgttgactacttcgaagatatgctagttaactccttttatgcgacaagtgttttgcgtaaactgcctttatgctttgtgaactggtggaagaccatatgctcagtcattttgtgctttgcattttggtggtaacttaaatgctgcttaagtgcttggagagttatttgaactcactacagctgttgtctgtgacacgtctgcagcttaagctgtggctgcttcaagataggaagcttgatggccctcagcttgttgtacctaagtgactaaattttgtggaaggtcttcaagagagttcacctgttactttagtgaaccatagtggtcactggtcagtctacttatcctatcctgtctattaatatacatcatacttctgactgattgtggggaccgctcgtccatttctttgggatggttgaggtgtaacgccttctcttaaatgacattatcttcatgaacaacattttagttttctccctacaactttttccctcttgacattacctgtaaactttgaaaactagtacatggacacctgaaatggtactgcgaactttaaactactagtggagcgggttactcacaaaactactttaatctgattagttttagatgggatcacacaacttgaaaggcaagacttctactgttttagcttgctctgcatagttttagcagcttgtgctgcaatagggtgagggttgctcaactgcgcaaatcctcccctgatgcaagaccacattaacttggacaagaatatgctttaaaattttaatcatatatgatgcttgcatgacccgcttgagtgatatttgggtctctttttgtaatcgtgcttctctctaacttgtcttcccatgccttgccgatatgagttttgggatatatcgatatctgttcattggtttgattattcgttgtcgttattttgttctaacgtggcctcgaagagcctctataattcagccggcattgcctgttcgaatggccatccgaggcctgtctgcattgctatgggggtggcagctgattctatgtacgaaagaggaagcacacgcatgtatcattttgtcaagtactgttgtgtagtgcattgttcgctatgtgtactttgtgtttttctctcccccttttgtactttcctatatcaatgcttgtaaacatggaggactattgctttacagtagtaggtactgagctagtattacatgtaagtctgtctcatttacaagagaggagaagttgccgtgtgtgcaaatgctcaaattcggctccaggaaaccaagagcgttcgcgaatccgcagaccgggcaccgttgctgaggtgagtgagctggtcatgtccgtagcctacgtgtaaaccaagtgatggtccttgctggaaggtgacgggcggtaataaataaactataccccctggtcactttgatcggtcggtacgaggaatggttatccttcgggaaagcacgactgcattcagtagcggcctcgggtgagcatcggtgtccgagttctcttcctcgtcgatttcatcctcatccgcgaggtgaaattaccttccagggttcggttgcaaaatgtacatacgcaaacggctgggatttaatttattattaagaaaatagattcactagatgattagaggttataatacccgctgttcaaactatgtgtgtatgttcaacaacaatcggaaagggcatgtgaactagtggtggaataagtggattgggaacttgatttgtaatacaaattatttgtttagttgctataaataaagagaggggagggaattcatgctatttgtttcgtatgtggattttgaggtagggtgtgtttagttcacgctaaaattggaagtttgattgaaatttgaacgatgtgatgaaaaagtttataagtttgtgtgtgtagggaagttttgatgtgatagaaaagttgaaagtttgaagaaaaagtttagaactaaacttggccgtactagaaaattattatctcaatagttagtcactagggctaagctcgagcattcccttcttccgtaggaactgatcggactcatgtttccttctcaccaattaccctcaatcttgtgttactaaaatattacgtggatttctaatctctctgtctatctacagtagttaatacctccgttctagaatataagcatttttagagttggacacggttattaagaagttagaagtaaatgatggatggttgtgattgaatgaatagtggaggtaggtgggaaaagtgaatagtatagggttatgattggttgggaagagaatgttggtgtagaaattgttatattttaggataaatcttgagggctacaagttgttatattttaggatagagggagtagtcaacatgtctagctcgaccgctccttttatttgcgatattgattcgcatcttaatatgctaaatccatattatgttgttttaatccaccaacatttatgttgataaaaccaactacacctaccatataagtagaaaaccaagtaaaagaataataaatgcagctttactacctgataagaaataccgtggaagttgataataaatgcagtaagcaaataaattatattatttatacatttgcaagaggttgtaggaggcagggggttagccactttgtaggtggattttaccttatttttctctgtacaaataacacattgtgatatctctggtaactactatcttctgatcctataatccactatgcttataaaaaagtgtgaagtttgtaatggcagagacgtattaacttgattttttttgaagtggtgtattaagatgacaacaatcttatctctcaacagtagagatttaatcaactttttgcttattatgccgttgtcacgggatattttccatcatataattctctcattgtcattcaaaaaggagaaaggagtaacagaaataaatccaaaacaaatcagaaaaaggcaaatttccaacttaggctatacaaattaaacggcaacctccatttttgcaagatattgttcacaatcacttacctcccttttatagtatatagtctcccacaacggtataaatttatcccttctagaaaaaccaacagcacaaatccaaaacaaatcaccaaaaaagaagcaaattcccatccttacacacgcctgcaacctccacacaaaaacggaaacttttttcaaacacgcgaaaccaccggaggaggagttgtgaaaatactctcaaaacggagcaaattaccaacgttcaattctcaaaacgcgagggcatctccgccatttcgcccatcgccccaaccgtttctccttctcctccttccccttgaagcctctcctcttcttcctcctcctcctctgctctcccttcgcctcgcctcgcctctcctccaagagcgcaaccgtaaaaaaagaaaaagaaaaaaaaaacccgaggcggcgagctctcgggctgcttccggctccgtccgtagcggcgaggagggggcggagggccattggcgcggcggcccgcgcgaggcgcgcttgcattgttggtggcggcggcggggggtcgacggggtggagggcgtgtttttttgttggcttggggtggaggcgggggatgtcttgctcgaaggtgcttctgtcgaagaagggggtgctggggacggtgtgggtggcggcggtcagcggcgtggcggcgctcagccgggaccaggtggttcgcaccaacgtcgtcgcctgcgtcggtaagcgatgcgatgcccactcctcggcctcagcgcgcgcgcgcgagagagagaaaaaagtgcgtatttttcgtgggtttttatgtcgaatttgcggtctaggtgggaggcagtggaacagtgtgggaggcggtgtgcggaagaggggtttatccggggctttaggttatagaaatgaagcgaatcatgtgatgagaatctggtaaaaaaagaagaagaaagggaatggaatttgagaggagttgtttgctgtcatggcctcggtacccttctatactgtattgtggtaatcgttgtggcaatttgattttccatgtgaaatctcgaggtgaaaggaaaaggtagcaccttgggtgtaataacatggacctgtgggtatgggtttttggatggtgaagagttttgtactttgtagatggcatcggtttggggtttggggtttagggtcattgtacgacgacggttctacgtatggttctattaataaggcccaagcatatacccaagattcgggcgccaactaggaataccttgtaatccctaaatttaatagcattgaacaaatctagtagtcctgtaaatattgtttggtctgactcgtaacggaaatacaggtgtcaaaagtgtggaactaataagaagggaaatgctatatccaaagcatatgaaacaaattagaacagtaaatgcgggttgtgacattttataacgctttccttttctagatcgatttatttttagcattctttccctaatatgctcgtaacgcttgcacatttcctctttcccctggcagataagattttgcctgatgacaacgacaaaaccacatacagagtattgggactgcttctgcttggcattgttaggatttattccaagaaagtggaatacctctgccatgaatgcaatgagcttcttggatcatatggatcagcacattgcaatgaactaagtatcccaactggaggagcaacaaatagagtttcaaagcaagcgaagaaacctgttcgcgcaagaagattagttgtaagacaagaaggtgcttacaaggtaaaaatacctatgcaagctgtgcgaacaactagagcagaaacaagagctacttcacagataactgaagttcgagacacacatgctacacctgatcttccaactttcacaatacccaaaagatttgagcttgactcttttgatttggggattcctgaagataggtaacaggttttggtcctatactagttttattagcttgttgcttaaaattgtggtttctgatctatttttaaaactttctttgtagggatgatgatgacgtggatcatcaccaattgccacatcaaggtagaactgctgtgattgatgtttttaccactgctaagaaaccattttatttacgttctgcattcttttgtataggtaccatgttggaagatgagaatcaccatacatcctgtttgtttgaggtacactgctctctcctgtattgtccacaccacttaccgacacatgcatgcacaaaaaaaaaaacttgatcaaggggtaggacgtcgtcgttgacttagctttaaagaaggtgcccactgaaaccttgtgcagcgatgtggacagaactgtggcacccaggatttgagccctgggtgggcgtcaccttactgggtgctctaccactgagctacacactccatccaacacatgcatgcatacacgagctgtatttagtaacatctgaaatgaagaaatggaaaaactaactaatggtatgcatactagataagaaacacctggtattgctaagcattgatatagggtggccaggtgaatgtgttatccagtgatcccaaagtgaggtaggctcccaggtagccgaaagtactactccctccatcccaatggtaggtatttctagcgttcaaatttgtcccaaaatgtagctaattctccacctacctcgtcatttgaaccaagcacagccatatcccgttaaatttctgcacctactttctcttctcaaccgatcacaaccttccaccattcaaccgcacctattttcttaattcccgtgaaaacctctagaactgcttacattttgggacaaagtactgattaggcaagcactgtagtttttgaaaaaaaaaaggactcgagtccgctaatgctttgactggcatataccaagtctgtgaataccagtgtgatgctggctgcagtcctgtaccttgtgctaattattctgttcaacaatttagagaactgctacaggtgccacttgtcagttgctgaggggtttagggggttagttctgtaattgtcttattttttttagaaaatgaaggagagctgcgcttcatttcattaagaaaaaacaaaccacccatacaaccaagggctcacgagcccttcacacatctacaaacagcaccacacaaggtgatacacgaccaaaaaatcaccctacaacagcctagtgcccttgggttagcgaattacacccaggttttcattttttcccgtgttatttataaataataccacataattgctactcctttattaattattatccaataaccatgtcttccttttgtttcgtatattatctgtttgggaaactaaagccttattttggtccaatgaacagtcttataagatgatgacatgctcatacgctgatctagactctgcctgcattatgccagtacgcgtgtaagtatagagattactgtctcaatgatgctaaaaaagattatctgtaccgaatttctgaatgaagcttcaatgcagcactatcccaactgaaatgatgagtgtcattagtgaagtcaacagtctactatgcttgagtagcattgggggtgaacctgaaaatcacaatgctgaatctgcttgctttacaccagtgaaggagtaagtatatatggtgtcacatttctctctttacagtgcgcatacttttcctctgttgccgatgaccttttttttttttctggaacagtattcttccacctgagatggtggatatgatggctgaagtaaatgatccttcagataaaagcacaagggggaaaaaacctcaaagagaattgaatagggatgagaatgggaattctgcttgccacatccctttgtcagggtaagtaaatgttacttttgtggttttaccatattatgattttaatgtcacatcaatttttttttacttaaacatttttgtgaaaaaatagtgcattgatgctgaccatatttattggtacagaagtaaggaagtgcaaatacctgaaaatattgtggagaatgtgacttttccaagtcgtgatgcaaattgtcccacaattgaagaatcagaaaatgggtcactgcatggaactaacacaaatccatcatgtgatggttttgaggaacccgggtctcttgaacaaccaactttgcgctgtaagacaaagctaatcaatgagctgtcaccttccactccggagcccatgacagagggtggcacaggtttaatttttgtgataaaaattcctcttctatttgtggtcattattatgcttaatttgtgatgtgtgggtttcactgatttattcagggctaccctgctctcctaaatttatggttactacaccagctaaaaaggagaagcaccgggtgactagaaaacgaagaaggggattatacaataaagattatataccaacagatagaggagacaaacggaaggttagaagaagaggaacatgggtattgtatgatgaaaatattgttctaccaaatgagtaagtagagcttctagcttagaagctcttccatctgttgcactacctattcctgtttgatcttttaggtatcctaggagctggtttggcaaacttaggctcatcttatcagcttaagcagggatttgggattctttgatgaatctaagttctcagcttcttcttcttccttttttttttttgctaagatatttaaggctcaaggcaaggtactgtaagttatgaagcctatagcctcataaagaattataagctgagaaccaagatgcttggttggctggccctgaggatgtttgtgttgtccactgggattcaaatccttaaaacatgtgctctcattggttctacctgtttgcagtgggaaccagcgatcatggctggggtgctagcctcttgttcccgcactttatttttgtttgggggcttgggttaggtggtaggctgcagtgccatactattttttatgtgatcaatgatcatgtagtataagttggaacattaatttttcaatatgtggtacttctctatttttaattgctaatgctttggatttttttcctccttaatgtagaacattgagaaacacaatagaggatgcaagtgatctagtgcagcagagaaggaaggcacctcatacttgtctttatacctggaaggagggcaaaattcgttctctgccagttactttcatggatccattgattttgtgtaagtcttcatctatactaggtgcaattagtgatggaaacctccataattaactaaagaggggccattttattttcacagatccaacttcggtgtacgttagacacactattacagcagatacaccagaaaattcgtgcagggagtcagtaaaatcaagaaggcgactttcgttggagctttctgaatccaacaatatctgcgatgatgctaaaaatgtagaaggtgaaagcattccagatgaaccaagaaagagaaaattggatgaattgacagatagtgtacaggcaactgttgggtgttacactgaaagtgcacagtatcacaatgatgaagactatagatttaatgacgatacagtcaaagaaaaggatttctcaattggaggacatgaatctcattcaacagaactgcaagaaagattgaatgcattgaaaagtaaaaatccacagctcgacgaggcattggatgctgatatagatagtatggaagaggtaacactgtctacattaaactcttttataaaattcttttgaaaatatctggttttgtgtgcaaaatgccatgcaaacaatgcatttgttaatgtatattttatgcaaatgaatcatatgaaaattgcatctggcaggatactcatatggatgaacaacatgctacagatgaacgcactctctcacaccctatactagtttttatttttcctgtacattagatctttgtttttgccaagttctactgacattgttattttgcacaggtttactgcgttcaacaagaacaaggtggctaatgaacttgtcctgt

SEQ ID NO: 8766 - DNA, 79489 bp, Oryza sativa
ggaagccttggggtaattgatcaccacacagtgctgaataagttgagattcagaagactattctttacactaaaaccttgcatagatggttatcgagaaggttgcaggccatatgtagcaatagatagcacttttttgaccggcaagttcaaggacagctatcaactgcttgtgctgttgatgggcatactggatgtacccagtagcctttggagtgatggactcacagaccaatgaaaactacaaatggttcatggaaagactttagggatgctattgctaatacagaaggtctcacaatttgtacagatgcaaggaaaggagtacattctgcagtacataacatttttcgtgatgtagaacatagagaatgcatgctacatttggtgaataatttcaaaaagaggtttcatggaaaggtgtttgatgataacctctggcctgcagcatactcatataatccatattttttccagaagcacattgagaaaatggatgaagcaaagccagaggctatggcttatttaaggaaaaaccatgttaggctttggactagaagccaattctctgggcaatgcaaggttgattatgttacaaataatttggctgaatgtttcaatagctggatcaggccacataaaggattgcacttggtggatttcatggacaagattaggcacaagttaatggtgaagtggaacaggagaagatcaatttcaaaaaagctagaagggaatatactaccacacattatgaatgaattgaatgaaaagagcaggggtttgaaccatgaggttacaagaagtgatgatgcattagcagaggtggagtgcaagggaggaagtggccacaggttagtttttttttatgttcattgcaacttaattgccaagtttgtgcacttcctaagtataccatgtttgttcttttgttctggtggtaggtttgttgtcaatcttacagataggacatgtagctgtagagagtggcaggtttcaggcaaaccatgcacacatgctatagcttttatcacatccatccgaggctgcaaacttgagaattttgtagatgagtgctactctgttagtaggttccaaatggcttattcaaaagtaatccctcctttggttgacaaatctcaatggcccaatcctacccatgacttcttgcatccaccggttctaaaaaggtagcaggcaggccaaaaaggacaagatatagaggttgtagtgaaaagggcaacccaggaggagttaacaagggcaagcattagtgcccgttgtgtaagggttatggtcatcattggcatagttgcagagagggtgatcctgctgattaccaagcaatgctagctgaaaggtaacctttttaattgataataatgtgatatattttatgtttaccctcattgtaaattctgttatacaacctactactcgtttgcaggggacctccaaaaaaaaggcaaaagtctagtaatgcacatgctgaaactagcattgtacatgttcctagtgcatcttctgctcaaaatgcaatattgtctgcaacaatgacatatccaccaagcaaaagttgtcaaaccgggaaaaaaggacaggacctcagtaatacttcatcagggtcagttaggtatattagttccatctaccattgcaataatgacttcctcatatgcttacattttcctttaccatttatgtcaatgtcagatcaaggtcagtgacaggatccaaccaacctgaacctttgagtgtgttgatgccactagcagcgcctggagagaactctaaggccaaggctaagacagaccaaaactaaagccaagatagctcctaggaagaatacaaaggatagcgctgctactacgcctttggcacaagtcaaacaaaaaggcaacttcattcctgtgtctcctgatagtccagccatgagtacaaggagcaaaaagaaatctctaaattttaattagggatcctttttaattaacatgtgctcacatattttggtactgtgatctctggttgcacggtacttatgtagtactccagttaatctagcgttttggtactatggtgctgatgcattttagtcatgtatatggtgatggtactgtatgtggtgagatggcacttctatggcactgcaagacatgcatatgtgatggtactgtatgtggcacttaatgatagtgatgcattttggggttgtatgcaaatctgtgatgagagatgatgcactgtatgtgctgatttcaacatttatgtcatgaccatgttatttcagctgtatgtggcttttggtggaaaattggatttttcatgcttttgttacaaattcatatgtgatgatacattggtactgtacgtggaaaatcggatttttcatgcttttgttggaaattcatatgtgatggtactgaatgtggtgatgcaaaaattcatttttcagatccaacagctatattagcactaaaatgtacatacatatacatatcaaccaactttactttgtcatgcaaatatcttgccaaatttcacctaattgttataactggttctatagcaactagtaagggcaaatatgtcattctaacatcctattaacagtgatgagccggaggggtgacggcagtggcatatgagggtggacaatttcaaactagtggcatagagggaaaaagccaattttcagtggcatataagggacaaggctaatttggcatgcatatagagaattctccctaggatatataggtggccgcacgttggcgtcggatggttggccgcgggcgcgctgggcgtcgtcctcctgtctgtcccagtgtccccctctcgcgctcgccaacttgggcagttgggcgttgtttatcgcgaggcttccgtaccaggtgggcataaatctatacgccaacttggagcggccggtagaccacggctagctaggggggatgcatggagactccaaaagcgcggccaagttgcagttgcttgcttcccttcatctctgtccgtgcttggatggcaatgcctgcctgcctgcctgagctggctgcctcgtccactcgtacagtcacagtcatcgtcggaagctagccggtgatctctcaaatagtactagaagttgtacgccgtcgtagcaagtgcggactgcatgtggccgtggtgcggccgggagcagcgctcgtgcgtgacatgaattctgggcccttctgcttttggatgtgcagtatgcatgggggcgattataagcgcatcaagtgcactgtgatagtactgtagtacgactgtacgagagacccgactcctgaggattcttggccaaaactggtactaccacctgaatgcgcagtagcttgtttggaagctgaccgaggaaagagagggaaaaatcacgcgcctgtagttctgaaagttttgggaaagagatagattgaacagaagagagtacacaaacggagagttagcgtaatacacgagaactagcatacaaagtacatacggtctcgagagacgattgaacagaatttcccgtcatgcatgtacggacttggagtgtatatagctaatgctaaacttgccacttgaccagcttgtaccacaggagtacgtacatgctagtgtgctactgtcatcacatcggtcctagatgctcgctggtttgtgattctataaaccgtatctagctcaaacaaagccggccgctaaacacgcacgcgcgtatgtttaattaactagacagagtcacaagacaaggacagaagaccacgggttgcaagtaggagaagacctacttaaacaactcttccattattacaagcttataaatacgataacaacaggtgacgtacaactgagcaactgtcgatccaaatgcaacgaaccctgtgcgcattcgaggcaccgatcgatctcatcccctataacgcccggacccacccgggccccgatggctgatcgattaaccactagctggatcacccaaaccgtcggcgcggttgtgtatagtccgagcagcgcggcgccggtgtggtggtggtggtggtggccgactggccgcggtttcccaaatgcgcagcgcgcgaggggtcccgcacgcctcccgcgtccccgcatgaccgagcgcgcgcgcgcgtcatcgggacgagagagagacgacgtcgtcgtcgtcgcgcgcgcgggccagcgccccagccagttgccgcttacagtaagaggggggagtgtatagtacgatccacttgtcgtccacgtcgtccgcaccgcaccccatctcgctacccatcccccacccgcgcgcgcgcgcacggcgcacggcctccacacgccccggcccccgagaccgtatcacgagcgcgcgcgggcgtccagcttttctcccacgattccacgaagccaccaccaatatttccggtcgtccgatcccccctacccctctccgctgatcagtcgctcgctcgctcgctggctgactgcgcccgcgcccgctttgctgcgctcccccggcacgcgacgacgaaaagaccggcctcaaaagcgacaccacgcagcagacgcagcgcccccgcgcggagaagctagctaggtactcctgtctggttagctagctagctatagctagaagcctagcacatgaacccggcgccgtcgagggcgccgcagcggcagcagcgcggaggggagatgtcggcgcgctacggcggcgggctgcagttcttcgctgacgccccgccggcgggggtggaggggggcgccgcgaccgcgcggacgttcttcccggtgccgggcgggggaggggagcagcagccgccggagcgcgcgatgaggcagcagcactacggcggcggcgggagtggtgcggccgagatctcgctggggcacggccacggccacggcggcaagcaccatttccatcagttcggcgtcgaggcgaaggacggtggcggcggcggcgaccagtcggggtttctgacgcggcacaacagctcgcctcccgggttcttctcgagccccgtcatggacaacggttactgcactctctgctcacttaattacgtgtaccttcgatttgccgtcttgattcgtctcttccattactatcgagtttggaatgttccaattaaccaccgttcttctttctcttgactcattggagtattccaatttatttctctgtctttatttcttttttttcttcttttactgcgattttttttcttatggtgcgatgtttagtcaagtgtgatcttggttattttttctctcattttcttgatatttgagtgcttttgatgaatgtttctgggtctactgcacaggttacacgtacatcagcagctgtgcaatgtagtcatccaatacatttgcaacagcgccttcatttttctgttatatttacgccgcatgcatgttcattagcagccgcccaccgattagtgcaatattctttcgggggcagcaatattttactccattttatgttgaaaaaaaaggctgtatgatcgttttagtaagggtttagactacaaaacggatgttcgatgctaccaggtttgataaattaaaataaagttcactctatatatctgaaggtagaccggcgccataccctttttatttgccgcaggattttttttcgaggggaaatttgccgcaggcttaatttcgttactgtcgctctgtcgttcatctttgtgttcgttttcaaaataaactcaagtttaccatgaataaaatacttatttgaaaccccaagttccttttcggatcaaaataaattacctacctatgcaaagtgaaatatgatcgataaatcttttgtttgtgatgggttacttttgcaacaaaatcacaatatcgtaagcaaattacttcagcaaaaaatatgcaaatactatttttgtgtgtccggtctacaaacacacatgaagatatattgatatataatcaaagtttgtatataagtataggtgactttgtgtaccctaagaatttcactcattgaccaatattgagagtatagtctcctagctaatctgattctgcaatctgctgatttcaccaactatatccaaacttttgtcttcggtttgtttttgtttatatacgtgatatcttatgggttgctttcaaaccgggtggcttggaataattggatggaaaactacgggctgcacagttacggtggttttctggtgggggcaatgagaaatgggtgggtccttaggattgtataaccacatatgtacacatatgtacgcccacatgcttcttgcacatatttatttattccgaaatatttactaaactatctattttaacatgctattaatatttatttgttttgctgacagcctaacatcactaccatggacctagctactttcctcctctttggttttcaagccgttatacattgcctttacgcgtgtcctatcagccatccactagtttcagaactaacaggataagttgtccttatcttattagactctatttggtgtacgtgtagcatctacccttcactagatataaaactaataaattatacgtacaacttgtttataatgtccattatgcacccttcatatataaaactagtaaaactatgcgtacaccttgtttgaattgtgtacatctatcctatggggaaaagtgcgaagaccttttctaaatattattttttattattgtcctattgaacttcttgtccacttgtaacacatttggtctacattttaagagactatttcttctactcacctatcatttttatagcttctttcgtaataaacagcggcacttgaactaataggataacaacgtacagcctcatgtgtgaacatatacaacagtgtgttgaattatatgcaattcaagttaccttaatttccttatccttgaaaaagaacaaagtcgctttttcttagattttcccatgtctcaagttatgtctggccaagacgacggtaagctataacccgaagaaggttaatcgaattggtgccccacacgctgctatacggctgccgtgtgatgtatagactgattaaccaaggggctggacgacggttcttcgcttgatggtgtattatcgaacgcgcgtaattaagctagcttagctaggttaggcccgctaaccttacacatgaaattaagttctgtcatatcccgtctaggttcagttgatcgatctctctcgcgtgcagacatcagcgaaccaaagtagaggtgatgtcacctcctatatatacatgcgagcaccagacgacgacgatcgaggaataattcattctgggttcattctcactcgctggttgcctggctggggtgagtggaagagtgttgcacgcggcgccaaagccatcaacagtttgacatatctgtccatcgccgtgagatcgatcgtaaacggtaaacctggtctactactatactatacgatgggatccggtggcaacttggtagggatggaggtagaacaaaatagagaagggtatcactcgcttggtttactctactttatatcaagtttagactgatatgtatgcttgagtttaaattgagggggtgcacatacggtgaaaattgataaattatagatatttttttttaaccgggttcctagctaggcatccctctcctagttacctagctccacccctgcaacttggcatgttctatttaagaaactgcattttgataaaaaaaaatgtttcttgcacacttgcgaattgggagtactttgtgtgacaatggggggatatatatatatcgatcgtagattaaactacttgtgtgtgatcaccctccaccgtgcatgcgatgttcgacggcagtacgatttagctagaatgtctagcatgacacattagaatgtctttgatgaacatcacgcatgtgcaagttgattaattgcatacactataatattatattaatatggcacaatacatattacacttagaaagaactttcaattttcgtcctaatttttgccacacataactgaaaacaacaatttgcagtggaaaacgcaatgttttaacaaagacccaatcatatttctaatactattaacatcaaattgtgattatatatatatgattccgtggaaagaaaaatccataaaaaaataaaagaactgaacacaagcccagctagcaccttgaatttcaaaactaggcatgtagcctcttttactttgcaatactccatttgcataatctttggagtgatttgccaatcttcgatcgttgaatcgactatacatgacacacatgtaggcattgtgttggttcttagttgtctcaggagaaaaagggtacaatggagagagataatggaaaatatcttgtactatgtcactcagagcaagtataatagtgagctataagcttactatatacttaggtggaggaaagaggaagtaaaaaatcaagggtgttggctctcatgcaagagctaacttatcacaagctccaagataaatacattaaatatataagtgagagatagagagaagaagaaaattatagccaaacttatagttaatctactatatatattagttttaagataagctaatagtagaaagtgggctctactattattcttgctctcgggcatagccatcttaaagggttatgtagataatattgcaaagctcagagggccaggcgacaactggtttaaatgatcacacaatgcttacttcctaggaactatcaagttgggctcctttacgatgcaagttcttcatttgattggtaattaataacagatggttggcttcggatcggctagtctcttccacagccgagtgcatgccatctttgagatcaaagtgatgaaactatacaacacatacaattgtctctcgtgtcttttgcaagctgtgtgtacttcccttctcttggagatggggttgcgctggggttgcatctcagccaacgacagttcatttttcaggttggtggtgtgtaaagccatcaatgaagtttcaaaagagatgcgcaaaggactaaactcattgattattctagtagcataggagatttggaagaaccgtaacaattgtattttcaaagcttctctaaatgttttggtggtagcacgtgcagtggcaaatgacagtatttgtggtgtttagccggaaactcgagcgctctgtaagctttctttgtatgtaggtcaattaatttggacgactaatgatggctttctgggtaacgagtttatgtgagtgtggccattttaatttgttccttatgtttgtaattatttttcccttttttttatttttctcaatgaaacgaagcacaaacctcctttacttttgagaaagaaaagcttgaagtgttaaacatacttttttttttgcgggagtagtatatagagggtttttttttccattgtggaataagttgctgttgtgtttttcttacaacagtatcatcgtctacttcgaaccgtaagtgctactctctgatgaaccttgtgaaacggatttaaaacacatgcatgcatggaacaagttcatttcccagatgtgcggaccactgctgcatgtttagcatttccaaaaaaaaaaaaaaatctgcttagtcaccaactcacgatttatacatcttcttataacaatatttgtggatatagagatcggattaatgaaacatccattatctaaaaaacatcttcttatggcaataggtttctcatcgagtgctagaccagcaggatcatcactcggtgaggttcgccatggcgccatgagcagcagcagcaacaacaacaagaagatgaaggccccactgagcttcgctagcagcaggcagggctccggcggcctctcccagatatccgaggacggcatcccggacctcactgacagcatccatggcgccgctcatcatcatgggcgctccgaggagaacgtctccacccacgaccacgtcgtccgctccttctcctccggtgggttctcgatcgggtcatgggaggactccaactccatcgtgttctccacgtcgacgggcaaatcaggagcgcacggcaacgacgacatcatcgccacccttagcaactacgaatctcaggtgtatatatatatgcgttttatctttatttttcatttttcgtatttatagtttgatttattagtgtgtgtgtgtacaatgtgagggatgatttcatgtctaatttgtatatacatgcatctgcgatgcagcttgttgcgcccagggagatggctggcgtagagaaatacctgcagatgcagcacgaccaggtgccattcagagtacgggccaagcgtggatgcgcgacgcacccacggagcatcgcagagagggtatgtatagacgacattttcccttgctaattctacgccccatcatagtaccaactttttatgtacgtacgtagcgggtcgaactatatactgtaatgtcaactagcatggaagcgtatcctagatacatagacctttaacgtgtatagtatgcaccgtacatcaaattaacaaatatcataaaaaaattagaaaaaaaatcaatatacatgtatttttagtattatatttacacataaagtcatgtcttcaaattcattacatagatagagcaacaaaaatgataaaattctgatatacttattgtcttaaaactataaaaaaattgttacacctatgatataacaaatttgaggttaagattttacacaaaggtgtagcatttttgaaattataatatgtattttttaaagaattttttgtgatatttgtttgttggtgtgtatagaatttgcatgcgaaacttgtgtgcacatgatatgttaccaaataagaatattgataacctttcaagatgttcttcatatgcatgcatctagccagtagcattcttgttgttcctccttggatcgtgcatgccagattaatcttcaggcatatgatcgatcgatgatgacaggagagaagaacgaggatcagcgagaagctcaggaagttgcaggccctggtgcccaacatggacaaggtgtgtgccatacgtgtgttcttttcatgtatataccagtccttgtctgaactttttcgtcagacaacaatcttcaggttattgagttggagttcaattgatgatctttctaatttgttcttcttacaaattaatgtggcagcaaacgagtacttcagacatgctggacttagcagttgatcacatcaagggactgcagagccagctgcaggtataatgacgtatgcgtgttactaatttgcatgttcagaatggcaaaactgaattgaagccactgctgcctaaagaagcctgataggtcgatgtaccagtccagttacaaagacccccgttagcatcagaatatatatagctagatggaataccaatatattgcactgtaaaacagcagctcagtatgagtaatcaagtatccctccatttcaaaataaatcaacttctattacaaacatagacatagctaaaagttgatttattttgggacggatatgagggagtaacatatatatatatatatatatatatatatataaaagcacaacgcaacccggaaacaacactgagtttttccctgtgtgcagactctgaaggaagacaaggagaaatgcacctgcagctgcaagcaagcatcaaggaacagaccagccgactaaaatgggatgtgaagcaaattgcagtgctggctagtttgatgacatttctccttggtcctcaaaacatgtttgcctggcgacaggaaattaaaggtatagcaggcagcatatagcgtgacaagagcaaagtaatggaggtcatcagtctcttccaaacgaaaggtcgaagtcgtctgatcaaacctttaccagtgaatcgatcagtccagtcttttttcttttgtcagtgtgaccaaccccttttgttgagctgtaaaattaattgaaactagactagaattgttccttcctttaacaaggagctctgctgctctggatgttaggcttctagctgtcctgttgctgtggtaaatagtgattggttcacccagcggttagcaaataatctggttgctggtttcagggtattctccggccaacattagacaagattcagtgatgtgttatgattcatacagatcattagacattatccagaaaatttacagtgttggtccggggtagcaacatgcatgggtccttggaaaggacgatttaccactctggctggccgttctgtgctggtccagtcggttctcttctccattccagtccatgaatctatggcgatcggcctcccagtctgggttattaaggccattgacaataagcgtcgcgccttcctgtggacaggtacggactcagcccatggtgggcagtgtcaggtgttttggacgaatgtttgtcgctccaaaaccggtggtgagttggggatcactgacctcaggttggcagggtttgccctacgtgttcgctggctttggcttcagcgctcagggcacccctactaggatggcctaaaggccccagtctagcagaccgtctccgacatgttcgcggcatccactttctttgtgccgggaaatggtgagtctatgctcttctcatctgaccaatggatcgacggccgctcggtggcgtccttggctccagatctcctcttcgtcgttccccaacgtttttgaggttcacgcacagttgcttctgccctagcgaacaactcctgggtctctgatattcgaggtgccctcactatcccagtcatctcccattttctccttatttgggatgcggtgcttcacgtacaactctcgccaggtgtcgaggattgtctcatttggcgctggacagctgaccagcgctactctgcgcgttcggcataccaggcattcttctatggccagcattcctttgcctgtgctgatcttttttggcatgcaaagggtcctgccaaatgcaggttctttctttggtttgcattccagcggcgctgctggacggctgatctcatccagaagcgtggcatcgatagtcacttgggctgccccttttgcgttcaggatcttgacacggcgaaccacatcctcttcgactgcatgttcgctcggtaggtctggcttcgagtattgtcgcctcctggctgggctgccctctctccccccgtgacagctggttccaagactggtggtcgtccttcagggcctgcttacctgagcacctctacgacagcttcgactccctagtgttcctggtctcttggcgtctgtggaaggagcggaattctagggttttcgactccgctctctcttcgatctcagtggttctagagttcatccattcggaggggcatatgtggtctttagctggcgtcgtcgcttttggggatttgttgggagtctagtgtggcttggccccttcccgctgcttggagtctgttttcagccaccatagtttctctaagcttcagtttttttttcttttgctttttcttcctttccctagcattagccggtctggctgattgcgtagagtaactagaactctttttcttctaatatattgacgtgcaatacttttgcgtgttcacgaaaaaaaactgaaatttgccggaacataacatagcgctattggagtcccgaaattgctttctctttgaatttaatccagaacgtagcgtaaattgattcagaacgcgcatgtattgcagtcccaaaaaatgttcaaattttttgttcaacatacttccgtacacatgtatggagatcccaaaattggtatacattttttgaaaataaacttgtattgctgttccaaaattgttcagaatcccaaaaaaaaaatgttgcccaaaattgtacagacgtatgaaggtcccaaaattgtccacattttattttaaagaaataaacttgtattggagtcccattttttgacaataaacttgtattagaggcccaaaattattcaaagatacacttctttttgaaaaaaaatgaataaacttgtattggagtccaaaaaattcattattgaaatataaacttgtgttgggtcccaatattgttcaaaaatccagtttttttccagacttgtattggactgcagaaattattaaaagaaactaaacttctattggggctacgaaatatttcaaaaataaaatccagtttttgataaaatcagaaaaataaattgaaatagctcaaaaccctacttttcaaacttgtattggacttcaaaaaatattttagaaaacaaaatttctattggagtaatgaaattgttcgaatattgcagtttttgagagaaaatcagaaaaataaattgaaatagttcaaaaccctacttttcaaacttgtattattgttaaaaaaatgcagattttgagattttttttaaaaaaattaaatattgctggctgtggggttcgaacccacgcgcacttcagtgcagaagatcttaagtcttcccccttaaccactcgggcaaaccagctgatacgttaattttcgcagcattacggtatttataatcaggccacaaactaacagacaccgtaatcgccagcaaaacctgcaccccgtttctgtactcagccgaagcgcagccatatgtctcacaggaaaacaccatccgtgctctgctccattgctggcccgatcaccccagccagagctcgatctggcaaagaacgaaccaacatttgagccacgcgcgcgcgcggattcactcgccgccctaaatttgcccgacccgcgttcgacgacgacgaggacgacgagaatagtagcgccacgccaaccgccaagcctatgctttggcatggccatacgctattattcggcggctctggacaaattaagccaccgtttttcctcttctccccgtgttatctccacctcctcccgcccccctcgtgcctctcccaaaacaaatcaatttccttcctcccgaccgagcaagggggcgaaaggacgagctacggaccgagccatggaggaattcaaggctcgctccttcgtcgccttgtctccctcgggtacgagtacggacgaacgatctcccgccatatatgattattcctcagcttattcagtagtaacattatggttaatctctgttcttgagttagagtctttttaggcgaacggtgcaaatttgttttctacgttgacattttagctagctgatgttgctctgcctaatttcttttccttccgactctctgcgtctgccttctttgacaccggtggccttcatgtagtatttgaattttttgtgcgagattttatattacatatgtccaaacattagtgttgattacaccatgctacgcaaaagaaagccaggccaccataatagcagcaaaacagaattctacagagtatgcagctacagcccttttctaaaacatattctcatttggtttgcgtcagcataagcgatactgtttatatcttccaattcaactagttttgttcaagcagttcacagtaggttagtattcaatttatttcagtttacacgttgccagcatgtttagcatcagcaattcagcatgaggccttgaacggccagtggatctgggcttggatcgatatcggccgcaatgccgcgttgccaccgggaagcacgcagcccaacctgatgattttttttttgactaaatcaccggcaggggggggagtccccacctgaatatattaagccaaatgagcttacacagggcaggcttcacctatagaaacgcagaagccctggaggataggagaacagaatacacggggaatacaaagaggagagaacagagaaaggaaaacctcctaaaatataacaattgacaaacgacatctacaaaattacccggccaaaaccaaaacctaaagctaacaccctagcttatcaacatccatttcctcacgcagccacaagcatgccggaatagaagaaaggccaaagaaaggttgtagaagtcctaggccacccgcatgaagtcatcaagaagctaacttgatcttattgttgtttggatcaaagcccgccgacgccctctgggggaaggaagccccagaagagggagggcactgaaagatgtggccgaaggccacccacaatgagttttcttcaatcaaactttatcgagttgcttgttagatcaacacactccaacgtccttcaagggaaggaagcctaaaaggagggagaaacgctgaaaggtcttggacggtctcaaggaagggggtgaagatgagcaggagttagacaaaaggaaaatggctaagggggggaattcactgatgaaagatcatcaaccgcaacctcagcggagggcacagagcagaggccagccaaggtgctagaggagcacaaatcccagaacaaacatctggaccaattgtcaagagcaagctgaaaatgagaagattttgaacggggaataacaccagcaaaccaaagaacaatggaataggcccaggtttggagcggggagggaagaaggcacaatatcgagggcactagggagaaggggaagaggtttgttgcaaccaaggggacgtgtcggcagccaaaacgcgcgtaggaggacgtccgggcttccgaagccagcccctccacgcacaaccccggccggcggcggctggagggtagagctacgtcgccggccctcgtagctccacgtgtgccgtcccagacccaacgctgcacgcatggacaacctgtggggggggggacggggacaacgggggaaggagcccgccatcgctaggcgccgccagctgggggcaccgggcccagcccacaccgccggcaccagggggaggggggcgcgacgatgaggatgctgagccgaggccctccgtggtcacatggagctgcaacggcgagggtgccgcaccgcggagagaacccgtcgccgtcgccaagggtccgacgaggtccagccgcgaggacagcggatccaaccgccgccagccggaagcgccgggctcggcctccaccgcctgccaaatccctccgccgccaacctgatgatgggttgataaatctccaaagcgatcccttttaggactccttgccagtggtagcatttccaaattatgcattttggtccctatttaacgccgtgtttaattccaaaataattcttcaaactttcaacttttccatcacattaaaacattcctacacacaaactttcaacttttctgtcacatcgttccaatttcaactaaacttccaatttttgtgtgaactaaacatttaggactgctagcaatgttgttagcggtctgaaaatttccatctaagtccctacgcctttgaattgtatcgcccagcccccactctctcccctctgccaatgccaattcactcgctgtctctagaggcagcccacactgcacccatgccccttccgttgttctcctccactggaatctaggcccccaaacggcttcgccatggcttattgtctcagcgaccgcgcgaaagttgggggtttgggcagttggttgtttgcgattttcactgttcgccgtccatggtgccatggcaatggcagcccgccaccttagcttgaggatggcatcacttggggcgttgatcacggtacgtatgtttgccctccgttggatctggtacaaccaaacaccgctcgacgtccctcaccaccaaaagtcagtgcaaatgagcccttctagtttttgaattcacgaattgataagtatcactatatttggtcttggatttgtggataagtatcaagtcagggatgtccggcgatgaacttactaacaacatcctgtaaaccaatacaaggtatatcatcctgtaaacaatataaccaagtctcttagctatgtaaaggaaaaaatgttggttcagttgaatttcatggcatactttttttctttatttttttgtgactttacatgtcctttaacatgtggtttgattatgccatgccatgcagaataatccctgcggtcgcaacattagtaagaaaataatgtgcacaaaattcattcttgatcaattgatttactatagctatgttttccagggggaaactagttgtcctaacgtatgtttagttgttcgaatgataaaatttgcacttttagttattattccatcttcactttactatgtgttggccccctttttgggttaaggttatcaatcacatctagaggttaaaactctatctattggctccatttgctccttttctagatgtgccaaactgccaataagagcagtgcatggacttttggttcttcatttactgttggggtgtgtgttttgaattgcatgtcaaggtttcatcatttgatttgtgcttcgttgctaatatgctttatttctggctatatgatcaatgtaatttattatataaaggattgtaatttttttatttattaaatgatctttattttttttatagtgataagatatgtaacttatgcactttgcatgtttcaggtgaaatttcatcaatataggaaaatagattataccatcagtttttgcacacggtgagaaatttaaaccctttatttctaatgggggttacttcagttcatgcatgaacacataatgcactatcttgattccgcagcacatacttgaagttgttcatcttgggttgaaagaaaaaggtcaaaccgattgtattaattttgcagcaagccaacaaactaattgactggtggctatgctaatccttagcttaattgaggttttttagtctggttttggttggttccggcggaaccgtggatgatcgcccttgccacatacttgtgccgaaactattctcttctaggactaataacttcttcattctatgacttctcttatttctcagcggatgaaatttgactaggagaggcaccatggagaaagtcgaggtcgatgggaacttcattggtacgggtaattggaaggtaattcacctgacctcatttcactaaaagctaattgttctacaatgttaatatgattaattatgttgatctgagatcattttataatgtagggaactttcagaacaatactattgagtttttgtgatacttgtgtacatattatatagtcaccctttaaaagcaaaggcaaatgcctcctgtaaaagtataaatatcacaatactaccactagttcaacaaaaagttagaagaaatcataacatagttgcatcatatatatatgataattttttatatatgaagatatttgatctcataaagttaccaattattagttggtaaattgtgataaataatagatctcatccaccttctttctttctttttaattttctttagctccgctgtttgatatcataattttgccccccccccccctctttggggaggaatgatttctatttattaataatgtgagtattaggatggtagattaagctggtttgttcctacctctttgtgcagctgcatggagcactatgtaagcaacttcacaaagtagttcttgaagtattggatgttattcctgtccttgaagctacaaggcctggaaacagttctggacttcttgcattgagttccttgcgcatagctgttgagaaggccaagaatctacttcagtattgctcagagtgcagcaagctatacttggtatgcagttttcataagtgcaaacatatttatgtttcctagttttgagaaataaaaatgtgtgaaatatggatacatgtctttgtgctactgtatataattgatggtacttggatatgtttcatcgtatatggatatcaagtactgccaaatttatttgttattatagaaatacaaaatttcatacttacacatcctaactgcatgcaggcctttacagcagaaaatgtcctggcaaaatttgagaaagcaagatatgcgcttctggaaagtcttcaccaattggaagaaacacttccagaagcagccagttctcaggttgccactggttatacaagaatttgtccttgccggctctgtcttaaatagatacctataaaatattgcggaaggatccttctttatcagtgttatatagtttactaaattaatgaatgagtttgacgtattgcagctttcaccctaattgtaatcgcatgatttaatttaaccttttcctctaattcacacttatttgggaaattttcagatactagatatcgcaaaagatctggagaaagcagtttttaccttggatctgattgaaaagcaagctggtgtggatgtgaatcaattagttcagaatgaggcaaaatccaatggctttcttcatgacaatgaacttgaatttttccgacaaactgcatttcgggtcggcgttgcgtcatcggcaacagctcttaccgagagaagagcacttagaaggcttcttgagagggctcatgcagaggaagacataaagaaagaatcagttgcatcttatctactgcacctaatgaggaaatactcaagcatttttaggagcgaaacgacggatttcaccaacacatccatgtgctcaagcccttcttgctcttcccgttcattgtccagctcgattgatctccatggaaatggtcatgttattgaaaagtcgatatctagggttggctccttcaatctcaggcagatcaaaggcttatcaggtagcatgccattgccacctgaggaactaaggtgcccgatctccttgcaactcatgcatgaccctgttattatcgcatctggtcagacatatgagcgggcttgcattgagaaatggtttagcagcggcaacacaacctgcccaaagactcggaatgaattatcccagctctccatgacgcccaactattgcatcaagggtttgatagcttcatggtgcgagcagaacggggttctagttccatcggcgccgcctgattctcccaagctcaagtacctgaggatatcatccttgaatagtagcaaatgtcttgtgaccaatggcgttagcacggtcttgtttgaagacacatgcgcggaggatgatattaaggatggtggtaaagttgcttcggaggagtgcactcggcagaactccggagaggctccatctgagatatgtgaagttgatcaggcctcaccagaaaaacatcctcatgagaactccgagaaggtagcagaggcgacatgtgagctttggctgcgtgtgctgagcaaggacgacgatgagtgtgtcgacgagcaacgtgaggtgatcgagcagattagattccttttgaaggatgacaacgagcttaggaaatacgcgggtgctaatggtattaccgagctactcatccactttgtgaagaaggcagtctgcagagatgatgttcagtgccaggtggttggaacaatggctctgttcaaccttgctgtcagcaatgataggtaaaatgtcacgtatgctttgttccttctaacgatgttgttacaatagtttattacacgtacaacttgcagtaacactctataggtagatgatttaattgatcttagttgccatcatctcacattttccacctctgcatttgattttccaggaacaagaaacaacttctctcaggtggagtcctccccttgatggagcagatgatacagaagcctgaaacctacgaggctgccgtcgcaatgtacctgaacatttcctgcctcgccgaggcgcaggcgatcatcgggcagagcgaggccgcgcctctcctgatcaagggcctgcaaggagacggcttccggatgagcaagacctgctgcctcgacgctctcctgacgctgtacaacctgtcgctgcaatcgtcaaacatcccgaccctcatctcctccggcatcatgcagagcctccacgacgtcctgacgccgtcctccccgacgacggagaaggccctggccgtgctgatcaacttggcgctgacccgcgccggcaagaaggagatcatggccgactcggacatggtgggcgccatcgtcgtcatcctcgagaacggggaccccgccgagaaggagaaggccgtgtcgtgcctgtggatcatctgcagcggcgatgacggcggcagccagatggtgctccaggaaggcgtgatcccggcgctggtgtccctgacggccaacggcacgggcaagacgaaggataaggcgcagaggctgctcctgctgttccgcgggaagcggcagcgggaggtcgagcagctgcagccaagggtgcagctgcacgaggtggtgagccaggcaaccgcgcagcacgagcagcagcagcagcagcaacaagaagaaagcagcgagccaggcagcgacaagatgtcgcggctgcgcaattcaaagtcgaagttgagaaggttcacgagggccctggctaggttgctcaagaaatggggcatccgctgatctgatctactacagaggaaagaaccacgtcggctagtgtgaactttggcaaatgcaatatcaatgttatcttcccgtgtgggttgactcactcgttttcgtctccttcgcattgccgcgatatccatactcgtctcacttatgcgggcattgaccgtctctctgtacctattaaccttgtgctaaggcaaaattagtaaaaagggtttaagcttattgtgttttgccaaaatgtaagccaagatgtgttaacaaggattaagtgcgatcatcaaagtgtgtaacaaggattaattcaggtcataaatctaattatataatacgtaacccaaattaaagatttttaagaaaacccaaattaaagatttttaagaaaagaataggaaacccattttattgaggtcgttttagcctaattctatttggaacatacttcatctgtcaaaaaaaaaaaaccaaatccttactaaacatagggtatgttcaaatacataatcatgatttctttttttttcggatttgctatacaactggcgacagttaacagggggtgaaaactttcaaattttaagctgtctaatatgctttgagatttgtgctagtgagggaaaacagcttaaaaaattcaggggtgaaaactttcaaattttaagctgtctaatatgctttgagatttgtgctagtgagggaaaacggcttaaaaaattcacacgcgtgcagtagggatcaaacccaacacctccaacttggaggcttgttcacctaaccagttctcccatcgggctattttgagttacacttgagttacatattagttatatagtagttatatagtagttacaatgtaattacatagtagtcatatttgaaagtttttcatcccaaaaactgtcgacagttgtatagctactcccgtttttttcgagacgggagtagtcgcgtacgtgtgcgttcgttccaagcacactttctgtttttttaaagaaaaatctttggaaatgttgctttaaaaatattatattaatctattttttaaattttaaataattaatatttaactaataaattataagctaatgacttatctcgttttttatatactacctccgttttttaatagatgacgccattgactttttctcacatgtttgaccattcgtcttattcaaaaattttatgcaaatgtataagatataaatcacacttaaagtactataagtgataaaacaactcataacaaaataaattataattatgtaaatttttcgaataagacgaatggtcaaacatgtgagaaaaagtcaacggcgtcatctattaaaaaccggagggagtatttaatcttctctctcggacaaacagtgcaccctggtatttgagcggaaattcgcatgaaccaaattgtgggccgtatgcacgccaagtctggctgaccagttgggccttggcccgtggagtacaatactaaaaaaaaaggtcaaaactgcgtgcgaagcctgtgggttttgacctcaagcctcctcggcgactagtccacgcctcccactcccagtccacttctcttccttccttccttccccaccggctccgatccgaaggacgaaccccgcacaagacaacaagtaaatccccatccatagctatccaagagccccaaatcagatgctctctcctgccaccaccttctcctcctcctcctcctcctcgtcgccgtcgcgcgcccacgctcgcgctcccacccgcttcgcggtcgcagcatccgcgcgcgccgcacggttccgccccgcgcgcgccatggccgcctccgacgacccccgcggcgggaggtccgtcgccgtcgtcggcgccggcgtcaggtgggtggggagccgcgcgcgctctccgtgggttcagttctgccctaggtttggggtgccgtgtgcgtgtgagtggggaggttgttttttttgatgattgatgaaatggttgcctctctgcagtgggctcgcggcggcgtacaggctgaggaagcgcggcgtgcaggtgacggtgttcgaggcggccgacagggcgggtgggaagatacggaccaactccgagggcgggttcatctgggacgaaggggccaacaccatggtgagcgcgctttggtgtgcctcgctgcttctgtttgatcacaatctcgggctgtgttggtctgcattgctgcaaatgctgcttctgtatgttttggattgtggcgcactggcgctgctgcggctatttgagggctggagcacactagcgagtagtgctccttggtgcgcaggctgaggaaacttgtgtttgtgaacgaaatgcaagctgctcactaatgcagacagttgttcctgcaaatggagaagtgttttcttctgcattcgtatcccacaacagacgtgaaccctttctgctatgagcatcattgaacaccgttatgtaacttatcatagcctgattcgatttcattcaccatgatctataactattatacttaccatattagttactttgtactactcttagtaaaataaataaattattttaatactccactgacaaaataggttaagattgtttcattgcttgggcacatgtgcaatactagtcgcattttttttacctgcgtgcaaatcttatcatgcctgcttgattcaatttgccgttctctctgtaatttaattattttgcctccagacagagagtgaattggaggcaagcaggcttattgacgatcttggcctacaaggcaaacagcagtatgtatgtgctaatgttatctgtgatggttaactgctttgaatgtcttctgtttcataatttacactgatatgtttaatatttcgatatcctttagcctaactcacaacacaagcgttacattgtcaaagatggagcaccaacactggtaaatagacttttcatgatatgatgcattttgttttgttcttcctatagtatgcctcacttttgaatatatttttttgtcacataagattccctcagatcccattgcgctcatgaaaagcactgttctttctacaaaatcaaaggtatgtaagttattgagtgctaattgctacaacatatcatgacctcctgacctatttgcaacaagttgcttgttgtttccacttgtcactgatggattaaaattcactagtgtagaaacaatcatattaaactgatcaccgtgacttgatttacttgttttcagttcactattacaaatttgtacatttcctgatctttcgtgttcaagctgtgtgatcgactgattgcaaccgtcatattatattactgtattgagtttagtaaaacatggtcttatctttgcagctcaagctatttctggaaccatttctctatgagaaatctagcagaaggacctcgggaaaagtgtctgatgaacatttaagtgagaggtgagccttcatactgatgttattttgagttgttgtaaacttgaaccactgataatatagttatatgtttttttcctgtgttcttccttcattctcatgcccttgtgaaatacaaatatatacttcatatcacacactccctttggtcatttttcatgtcaaacttttaaaactttgtacataaaatcagttcaatatttagattgaacgcatgagaaagtattttcataatattatgattttaccatttttttcatatacgttgcaacagaatttagtggtcaaagctacactttgaagaccttattgatgtcaaaaacagcatgttttctgaccagagagaatacatttgcagtgtgatttttctgtgtatatgtagagataatcaggtttctcttttgcagtgttgcaagtttctttgaacgccactttggaaaagaggcaagttcatttttaatgaagaaatttatggattgttaagtgaatacaatcaacactttgcaacttacatgcccattataatcagtagagggtaagaatttataactttattacaggttgttgattatcttattgatccatttgtggctggaacaagcggaggagatcctgagtcattatcagtaagttattataacatgtctcactatttgcattttccatatcagcacctttgcatttctacagtaaattgtagtcataattatttttatgtaaattgtgcgtataaacaacatatgtgcttgactttgtgatgtgttcttggggatgataactgatacggctagaacttttgggggctaatctccttgagccgtatcagtaagtcataacaattctcattcataatgatcaaaacatatcaccttcttgtgtagaactgttctggttttgagtaatattttcttctgtgcagattcgtcatgcatttccagcattatggaatttggagaataagtaagtttgtagtagtttgtttggagaataagtaagtttgtagtttgtgcattgatgttcattcaagatttaccttatcaataattcacttgtccacgtccatatgctcgtgctatatcctgtccattcaaatgtcaacaccgccatgtgaatttactgcatagtgcattttaatgatttcatttatccttgttgcttgcatctcttttttgggctcctgctgttagcttgtttttggttcctgctgttacctatttcttttctatcattttttcattggacagatggtgctctcagtccttactgcttattatttgttaacctgatatgcacctacttgaagttaatgttatgatttttagtattttatagtcatggtatcattaatacttatttttggcaatcgaaattaaaaaaacatgatgtcaaaataaaaaatcatggcagttgaatgcagtgggtatatgtatcaagaatttaagatcttgaacataagtccaattgctatatgttcaattcgttggagcataacatgatctaatttgtaagttaaatttatctgataaacgatggaaggaaattctggtaccactcatgcaactatacaagcttcaaaggcttcttacatgtggaccattggacctagaatagaatctaaatttattcataagtatataattttttttccttcatgggccatgatagttaactatatgagcttgtagagtcaaaataggcataattgcttctttgggtttccacttaatttaccctacaacacttctattgcaataaatatggtcaacaacatttctttacggtccgtttggttggagggagtttttaggagggattgggagtttagagggatggagctattaactgttttgtttggttgggagagatgggaattttggtgggatggagatggggaattgaggaaggaactccctccttttcaatacctgggtagggggtggtaattgggagggaattcctcctttactttgcctaaacaaatctcagccatccgttttcattaatgacctaatctccaactaaacttcctgtcaatttccaccacctctgccaaacaagatattgggattaaaaatcaaattcccatcttaatctcaccatcaattccctcgtgtaaactcccaatccccttccctcaagttgccaaacaagccattagtgcccagttatgttctttggtcatcttcttcataatttgttgctccatgcactttcaatgctcacaggtatggctctgtcattgctggtgccatcttgtccaaactatccactaagggtgattcagtgaagacaggaggtgcttcgccagggaaaggaaggaataaacgtgtgtcattttcatttcatggtggaatgcaggtactccacagatgtcctgtagtttcttttgtcagtgtcaaagatatcaaagacagtgataaaccctgaactttagtttgagcaattctacatgccactaaaaaatgccgaattcatatgttgtgaattgaagacctgttattttcctgcaactaggacatatgtttagtcggtgaaacttcattgctgctttaagaagtcttacaggccagagaaaactgtcttgttttttttttttttgatttgatgtcctgctttatatttatgatccagccaagcttatccatccatctgcaccctgatcctgccataatcattttttttatcagcctgacatgagcttattatgttgcataagttaggttgaagctagatcgaacaaaaaactcaaagctactgataagtacaggatatgcaacagaagtatcacacgagccaaatctgctataagaataaaacataccaagagccttagacaccactaaatagtgtgaatggtagtgatagcgaataatctcagaagatgacattttgggaaatattatcgtgtagtatactttattaattgggagttgcgatacttgccctgcacgctaaacatgctgaaaagtttcacagttatactacataacatctgggtgtgtaaaggttttatgttgttcattgcttttcagtcactaatagatgcacttcacaatgaagttggagatggtaacgtgaagcttggtacagaagtgttgtcattggcatgttgctgtgatggagtctcttcttctggtggttggtcaatttctgttgattcaaaagatgctaaagggaaagatctcagaaagaaccaatctttcgatgctgttataatgactgtaagaaaaaaattatctgtattcatctctttagaagcttgatcatttgacagccacaaattaaaatattttaccgtgtttttctttttgcccctttaggctccattgtctaatgtccagaggatgaagtttacaaaaggtggagttccctttgtgctagactttcttcctaaggtcaggttagaatcactcttttagatttaacaaatgcagtgttgcactagcatgttcttgagaaatttgtgctgggggaaattcctcttaatccttcaaattgcatttaatttcatccattaggtcgatggatccatgtcacagaaaatattttgtttatcttctagatttctattatatatgtaagactgtctcttagtttgtgaatttacaggagtcaatcatcactcccttgaatctgagcatatcagcagttcatcagcaatatggtttatttgagaaggcaacggaaactattgtttccaaaggccacttgtttgaaactttcaccactgttttgaacagtgtattaaagtaacagtcatttgtatagcagcacctggtgatttttaagtaaattttccattcccaatcaaaacaagtaacattatatgttgaacatgtactgaattgaatatggaactttatgctggagatgccagactttattttactggcatgaatacacaattattgtaacaatggtattattgcttggttacttctccgctgtgaagacatacctttcgtcaccttttcttgtttcccatattctgcaccttatgggattgtcttccacatgttaagatgccttgtagtaccagttcccctattatttgaatgtgttcttccttagatatatgtgcatttggaacgtgattggaaatacaacagcaaactggtattgttagctgcttgcctgccacagcctacatatgctgccatattacagaattatgagataggtggactttgatttctgtcataatgattaactaacttgatatactcaaactatgcagctcctagctggtatccttagaatttatcgagtatgcatagaagtctactcttaatccatatctatttgatgtactcaaacttgaaactatgcagctcctagctgggctccttagaattatcaagtatgcatagaaatcttaatccatatttatttattatatgcaggtcgattatctaccactatctctcatggtaacagcttttaagaaggaagatgtcaaaaaaccattggaaggatttggtgccttgataccctataaggaacagcaaaagcatggtctcaaaacccttggtaggttaattcagctttacacttatattttatccagcttgtagctgcttatattttgatttgcgaattaaaaattattaaaacagccttgaaagaagaaaccatgttcgctgtggagactagaaattcccacattaattggggaaagagaaatatttacaccctatgattttggcaagtgcaagttttaatggttgagattgatggattgaatatatatcatatttggactcagtatgaacaaataccagatacataaatagatagtactaattcaacatggatctgaactgttgatcagaccaattgagcacttggttgtaattgctcgcggactacacgcttactgcctgactagggttccatgatgataaggttcgattttctaaaatactattacaacaagatgactatttaataaaatttaaagagaataacgtatataaaaatttagataaatttggtgcaccgcgcaattgcgcaggtcaccctgctagctgtattgaactcaatatacaaatcaaccttgctacattgctctactttttctcaggtcttatttactctgatttctatttattctaatctatacatgtcgtcttgtacagggaccctcttctcctcgatgatgtttccagatcgagctcctaatgatcaatatctatatacatctttcattggggggagccataatagagacctcgctggggctccaacgtatacttccatattatgatcatttatgttttggttgttttttcttttcttgctagatttttctgatatatatacttatgtagggctattctgaaacaacttgtgacctctgacctaagaaagctcttgggtgttgagggacaacctacttttgtgaagtaagtgataagaaactactgccatggtttagagtatctatatgttttctcttgttgtgcttgtgttatggttttccatcactatggagttttgaggattcattcaggtttttgcactaccacttgcgaattcaatatgatgttcttttacacaggcatgtacattggagaaatgcttttcctttatatggccagaattatgatctggtactggaagctatagcaaaaatggagaacaatcttccagggttcttttacgcaggcaagtcaatgaaggcacccctattgtacaaaagaaatcttagatatttgaaacatattcctgttgattgagtacgtgaataatttgctgtttctagtaagtcaatttggtatttctcatgcaacttatggggctccttgatttgctgagaatgatgagtttcctagagcaagccaggaactgtaatcccagcatgtaatactttaccttgaaattaacttcaaaaaaataattgaagctttttctgtatctgtaggaaataacaaggatgggttggctgttggaaatgttatagcttcaggaagcaaggctgctgaccttgtgatctcttatcttgaatcttgcacagatcaggacaattagcatttaaggtatctgaccttaagcaatttcagacaaatttgctcactttatgtaaattgaaaaggttcacatgatttccagtttcatatttttctcttgctatagtatatccactcatgtaaagatgggaacatagtcctaaaagacattatggtcgcttgagatgctcatgtttttttgaacagtgattcttgacttgtactattttttgacaaccaaataaatttctcaatgtttccgagaatatggcatgtacaatttgacctgttggttcttttagcagtacaatttctcgtattgcttgaggcttaagacttttgttatctcacaatcttagacgtccccttatcattattattcctgtatagcttttacgtagtactctatcatataccctctgaacagtagtcatctcatccttgccttactgaccagattgtataattttttccctgccattgtcgtttgtgaagtaaaacatacatcttctacatccagttgacatcaatagccatttctgactgactttggtggtgtctcatcaatccatctgggataggcaagagaggtcttccttgtcatgatacatctttattagtactagtcatatactacatgttactattactatatcactactagctttaggccatagataaccacttgtagccacagtttgacaccccaattaaccaaaggtcgaaaaggtcagttcagcttgcaaacaacactgggtctttggagaatccaggtaaagatatacttgtacgatatgcgtgctccactggctgtgtgcattattatgatgtagtctcttttatctttggtgtcctttttgaagtctagagtactccataattaccatgggccacacaggattatatgatgcttgaagcttggttttggtccatgtatatgcacaataggtacatcatttatctaatttttgagagagatgttcatatcaaagtgcaaccgaccagttcaatcagaaaaagaacacattcgagacaaggtttgcagtagtgcaaccacctaaaaggaggagacagagagtgagagatgagtgggaatgataggagacattggggcaaatattttgtcgtctgaaatgatatttgcttgagcttggtgtaaggaaaaaaaaggaggggcatttgcttagccttgggaactttagggcacaagcaaacatgagtagggtactccttgaggctttatgtccttcgttgcacttttctttttgggcacacccttcctagtattgtatgagcatggcggtcactggccataaaggagctactccataggaaagccaaaggcaggcattgcccttgtttattttctccatgtctgaaggactggaatggatggaccttatccatggggagaatgaagcttctggtgtgttttgtacttgtgttgcttgtctgaaactgaagctatgcattttagtttgcattgcgacttcctttggttccttgaatcacaaaatcctgcttgtgtttgacatttaaacattacaaagataaacatgctgcttttataagcttattcatactcattctcacccaatgccgtcctcggcctgggttttggtcaagtgccaaatggttccttctctgttgtgatacatattgtaagcaaaagcacgaagcatcatagaagtacttaaaagtaatcttgcgtacgaagcctatgtttttatttatccaggcaaattttgattagctcaatggcaatgaccaagaacagcttaggtctcagaggctagcgcctgcctagcaacaaacgggtctcgacaggagttgagcttggtggctaaccatttcgaacatggctagttggagaggacaagcaatgcctatcagttataatatcaagctacacatgacttgaattggttagtgaacacatcatcaccgtcctatatatcccaaaaatgtactatgtgtgattatgtgcatgaatatcctcagccccaagctccttgtggcacatggctacaagtaatgtagcctcccaaaaaatgcacaacaccccagctaaaaccctagaaaacggcagctaggatcgatgctctattgcctagagagtagtagctacctagccatcttgccaatgacaaggagataaggcctttgaactgtttgttgcacacataataattgggtatgtgctcgaggactagcagttcttgttatatgtatctgcgagcaatttgttggtatatgcatggtttggttgtttttggactgaagcatcctcgactccttgtacaggtttctcactgttatcccctcttgctcctgtctagacagtgcgctgaaatgtgcatatgcatctcttggtcgcacgtgtagtcctatcaatcctgcctgcttgcaatccaatatatatgcgctgccaatattttcatccagttgaaaaaccatactccatgtatttcatacaacagtagtacaaggtatcttgaaagaaaatgtgagattgttagggtatgatgtttttttattaaaaaaatggagaagaaagaaaagtatagtcatgctagcatttggtatgcttggctggaaaggatccaataaataaataataacgatacgccaagtacctgcagcttaaaacactggattttcccaacaattggaccgatttctcagtcagccttaagcctgccctttcaacgttgcttcctcgaagattcggaccgtatctatcgatcgtgcacctaatgcaactatgcggtcgtggcagattaacaaactgtaaatgctacctgatagccgctgcaacatgtcaaaatgcatggatgcagtcatgctcatgatgattcgatccacccatgagctagctagctaaggattttggcctaatacacatgaataccacttgacttaacagaaaaatttgagtagctaaagcacgcaatccatgcattggccacacctattatgcatttcttttttgctctaaccattcatcactacattgttaatactatttttatttatccgtgcaagcacttgaacaattctcgtaaatcacggccttccaattggagacccagtaatcgatcgttgaatgctgcgtgactccggacacaagcaagcagacgattatgatccttcccctagcaagagttgactcgtgccagtttctgccacgctgcaaaaaaacctgcacaaaatcacccttctgttccatcacataatctgcactccttttttcactttctactgactctccgtactcggcagttactagtactactaccatagtgtgtgtgcattgctgagtggcgacctatcatctcttccatttcacacaaaaccaaggaaacagagcaaccaaccagatcgaaatacgtgatgaattgcctagacactcgacagcctttctccctttatttttttccccttttcttttcgtttcctcttttctttttcctctcgttggtatagcacacttgtatgtgttgatcttggtcaggaagagaggccgagaaaatcttcaccggaaaagaagcagagagaaagcgaaagggtaaaaaaaaaaaaaagaaagaaagaagttgcgccatgcacggatcgaccagatgggttaccggtacggcgcagccagcgcttgtctcctagctctcacactatttgcatgcacgttcctcctcagattgtgatctctaaccacgtagagtactacggagtactaatttagttactcctactaaacaagtggccggcacttgatgctacattaacactccagcttactacgcatcaatgcacgagtataatagagatcagtacagtataaaatgcagctatacaagtatttggttcgatcgggcaaagggcgagctctccgaggcttgtttttttggggcgcctcgatacacccttgccgtcgccatgccgtcgaacaccggcaagtgcgtgtatggagtacttgacaagttgacaactgcaagtaggtcgtgtagtttcccatcggaaacgacaaaggcaaaatggcctagctgtacgtacgtagagccagacacgtaggagtaatgtatagctagatcagcacacatggcaactgggtgccattttactactcgacctgtaattaaccggcccgggttacacttccacctgagaaatgcaggcaccgtgttggtgtgcattatttcaactttgctgatgagcaaaacgctctaaattcagagtagcaaacgaagttggtgtcaactgtcaagaacaaagagaccgaagaagaaagaaaaatgtcagcaggagtacacgacgagagagagtaaagtggtttttttaattaagaaatgtattttatctctgtttctgttagtatatttttttaaactagtaaacggtgtgttttgtgaaagctttcaaatataaaagttattttaaaacttagttaatcgtgtgtaaatgactttcttatttttttttcatgtcctaacatgaagtttatcttcgttagaccagaacaccaactaaagcaaactgtctccatggagaaaacagccaaaggagcaaccagagaggggagcagcgaacgcaggcatgatcacgagatgtgggagtacgtacatacttacacgtaccgccgctacgacaacatcaccatatcctttctcctgccaactccatccgctgcagaggcgacccgttcctagcttcctcggcaccggcttgactccttctcgctccctcgatcgatctcctggactctggatggaccacctgcacggccaggccggatgcagatagcgcagcagggcagggcaggcagcccggtggtaaggattgcaaaaaacagagggcgaccgttcggctccggcacgtagtactcccccggcccgcgttacagccacgggaaagcacgtagagcagcagcagcagcctgcattcactcatacgggatcggctctggtagcgatcaatctgacgcatcggcaggcgaaacccatactacgctccaggctctccagagatcgatctgggtggtaaatcagccgggctccagagagcctgtagtggccggagtaaacgagcgagaaatacgtgctggtactactggtagtataggtggggtaaaaggtgagcgagacgagtgaatgagtgggtgctactagtagtacgactgtgtaactgtccgtatgtatatctactagggagtaatttttccctttttttgataaattgaccctttttaaaaacttaattcgaaactaacccctgccaaacacttcaaccaaaactaggccgtcggctcagcgccaagcgcattggcgctgaggttggccgtgtcagcgccaacgggactggcgctgacattgtgccaccgtggcagccgggccgatcccctagctgacgtggcagctacctcagcgccaaccgcttcggcgctgaggtgcccaacctcagcgccaagtaagttggcgctgaccttggctacttagagcccggccgaggccgccccagccagttcttcctccgttttttccccagccgcccgcctagggttcggtcgccaccgcgttctcctcgcccaatctcccccaaaaacctctctaatcgaaggtgatttgtgcggcattgagtttgggatcggaagagaaggtaaacccctctataaaccctaagttccccaaagttttattggatattttgcattgttttggttgtagacgtggtttgataatagttggctaaggatggattattagatggataatatgggcggggatgaagtgtggaggtggcatatctttatccatttggttgttattgatacatttgacaaaatatatttgggatggatgtttggtgatgcactagggtttgatgggagatggatgtgtggtgatggcctaggatgtgggatggatttgtggtgattgagagggtttgaaaggggttgatgtgtggtgaagggtaggtaatttgtaggagtagagttttttttatcaataatgtgtagtatttgagtaatgtacttatttattggaaaaattagacatgttgttagcttttgaagtattggtattgcaatggtaattacatattattttcaagtaattaatgtttatgcatgggttaaaaattgtagatggatagattggtccggcttcattatggtggttgtgtggtagatgaaagtacacatggaagccaatttgagggaatgacagttagacaattagtgttttttgcgaagcctacctttgaggagttaatgtctcgcatcaagcatgaattggattggaatgatgagtcggttggtatgcaagggagatacgatgtgggcggcggtgtcatgtcacataaatttatgttagacttgaatggagagatcgaatggcaaacatatatagatatagtattggggtcacatttcaaatctcttgaggtgtttgcatggaagaaagatggtaggatagggaagaaagaacttatagaccttaatgaaagtccactcatagaatcacccattagctgtcacgaactgtcggagaggtgtagtagaaaggaagaattgattgaggaagacgtggaggggggcgagggagtaaatgatatggcggatgtggaggtcagggaagagaatgacccagtaagggaggaagtacatgcagaggagaatgtgccgttaagtgggctggcgctgagtgtcccacggtcagcgccattatggctggcgctgaggtcccagcccgcaagccatccagaaggcttgctggtctgggccttgggggttgcggccaagtcccacctcagcgccagtccggttggcgctgaggtagctgccacatcagctggggatcggcccggccgccacggtggcacaatgtcagcgccagtcccgttggcgctgacacagccaacgtcagcgccaatgtgtttggcgctgaggcgacggcctatttttggttgaagtttttggcaggggttagtttcgaaataagttttccaaaagggtcaatttgtcaaaaaaacgggtaatttttacctgagcatagtagagcaagtctaataatacagccgacctgctggctataaggttttttatagttttctcttagcttatccaaataatagtagctctttataactaatacaaggtccacttgtcactctcaaagtttattggttcttgtgtttaagccgactgtaaatttatagcctgcttcttcttctctctcctccatctcaacatttagcctatttatagcctactattatactctctccgtcctataatataagagattttgactttttacttgcactgtttgactactcgtcttattaaaaaaatgtgtgcaaatataaaaaacgaaaagttatgtttaaagtactttggataataaagtaagtcataaataaaataaataataattccaaaattttttgaataagacgaatggtcaaaaagtgcaagaaaaaaagtcaaaatcccttatactccctccatccctaaatgtttgacgccgttgacttttttaaacatgtttgaccattcgtcttattcaaaaaatttaagtaattattaattcttttctatcatttgattcattattaaatatacttttagatatacatatagttttacatatttcacaaaattttttgaataaaacgaatagtcaaacatatttagaaaagtcaacggcctcaaacatttagagaaggagggagtattatggggcggagggagtatacattgtaaaactgtaaaaccggcgtgacgggaggaggacagacacgcggcagcttttgtggcgacaagtgtgtttgttttcttttctgaaatcccagcgaaggcggcggcactcgcgccatgccagcgggagcaaagcagcgcggagtgcggggaaagagcgatcgacagacaatattgtgaggccccttcccctagccttgcgccggcggcagcgccggcaccggctttttttatcgggcgccacgtcgaccgcgactgccaagccacgtatagtaatgtactgcatctcctcgtccccgcgacgcgaatcgctcgtgcgccgcgcgcggtgcggagcgggcgggcggcccgcccgccgcctcacgttttcgcgtggttgcgctgcgtcgcgccgtgatttgctaggccgtgtgcgagtggtgtggtcgcggcgcccggcgcgcatggtggattcaaccgagagccgctgagccggggaggcgccgagccgtgaggtgaggagagagtgatggatatcacgccaacgccatcacgcccggcccaccatactaggggaggggcccacgcacccctccacgtatgcacgcacccccttttagagcaggtacaatagcaggctataagccagctgcaaacatattttaaagagataaatgaatagagagaagggcaacaagctacaaatatatagccagctgtagcacggactccaagacacagtgtgtgtatgatagatgggactatgtattaatagtgtagtatgtaactattgtataaatgagctattagactggctatagttgaattgaagatagtagttggctgtactattgaacttgctcttaccccaccggagcagcagcacatccccgcttacaggtgggccccccgtatttgcacctttcagtttcacccacgcggtaactctaccgtgccggcttcctgttgttgttgctcgccgagagcgaccgagtccccacctatatattgctccgtcccgtcgcgccttgccgcttcaagtttcccaaggaaaaagctcagagtcgcagccgcacagggagatcgcggagcgaataggggggagagagagtggaggaggaggagaggttgttgcccttcgagaagctctcctagggatggcagtgctgctgcggccggcggcggcgatcgccggcgggcggcaggtgtggccggtggcggaggaccaccaccggcagctgcgggacgaggcggaggcggaggccgcgtcgcagcggctggtggaggcggtggcgcgcggggacgcgagggaggccggggagctgctcgcgtccggccgcgcggacgtgaactacgccggggtggtgtggctcaaggcgcggcgggtggcggaggccgcgctgcgggacggcgccgccgctgagctgcgggcggcgcacgaggagatccgcgccgacgtgtcgccgctcttcctcgccgccggcaacggggacgccgcgctcgtccgtgcgctgcttgtgagtgccctcccctgtttcctgctctgttctacaacttcgccgcattactatgctctgttcgtcgcatgttgaatgctctcgtttggtgcggtttgaatgcttagccattctcgtttttgtgcattcgaactgaatacgtcgcattccccccataaaattagcgtctggtgtcggtggcgaaatggcataaaatttgcagagctcgagcacatttaccatcaatttagttctcggaaggaagcactgaacactcatgcttctcgaaattcacttaacactagtttcatttctcctgaagcattcgagttggtggaaaccttggacgacatttcaaatgggcctagcgggcactgccaagtgccatctccacacccaataggtgctagataaaagttgcccactgttcagtctaatgatctcttttttttttcatggttgctcaggtagtagtattgtttttctatgtgcccatgatgattttaatgtactgtataaatgcacgcgctagacaaatatcatccttttttaaaaagttttatcgccatttttaataagcccaaattatgagtagaagtaggacttgttggaaagaaaaaataagtatacttccaaacttcgctaacttttattgtcgctctctatgatattggaacttcttttcatttttttggtgggaaaccataacggaaaaagttactcatcatgagatattttccaaagttttagaccgaattatgtgcttctttagcaaagtttttttttataggcattagcaaaatatttttatgaacttgtatttttacagttatactactattagtttctagaaggtaagttaccaagtaccagccccgcatggctgcaaatctgcaatgggaccatgctttgcattgcagatttgcagttcgtttttaatgcgtacggacatatttgttctatataccgatgataaaaatctggaattgggacaagcaaataggcagggaagcttcctgggcactctttattgtctagaaatacgtgtacgcattgatcaaggtgtacacgcatacatacggtatagtatgcctgtattttagtaccagtaccatcaaaagcatctcctattagcaaatgtggtttccaagcatttcctataagcaaatgtaccatcaaaatgcatttcctataagcaaggatacgatgctgtgcgcgcatttcctattggcgaatgtggtttccaagcatttcctataagcaaatataccatcaaacgcatttcctataagcaaggatacgatactgtgcgcaagtaccctgctaaagattctgatttccagtaacttctccctgctgcttccagcatcatgcatgctgcgactagaaggtaagcctaattatatacactgcgtgagtgagagtgtttttagctcgagaggactggtgcttgggggacaggggtagatgggtttgactttacctgaccaaagcctctttgtttactgctgctgataatataatgaatcattcctttagcaaaattgataatgtaatgaatctgtgtaagcatcagagggcactggtgttaagtactcctccatagtgtaccgggcttaagtacttaagtaccagctcaacgctttggtagaaaccaatatattcccctcgtgagcttggtcgggggtgggatcacgtgatctgcttggctctgctcttccggtctcccctcgtttgatctctcctgttgatgcaggagtacttactcccggtaatcttgagagtgtagttacgctttggtgctggatcctatggtactttgcattgggccctgtcaccctaatcacactcacgactcattcaaccccctcggggtcccacatgcccgtcactcttgtgatcctgatcgcgtcaccgcgatcggacggctaggggtactttctgaccatcggagaagtagtgttggtggatgatggctgacgagtggagaggtgtggtgcgcggaccgggtgatccgccgatgtcatggggcagcattgaattgaatgggagtggcaagggactaggggagtggtttgcgctgcgacggggcgtaggggagcagccgggcacggccatgcgtgtacttcttcttcttgtttttttttttgccttgcaggcagatgagctcgcacgggccacggccatgagggcctctgtacgactgtaccggcgcgttccatggcctctgcaaaagatcaataaatgccattgccaaggacggcagccaccatagccgtggcttttatcccaaaacgcataggaggtgaaaatgtggaggatctttttttttcacagaggaaaaaaggattgaagaacccgtttggtgagcatgaaatgcatgcatgcatgtcatgctagctgtccatcactaatcattgctccatgcactctctgatcttcattttgcggggcctcctcttcttcttggaacgtcaccctgactcccacaggccacagactgtggaatcagccatgaactgctcatcaataatcacctctcaatgcactctttgttctgcattttgcggggtcttccatcctcttttctgcattttgcgccggggtcttccatcctctacactggaatatctccctgtctacccacagtccatagactgaactgactccgagagtccgaggtcaggtggccatccaaaggccagcgtcgctcggcagctcagctcatgtcatgtctcccgggctctggccatgcgcaacatcatcagtgagttcacatgttctgcacctgggtacacagccaagtaaccggatccgatgtccgccgcttccaatacgtccaagccgcaccagctgtatttgatcacgccttagaaatgaaaaacccaactcctcaccggagtatagccccgatctggccgcggcctcctccacggcaggcagcgccaagggcctccctattaactgacagcaacgcgcacgtcgccgcccaggtgcgacgcatcgatgtgtgcccccacaccggcgcctgatcgatcggctgggccgacgcgggtacggatggatggctgctccttcgctcgctctcctcgcgcaccccgtatgtgtggacggtgtcgtgttcttctttgccctgtagccatctgcttcccctgccaccggccggccgcgcggccagctgtatcctcccttgctgctgcacgcacctggcgcccatgcaacgcacagcgcctctcgcgtacggcccgtgggggcttcgccgatcgggcatctgcgtatgccggccgctgctcagccccgcgtgtgctcatggcctgatggcccccggtggaatattgatggtggcatggggatgccagtgtgccacgtaagtgctgtttgagaacatcacctcggttcagagttttcagagtggtaaatagcagcatgcacagcactgtactcgtggtggtgcgacgaatttattgtgtgatgagaatcctggatgtggaattgaatgcgtctcttgtcttgttgtccgatggatcttgataaaatgccaagggttggttaagcaggagtttacaatttgtatgatgtgtcctgatggtgggatcatcagaatcagaatgtaggagtagcaaggaccaaaggactagcatcttttatttctgagcctgcattgttcatttcttgctccatttgtctttccgtgaacttcattttctctaagagcaaatgttcaaggatgggtagttaaatattcttatatatgatgttgaaagagataaatggttccagtttagataattttcagttagctgtggccaactactgtattcagcgaggctgagctgacattgcggtgaaaccacacatcaagatttcatatatcgatggatagcatcaccctgcagaattttgaccagattccttcttccagtaggaggccccttctgtctcttgctatatgaatcatggcacagtgccattgccacaggacttgcacagactggctagccagtccattggttaccaagtctccacatcaccgacctgaccagacatagtagtaacagcgacatttgttactcggccagctatgtttccaagtcccgatggctgttgttgtgccctgttctgtgctactgtgttggtccatcctgatggtaccccttatcccgcggtgtgtggagcaatgtaggtgaaagagagagcatgcggtaaaaggagaaactgtactaggcatatcagttcttgtttgctgagttactgtccaaaatctgagaaaattgtttgatcaacttgtgctaacattatcgttttggctatgttcatatcattacaagcagaaacttgtgtctagagcaaccagaagtacattctttagcacagtctaatgtttggcgcaaatgtgcatcgctcctgcaggcgaagggggcggacgtgaacggcaaggtgttccgtgggtacccggcgacggccgcggcgcgggaggggcgcgcggaggtggcggcgttgctggtgcgcgccggggcgtcgcagccggcgtgcgaggaggccgtcgtggaggcggcgctgcaggggcaggccgccctcgccgtcatcttcatgggctccgacctcgtccgccctcgcgtcgctgtgcacgcgctcgtgtcggccgccgcccgcggcttcgtggacgtggtggactcgctcatcaaggtaagtgtgtactttgctccatggcttcatagccttcatgcatctgtagagacatcgttctcgttccatgagattgcgcgattaaagatgtgcaggacgatttgatccccgatagcgagcgttgcgggtggtgttgtactgttttgcagagtccagatgctgtcgagcccagtgtgcctagtcacatgggccgtggcccatagggagaagcagatagccgtgttgtggtttagtcccacctcgcttattcttgctcgtttgcactggtttataagacgaagcggtaacccatctagcgtgttcgtagaaaggagagacggttggcatctcccctgacagggacgggaacagtcttcggactttcctctagcacattgcggttaaggctacccgcttcggcggatcttacccaaatttttttgcatccgtgcccttcaattttttttccatttgcacttgggtccttcaaacatactacttttgcacttcgtagttcgtacacggtacacctgtggcattcacatgttttacatttgcatctgggttctttaacttgtacacctgtgcccttctcccttcatatgtttcacatttgcaattcgtttagagtacaattgtgccggcgttcttgcttgaattagtacacgactaaattgctgcagctaatatcgtctgatcttttcgcagtgtggagctgacccaaatgctacttctcgggtgctcctgcgctctctgaagccttctctgcatgccaatgtcgactgcacggcactcttcgccgcgatcgtcagccggcaaatcgccgtcgttcgtcagctacttcaggtatgcaccactccactggtggcgggctggcagcacacgcacttgctcttcagcagccggagctatactaacaccatcttttgatctcatgtccaggccggagtaaagagggacaccaaggtgaggctgggagcgtggtcatgggacacggccaccggcgaggagctgcgcgtcggcgccggcctcgcggacccctacgacgcggtctggtgcgccgtggagtactacgagtccaccggcgccatcctccgcatgctcctccagaacgggtactcgtcgggcgccacccatctcggccggaatctcctccaccacgccgtcctctgcggcagcgccggcgcggtgcagacgctgctggcgtccggcgtggaccacgaggtggccgtgaagacgtccaggagctccaggtccaggcctgttcacatggccgcgcgcctcggccagccggagatcctggagatgctgataggcaagggatgcgacgtgaacgcgagggcggagggcggcgacgttgcggccatactcgccgcgcgccacaagcgcgaggattgcctgaggatcctcgtgtccgccggagcggacgtcgcgctgttgaactcggccggcgagtccgcggcttccgtcgcttgttccgggggctggaaggccggcttcgagcgcgccgttcttggcgtgattcggtccgggacgatccctcggtcgagcgaccggaacgtgttctcgccgatgatgttcacggcgcgctgcggtgacgccgccgcgatggaagttctcctggcccagccagacgtggacgtcgacgagcaggacgtggacgggtgctccccgataatggccgcggccaaggagggcaacgtcgacgccttccgcgcgctcgtgttcgccggcgccaacgtgaagctgagcaacaagcgcggcgagacggccatcgggctggcgcagcagagcaagaagagggacctgttcgagcaggtcatgctcgagttcgcgctggagaagggcatgccggggggcttctacgcgctccactgcgcgtcccggcgcggcgacaccgcggcggtgcgccacctggcgagcgcgggctgcgacgtcaacatcccggacggcgacggctacaccccgctcatgctggcggcgagggaagggcacgcggccgtgtgcgagctcctcatctcctacggcgcgcggtgcgacacccggaccccgcgcggcgagacggcgctctccctggcgagggccaccgcggcgttcaacaaggccgaggacgtgatcatggacgagctgggccgccagctcgtcctcgggggcgcccacgtcaagaagcacaccaagtgcgggcgcggcaagccgcacggcaagtccctgcggatggtcgccgcggcgggcgtgctccggtggggcgggtcggggcggcgcaacgtggtgtgccgggaggccgagctcggtggcagctcggcgttccagctgcaccggcagaggcggggctgcgacgcgtacgagcccgggctgttccgcgtggcgacggcgacggggagggaggtgcacttcgtgtgccagggcggcgaggaggaggcggagctgtgggtgaggggcatccgggcggtgaccagggcggtgtacggcaagagagggaaggagtgagacgcccctgtgttttgttgctccccgtaggctttggtagttcgcagcgagcgtgcctgtaaagagtaggggcgtagagggagtgggagaccgcgaagagtgtagtgggtgtgcccagctgctggccttcagctcgaaggctgggttgggtacttgggttggcttgccatgatgtctttttggttcaggggcctggagtttgtatagcctttggtggttgtttgcttggctaaagttgttttagctgactgcttgtagttgctttccctctgaaatatcagtatcatttccaaaatttcacggtgcgtctcaccactttatctactgagaattggacatatagaacatataagcactgtcaatgtgattgatcaccccaagaaaggatagaagaaattctaatgatttaaggtaaacaaactcatcaatgcgcagttgcacacattagggtaaactcattctcgattcgtgaattcatgagtgccttgcaaccgaatcaatgttttgtcacaagctgggcaggccgcccttggtatcacactgtttcgaatttctaacatcatagttagaacgggcacaaacaaaaaagatatatcttcccggctgctgcagaattgcaacccgtgaactcgttggcatcaaagttgtgtaagtaaaagaaaaaacttctgccagattaacgtcctcagtttccagagatttccttctccttagccttgcacatatcatctgctgactttatgaacttcttggtcaattcttcaacctggtacataacaggtacatgtttgttaccatgtggacttctttatttccaggacaccaaaattcagttactcacctccttctcaagtcgttttacatcatccttcggcataccagacgcagatttctttatcgtatcaagtgcctagaaacaaagaataatacagaattcagatatagtacaatgcatcatctactccatcagcattgatgcacctaatccaattatgatatgatagtccaagaataagtgtttattctacataatgtaggatgttgaagaaactatatttggtgtcaacaatcagaagctataggaaattctatcttcagaactctacaatgagagttgaaccgattttataagataaatagatcagatgaaccttaactactcaatctaaacttgttaaagtaaagtaatacttcccattttaatggatggcaaaatgctatagagaagagggtatacaataatacaccaaaaattatgttgcaccacacttgtctattagatgtcaatttcaaatggaaataaatatctgtggttgtattaacaaaatgtatgcctcacacctagaaatgccaactaaaggcttgaaaacattaatcaactaaaaattctgaacatagcataatagtaatccagatccaccacaagttatcgttttattaccttttggcgcgctcgtctaatactttgtttgaaatcctcggcagatttagtgacaaccttacacagtgcctatattgtggatgcagaaaataatcagcatttcagctatataaaagaagttcaagtttagaatctcacctgtatattctcctttgtcaacctgggagtgcacaaaaatcaaattagcaaaagaaagaaaatttaagagtagaggaatatgcatatcatatactggaaacagaagaaaagtgctactgaatattaagtccagcaattttttgggccatagttaaccaacagattaatcgttgaaccatttctacgagtacaaaatgaccatggaaattaactacattctcacatgctggtctacaagatccaagttgctgatttatcaggtggtcagcactcagcagaacatcactagcatggttgataagaaacaatccaacagcaatacatgtggagtagaaaaccacaataaataatagttagaaacagtataggcgtcacttacggtgggatgtttgctatgatcctgttgccatcaggtgttggattgatgcccaatggagatgagatgatcgcatgctcaatagacttcattgactacacgagtatactagaacaagtcaaaggaagccccaacagaaacctaagtacaaacagcgatccaatgtaacgctgttcctccagagagaaaacatataataaacacatttgtacgaaggctagtatattggacttctgtataacttgtgattaaaatgacaacgaccaagcatgatattttgagaaaattagtcacaatcctctacatataaaatatggataaaaaagaagtgacaacaaaatctattggtttgtcaaagcaacaattaaggaagcaagaaaaactcttacactcggatcataaggcatcactgatagggtatgtgcatcaaggacagaaacaacggccaagcgattcaacgcaaccttaacacctgtagtctccaccatgatgtgatcaagcatacctgcagaagaaattcgtcgcatcttctgttcaagagatagaactatccgaagaaacaatgacatggtaaagattgagattacgacgatacggtaccaggagaagctcttcccgttcgcaatttactaagctcccgtgacaatgcaacaacggctgcctccatctgctgagttgcagcagatttgacagtcggtccaatgtcaggagcatcctgaactgtatcgcctcgaccatcatcctctaatcacatacaacaaaacaaatatgggtgattcatcagagtgaatgctttcatttaagccctacaaagctatgttgcaaatcccacgtcaactgcattaacctaatttgaaaattattaactcaataaaactacatctaatacaagtagtaatcgacaggcaggaaagatttttttttcaacaaaaatctaatgaggaatggggagtggggagtacacgaggagagcggatgaatatcttactcgatttcttccccttcgcgaagcctctccgggcctccaggaggaacagcttcgtgggggccaactccctcgcgccggcgagggatccgacggacggtaggcggtggacggaggtggaagcggaggatgcggcggctgcgcggatggagcgggcagcaagggccgcgcctcggcgcaggaagagcgccatgagattaggtactcggtttctaactaccagggcttaccggagggttcaggggttcttcgccggcgagcggcggcggcggcggcgaacgagggttttgatgggttttgttcttcctttgcggtctcgcagtttttttttttttttagaactcggtcgcagacttgacacttgagagatggggttcatctcatagaaagacaattaaaagatagccaagtacccagggttctttctgcaaatatccctcgcctgtcaatcctagtcgcccacttctctatccaacgggtaacggctgctcgacgtcccgtactggaactttgcaaatgagtcccttattctgggaattaatttggatcgcggtctgtgtttgagatccaaaacttcatgataaaagagtccatgatgtacgaagaactttctataatttgaactgaaatcactagaagaaccctaaagctggattcatggatgtctaggagctagactgctaggagttgtgccaaacaaaggtgtcgacaattgaatttaggccttgtttgtttcagcttaagattattgtaatctgaattattaaatcagattactctaagctggattataataagctgatataaaataagctactagttgtttgtttttctggattattagaggcatctaagggtagtaggtctttagccactcaataatctggaaaaagctcctctagaggagattattggattatagtaatctggcttatacattgtaataatctagcataataatctacttgtttgtttcagcttgctcataataatgcagattataataatcctaagcttaatcaaacaggaccttagtactagtatatacaccctccgttccaaaaaagtccaatcctagctatgaatctggacacatgtgtgttcagattcatgtgtccagattcatagccagagtttgttttttttgacagactagtatgtagtatttgttcaacaaggacacaattcttttttgctatttttgatttgaatagtccgctgcaacacacaaatatttggccagtatagtactccactactccctccgttttcaaatatttgataccgttgactttttagcacatgtttaaacgttcgtcttattcaaaaacttttgtgaaatatgtaaaactatatgtatacatataagtatatttaacaatgaatcaaatgatagaaaaagaattactccatccgtcctaaaataagtgcagttttgcactggtcacatccaatgtttgactgctcgtcttatttgaaatttttcaatgattagtatttttgttgttagtagatgataaaacataaatagtactttatgtgtgactaactttttttaatattttcataaatcctatcttactataaagttatcccccactaactccttaagcttaacatgcaaatatgccacattatcatccactaacaatcatcacatttaaacatcatgcaaacatattatatctttatagtttttataatttaagagcatttcaaatacaaacatgttaaattatcatccaatataattcacgtaatgtttcaacgtatatctttattatgttttatgatatcctatatacttatatagttcatcctcactgatacttagtgcttaaatgattaatctatggtacaaattatatttctattttttctctaattaagtcatatcatatcaattgtccaaactatctccctacttttcttcttctataaagtcataccaccttactttttacatttgaatcaccattctacatactatttaaatttaaattagcataaaccacattaatttacttaatctgatgttatctagttatctgacacgttattttttctattgttatcatattaaattcccgcagcaatgcgcggggtttcacctagtttttcaaataagacggacggtcaaaccttcgacacggattctcacggctgcacttattttgggactgaggtagtaataattacttaaattttttgggtgttgctataattatgtcgacacattttgtgagtaatcacagttgatttcttgttcaatttgatctcccttgagattcatgctatgattgcaataccatgtgcattgaacgtctttatgtgtttcgtgttgcatcgtgaagccaatcaattcaaatttcttatctcgtcagcatgtgttttcatgaaaaaaattacatatctaatttcaggacttacatatgtaattttagaacttacactgtaaatatactaaaattacatatgtaatttagggacttgcaatgtaaatacatgctgactattttttggtgaaaaatatggcgccataaatatagttactctcaatttttttaataagatgaacggtcaaatatattgaaaaaaagccaatggcttcaaatatttaagaaacggaggaagtaaaatttataagatatgaaactgaatccactcaaaatttaatcatggattcttgattctttgtggcatctcaaccttgtttccgaggattctgatactgatgacgaaactcgtccgcgtgtctaatctgccgctggccggtttccatgcaacgtgggatatgaaataccccttgttggaaaggaattaagttgccgatacgttgattgtccagcacattggaatatggacagtgctcctaactcctaatacttgtcctcatctttcgagtgttagtcaactaccgtgagacatacacaggacccaaattaaactttacaacaaataggaatggtcggtataagtaggcgtgttagtccacctggctgatcgtagcctgccgtgcgttcggagttcagatcaccggcgctgcctggaaagtcacataccagtacagaatagtactccggtagctggtataccgtacgataccgtctacggagtggactattccatgtctccgtcaaaaaaaaaaaacgcgtacctatcgtagatcctggctgattcggccagtgaagcccccaaaaaaccgagacgtttacgacggcttcgcgtacgcgccggagagacgggctccacaccacaccaccgcccaccgcgtcacgccgtcgcgtgagattggcttacattccctggccgccgcacgactgacgcccgtgccgtgcagcagcgtgcgcttccgcgacgacaagggctcacgcgcggggagctggggaggcaggtggaaccaacgaacctgcatgcgggggggttgtggtcgatcgatccgccacccgcgtgcggtgccgcaccgccgccacgaggccgttgatagagatatggcccgcgcgttgctacgaacgtttgccgtgccggtgccccgctgcggcgtgttggccgcggctagctctgcctggcgacgcgcacgcacgcatacgcagacgcaggccgaaataacgtgcaaccgcacgcaaaagcgacggtgaaacggtaacaagctaggccccagaccgggaccggacgacgtacgggtggatggaagcagcgccagcgagcgaagcacacgcttttcccctcctctgaaacgctacgcgtcaatgtagtcatcaaagtctatcgatcgatcgggataacataaaaggggtaaggtaattcccaacccaatgaatattgttcatagcattaaataaactgtcacctagaataaaaaatgatgtggcaagtgaataaatgagaaaagagaaggaaaccatatcttgcatatcatagtttctacacaacatccaagacatcatgtgagataagtagtattaaatttaagtatggaatagtggtgtttgtattggaaggataatgtctcgtactagtttttcaatgatgtggagtttataaaaatcatatctagtgtgttgggttaggaataacgtaagatcgagtaggacgaatcccggtgtcccacctagcaaacagcgacgctaccgcgccaacgacagcgtactacgtaccgggcggttcagggcttcaggctgcagtgcaagcctatcgagagctaatttgcccgagacttggtcgttcaactccaacgactgtagtagagctgatagccgggccccgctacaagggcgggaagcagaagaagaagaagtccgcggcgagatgtcacggcggctgggacgactaaatatcgccggttcacttcaaagtctcggaaatttgtctacttcctctcgccctggcctcccttgcagcgatatcgtccacaggctaggcacgaaacttcagcaacgcgatcaatcgatagatttccgtgcaatacataagcaggcgactactttccgcagcttagccgccctctcgagctcgtgcaaacctaccccagaggagttaattatagatagttaactcgtgctgcttgctagctgatcatcagttgatgccggcgatggggttgtgggagagcgtgaggagcttgttcggggagggaggcaacggctgcctacctcggattgggaagaaagagtccgaggatctttactcttatccagtggatcatggtatgtaattttgtttttgtctctctgtgtgtgttgttgttgttgtttctttctccattttgttgacaattggaccacgttgcttttggtgctgaattctcaactgtttctctactccggttagctgtaatttgattagctcaattctgggattctcatcgtgtctgtcagcaggtagacaggccctcgatatattcttttgcgttcttgtgttctttctagctctgctttgataagtgatagtcgacagtgattaaacaggagacaatcgaccatttctactagcatgcgtgaaggattaacagcgaaatctttgcttttttccactgtgttcagataaacggaaaggagcggaccgtgcggccgcggaggaggtggtgacagtggaggtgccggaggtgcccgtgcgcgagctgaacgagatcaccaactccttctcgaacgagaacctcatcgggcagggctcctacgcgaaggtgtacagggtcctcatgcgcggcgcgaggcccgccgtcgtcaagaagctcgagaagccgtccaagcacgcgtccaacgtcgtcttcctcaagcaggtgcgtagctcttctcggtgctttttaccaatgctcactctgctactacttaccatatatatctgcagctgtcggtggcgtcgcggctgaagcacgagaacttcgtcaggctgttggggtacacgatcagcggcgacctccgcgtgctggtctacgagtacgccgccatgggcaccctccacgacgtcctgcacggtacaatctctacttctaaggatcagtcactccctctcatttttttttacaactacgcttgccgaactgctaaacggtgtgatcagcctgggactgaaccattggtgtgtcgtcgtgtgcagggccgagggacggacaggggtggggcggggaggcgaaggcggtggtgagctgggagcagcgggtgcggatcgcgctggacgcggcgcgcgggctggagtacctgcacgagaaggtgcagccggcggtgacgcacaaggacgtgcgttccaccaacgtgctgctgttcgaggggttcagggccaagatcgccgactacaacatgttcagccaggccgccgacatggctcgcctcaaccgctccactcacaccctcggctccttcggataccaggcgccggagtacgtgcacgcacgcacacacacaagcccagctgatctctgtctggccatggctgatcgatctcgtcatggctttcttgttgttggattgggtcgtcgaacgattttgctgaaattttcgttggtttggggatgttccaggtatgccatgactggtcagatgaacgataagagcgacgtttacagttttgggattgttctgctggagctcttgacggggaggaagccgctggaccggacgttgccgcagggtcagagaagcctggttaactgggtaagcatttttcttttctggttttcacatttccttttctttgtcttaatcactgcatttccctctcagttgtaccagctaacccaaagaacattaatatattggtcacctacctcgtctattttcatccttggtcttcctttctcacctaagaagcagctgaaaagctttttagtgaaagatttatctgatagctaagctgtggaataccgaacacgtacttatcaattatcaaactgcaattcgtctgccaaatttcaataaacctcaaaccagaagcttctagccccttgattaaaattttatggaggtcactttccaaaggcgataagacagtaggagatgcatttgtgctatgacgcaagaaacaaattgcatcagtttctttcctaaataaacaacacaatccaacgaaaacaaaaacaatggcagtacgagcatagtactagtatatcttgaaacaaagatgatgctatcacacaatgttcagactctgacctggcgtatctcctgccccatttgatatgctaggcaactccaattttgactgaagacagggtccaggactgcatcgaccccaatcttggcgacaagtatcctcctaccggagctctcaaggtttctctcttaactattcacctgcattgcatttttgcacccaaccattaccatctctatctatgtatctctagtaggtttctacttctaaccgtcagggtgtggcaatgtcacaatgcagctggggagaatcgcggtgcagtgcctgcagtacgaccctacgttccggccatcgatgggcaccgttgcccgcgtcatcaactacgccgtcgtgcgagaccagcaaggcgtggtctgatgatccacgaggattttttttttttttgcacttgttcattttgatttgttcgtgtgaatcaaccgtgtatatgccttgcgttgtgcaggctagttagacatgcaagagatacaattcttgcagtaatagttgaagagagactatatccaaaaagcctctggttgatataaactggtaccggtaaaactttcccaaagcttaggagtccatagggggaaaaaaacagaacagaaggccttattaaggccatgtgtgcaagctagttagacgtgcaagagtatgctagtagtacagtaaatcgctcaattttggatggagttgtttctcttctttttttttctcctgaagatgcatcatctaaggaaaaaaaatgtactgagcagaacactgagcttgttaggaaaaaaacagttcagtagtataaatggtacgaatgttcagtacaattgtgtcccgttaacatacatcgattttgccaaaagaacaaagggaactttgtatagtatgagtgtatttgtatagggtcggaagtcttgccatccgaatgtttgccccaaaaatgttggggtaaaaaaaagagaagagaaaataggataacctgaaacggagctatgaatatttcgtttcattctatagtttacaactgtttattttactcatcatgctacataaattctgtgtgattcatggcaaaaagaatttcttctatacctacctgcagaatcaaatggaagagtttatcagagctattgagaatgaacgtcttacaaagctgttgattgtaataccaacaaacaggaatagaaattgtttgcaacaaaaaataggtagttttgggttgctgtaagcctaggctctcaaatagttttctttggtgctaagggcttctattccatgcccatgagagtacctgttgttttacaaccatgaactggcttactagtagtgatagatagtaccaatcttagtagtagtcatataactaagatgaactctgattccaactatgttacacccaactgattatgcactccttgccttcaaagtcacaagcatctgctctaacatccatctctactctaagcaaaagagaagctactgacaatagtacataacaccaaatcatcaactgtctctgtcagtctcactgatggcagctgcaggttgccgcaaccaggtctataaaatcacctcctaccatcatagtctaaactttctaataggtgacccctcacccacccaacccatgttttgaatttcaatctgaggtaactaacgctaacagtaatacagaaactgatcgtaagcagttccttgcgaatgcagtttcactgacagatagcttacagttgtaacaaagtgacattttcatccaacaaacactgaaatgacacagcaacatatttgtccatgagaaaagtgtgtgagattcacctcaaacagaaggctaaataggcaacaatggttttctctcatcggttgcagtaagatggcttgcctgaaaacatagtcagcacaagagataagtccatgagaaataaagttgtcattcttggttttattcaacaaaacaatgagtcacttacatcatcagcagcgccagcagtcatatttacaaaagaagagtcggatgacctgccacacaaaattgttttatgagattagatgttctgaaatatttcataaaatcatgacactttcacttcaaatgtcattaatatgaagtataaatgcaagggacaagcgatgtttacctatgattctgtgcatcttccggttctaatgctccagctggtttgtcatctttgacctttgccagtggggagaaaaactgaacaagaacagcacttagccacttacatatgttcaactaagacacaataagtagtaggctaaagaatagacaataaaaaatcacctggtgcatcgaaataaacactattgagatgcctaggagaaagttaactgtcaaggtatgtcccaaaaatgcagcagatgctagaccggtaaatattgtggccacggttgatgaatacttcttcaaaattgtgtctgcattacgattttagtcaattgttactaaagcatgggaaatcataacatcatgtaactgaaacacagaaacaaagaattggaaactcaagattgtgtaagagagtaaatcaggtataccatcctttacctgcatacttaaagaagaatgaagagagaatgccttgtgcagcattgttacaaatgagaaacattgtggcccttgaatgacctcgaaggatgtcaaaactctctggccctgcaaacaatggggcaaagttatatcatagacatatagccaatagtccaaaacaaaacataagacacggtacgacactaatggaaggtagtaagatttggccaactcgacagtttgtgagacacagagtattaaacacgaaatacaaagtaatgcccgtctggctgcttggaagaggtgatgcatgcataggctatatgggttcccctcttgaacggtactttaaatataataacaaaacatgctacagtgcatgattttcagtttctgactggtagcgctataaaaatttgcaggatgaaaagacgcactgatttcaaagtacatattcaaccatataccaagctctaaacagacatccaatttcctttgctttgcaacacaaaagacacaagagtcctcgggtaccacatctgttgtttgcaacacctgaaatactaatgagaatattgcatgcatgccattttccatcaggcctaagtcaccccacatgttgactttcaaatactgaaatacattataatgcataacagcatattcatcaccttagaatctaagttgcttaccttgaaatatgacagtccccaggatgccaaggaagttgaaaattgcaccataaccatatagaaacaaattctgcatgttgtgccaagagttagtgtgaatgaagggagagagaagtcaaggaaaaaaaatgtgaacaggtaagcatcaaaaaccaagggactagatcttatcagtttattgttttcagtattatatgcgtgtgttataagtaatttgaaagagttgtaaggcaaacttttttagtgcaaatcacctgaagatagatgcttgtgtcgaactggcttttcaaagcatactcattgtagactgaggcaagtgatgggacagtaacctacaatctcaaatgaacataaatatgaacatctcgattcaaaatttgttcaggtggctgaaaaaatagtgaaaactacacagatcaagatactatgtaggtgagtaaaacttacaaatataagtgtatatatgtatgcaatagtggtgactgcaagaccaaaagatttggttccatcaggtatggagcttagttgattgacactgattccaataagcaacagagcaagggcttcccactgatagccataaaaaaagaacagggtcatagatcagcattgttggaaacatttgaagaacatataattgctctacattttccctaggatttgattcagtttaagttgttgtaccattctagacttcaagtccatttttaattaatttggcactgcatctaaaagtgtcaactactcaaccatcattgctagttacgattctgcattggtactaacagagtttgtgaaaaattcaaaaatatagtcagcaaaaggcaaggcaaaaaccttgagaaaagaggcgaatggtgcctattgatttctaaaatcctagcagtagtaaaacatggaaactgcatgcactatattcacaataacaaaccaatagcctaataggaaaaaacatctaaatgagagaaattcttagctgaattatagagactgcatgcactgtgcagtttaacatgtaatggctaattgtgttttttttttccacaaggaagattcaggaataaaaggaccacaatactaatctcagtctcacctgaattatagagaatttccttctcattatgaattttaggaggatagctatgacgagtaccttgatcaggaataaaagaatatgatattagtaaatcttgcttcttgccaaacatagggaaaatacacactcgcatcttgcaaaaccacatgaataaagcatgggaaaaatggcgaaagagggtaccttcaggttgcttagcatcttcacagttgcagggctgaagtataactgcatgtgcagtacagcagattaaattaaaaccaagaccaaaagctatatcagattggaagactccaaatccgaactctagaaaaaaatcttaaaacatcattggtctctcattagatagattcctactgcaatggcttggaaacattgataagtattaaaattcatattaactaactcaaatgattggacaagttgcaatgacaattaaacagttcaagaggccttgagaaacacttaaggccatctcttttgcattcatattaactaaaagtttctaaatagtttactagtagctgaataattatatctttttgaacattagcttatcatcatatgctataaactccttttcagcattatttcacagcattgtatttcccttgaaacacatgtatttaacataagcataaaatactgatacactgcaggaaaacaagatttcataaagttcaatgaacatttacctgcatgatgaactttaggtagttgttgatggcatataggagagcaggaacagctaagagtgcattattacgtgctgcctaaaaagagaaggattcaagaatcaaatgataagttgccataactagaaagctggaattagagcaatttgatgcataaagttataaataaataaaggaaagctgaaggcaagtcattaaggaataaaaactacaaatgagcttcttctaaggaattaaaaacaaatagacaaaaacaatttgtggttaacactataaacataagtcatatatctaatctgtgtgcatgttgagcacagtcaacaaagagtgcatgctgtgctagcattgacaagataaatcacctgtacaaaggttgaaagtgacagaagtggcttctccccaaccttttgttttctagactgtcaaacacaaataacaacattagggcgaaatactaaaacaacaagactacaagagccaggaaggctgccaatagtaaatccatgactacactgttggtctactgaaaatggtgaattatgtgtgcaaaacaaatgctttgattagccattccagaaattatgtgtgcaaaacattgatattacatagaaggatcatgcatgctaacaagagatggaacatttaaaaaaaaacacttgtagaaagcacggatcagctagaactaacctggattattagcattacaatagcaaatataacttttgtaacctctgtcaaaaagttgacactgataggactgaactgaaacttcccatcaaccttggacataaatactagaataggctgcatatacaaagtaaaaaattagcatggtttgaaaaggttggcaatcagatatgtccaataatttggcagcatattggcattgaagtcaaacactttcaagtagagtggagtacctggaggccaaccaaaatgcagtcccctgacacaagaaggaagttaagcgcgcggtacttggacgatatcttgctgcggtgcttgtcatatgccctcgacacactcctggggctcggagccaccaccttggagtggcatacactgcattccatcactccgttcctctgcatctcctctaactaagcaggaccggaggccccaaaagcacagcagcaagatatatgtatcactctatagccgtggcctctgatccctttgcatgcctgcagcaaaaaaatacatttgtgaactaagcaaactaatcgatgaaaactgaacacatttctctctaaattcacataatctcgcaaattcatgtgtagcaccgctacccagcccatctcaccaaaacacatcatagccgacagcatcaaccgaagtaaactacaaataccagcactaaacttcaaatcacccaatcagctagataatccatatcagatcactagaagctaacttcgccaataaacatccaaaataaatcacgaccaaatgcagcaagcgcgtgcttctatatactagatcacacaatcagcaccacacacaacaacaaccaaaaaaaaaagtagcacaatcacaggtgagcttgaacgacggagagatccgagaggacctcgtatcagcgaccgtaccacgggggagggtgggggggccgggcggcgggatctaacgccgcctgggcgctcggcgccggcacacgcgcggggcgaatctggtggcccctgtccggatcggcgcggtcgaggctcccgctccgcacccccccgcccggcgccgcacggggagatcgggcggtggcggcggggttctcctccccctcctccttggctcgcttcccagatttcgtcaagttccggcgggaggaaggtggaagagggagaggagcaggaggacggcgaaggcggggcgtgcgcttcgcgtgtattttattcacgtttctttctttctctttttttttttgtttgagatgttcgtgatttctcttgttcacgtttgtatttgtagtaactttttttccttgcagctgtctgtgatgaaaaattggtaagtttggtcattttacgccagaatttttttatctgtaaaatgaataatgccatgctataactgcaccatcacactataatgtgtttccatgtgcaagctatggagtaatactctcccctaaaaaagatataaaatggagtaatactttactaacttccattctcaaaaatagcacattcaagttatgtatacatgtatttgtttatgtatctggacctacataatgtctaggtaaaattcttatatatatttgcggacaggtgcattatctatttactcaagtgaataattatcattgttacaatataaaatcaccatatgtgttgctatttcattattgaaagagaagtcatcataggtgttgttacttatccatgttactgtaaatgttctgaactatatttgcgattgattacataaacggtggatacgcaaattatattcaaacgaatcctacaaaatatgtgcgagggagagaggcccaaaacagatctcactcatattcgaagttcgctccatatgaattgggaggtggcgactagtctgaaggaatagtctctcactctgttgaccatttcctttgcgattcgtgctacagtgataatagtaacttgttgtgtgtcatttactcgcttcctattggagcacgttgccagcgtgtatattcaaatctttccattcgacgcatgttaggtccaggtccaaacacactggcaaattctcaggcgaatattctaattgattcccgtctctttcgcaaggaagagcagctgacacgatcacaccagctagccatcgttacagtggcattttgagtttattctttttctctatgagagctcgttgaattgagcctttagcgttgcttttgatagagagtggtcatgagcaatttgcttggaccactgtccaccaaaattttcattagtgaaagtagatgcaaaatcctatctacaaaaggtaataatcactgctatatagtgtaatacttactgaatttgttgtaagagccatattcttctactcatatttgtgtcgtcctggtatgaaaatggtgcgattttttttgcggggaaaagcactcaattactcagacatggggtcatcactgacaacccatgataaaaaaatacaactgttccctggctacaggcctgacaaatactcacaccgagctttattcgctaacctacgactagctcggttttggctccgatgagctttatacaggaggatctcccctatcaccgctgaattaattcttgatttccctgagaataaacgccatctccgacaactccctctcctttcactgaatcattgcatcgctacctgacagtcagtttcaaccacaatcggcctgagaaaccattaaagaggaagagccagtccttccttgagagcaaggatctccgactctagtgcatgacatgtgtccggaattcagttatggttactaatatgtgtccgtactttgaacaaatctattttcggaattgatcccagtacatgacatctccggtaccctttcattgcatttatacaactacagctgctatagcagctgtgtttcttataccatagttgtactataggtgcatcttcagcaatttgagctgaacatgttcacaattttgagcggattctttataatatatcgattaacttcttatgtcgtgcgatcaaattttgaccttctaagtagagttattttccactgtttttggtgaccccatataccagctatagaaagatacaaatccaaaagacctagtaagatgactttttgagtggacaaaggtactaataaaagttttagattgcatctttgttggagttgtttgcagtgggatgtaggttgggcaagagtgcacacaactattggcttatcatttgctcttatattattgtttcatatccttttgtaaaagctaggtgaaaccctacgcgttgatgcgggcatttagtatgataacaaatataaataatgtgtaatatagctagatgacgtaagcttacataagttgatgtgatttacaataatttaaatagtatataaaataacgattcaaatgtaaaattaaagtgatgtagctttgtaagagaagaaaataagggagataatttgcatcatagattaattatctatgggcaaaaaacaattgaggtgatatgacttaataagagaaaaaaaaggaaggagataatttggaccatagattaattatataagggctacaaacaattgatatgatgaactcaagtaagtttttagggttttcttaaacaaattttactgttttaggatctattagatagagtttgccttttgtacatagaggtagatttatttcgagtttgtcttttctatctcttcgttgatgtctatttgttaggtggatcctccacggagacctataaaggtttgtctattgggttgctgatgattcaatccgtggcactggtagtattgattgctaacatgtcacaggaacggagatgtcagatgatgcttagtcatgttctttgtgtgtgcttgcgtttttcaacggtgttattgtgcttgtctattcacgttgcagcaatccaacatatggagctctttatcttttttgtgaggttttatacttcttgttcttgtgacaacaaggttatagttatatttcttattccatccgtcccacatagaccttgtttctagaaattctagaacaaatcagtagtgcggcgaattgatcaaatgtttctcattaattcatggttacaattcttatgttctagtttaaatgtgtatctggagcatgtataacttagaattaaacacctcgtggacggcggccagcgggggaggccacgcgctgctcctccgccgcccaccgacagctcctcccccaccactgccgcgttgcccgttgccgccttcatcgctgacgcctgccaccgaggctggtgcctcgcagagaagggacatagaagggagagagagaagaggggaaaagagagaggaggttgatgtggcctcgctgacatgtagggtccatgtggatcgcacgttgactcagccgccacatcggataaatcgggttcaaaaccaccgaatgacctaatgtgaacggttttgtaaattgagagataccatatatctagttttacggttgaggttaactcaataacaagttgaggcatcttgggtgtactttttacctttagcataatcgaacaaggatgctaacatggcatacaaacctttccgggctccacatatgtccacgggccgacttgtgacttggagcacgtacgagtgcacgacacggaccgagcctgaactctgatgaagtcgactctcaaaaagggtccgtctcctccggaaaacagaacacggctcggtggagaaaaccgaaaagaggaaaaagaaaaaaagaaagaaaaagaagaaaaatcctagggctagcctccgcagacacacgccatccgaaattcccgtatcctctcgagtctcgtcttcctcggcgccgccccatctcagccggacaccgcggcggcggcggcggcggacaggctgttcgcgcagaaccggccgggacgcattgttccgtcggtcgcgcgatccaggccggaggagaggggaggaaggagggggtgggtgagtcaacccctctctctctctgatcggaggtggtagccctcctcctcgtcgccgggaggcggctgatgcggcgcccatggccacggcggtgctcacctacctgcagagcctgtggccgctctccgctctcctgagggaggacgacctgcgggcgtccgcgcggctgctgcggggcgtccccgtgccggaggagacgaagcagttcgtgctcgcgctccgcgaccgcgagcccggctccggctcgcgcgggggcgtgatctacatcctcgcggcgcagaacctgtccgagcggtcggcctccgacgccgactccctgatcaggcgggtgcgccccgccgccgtggtcacgcagctcgcgcacacggcggccgacgacgtccgggccgaggaggagtgcctcgagggcggcggggccggcggcgtcccggcgtccccgttccaggtgatcaagaggtgcgtcacggagaagaggagcaaggatcagtacgtcaaggcggcggcgtgccaggtcttgcaggagattttcggggtcgggttctacggccatgtcttggccgcgaagagagccgcggaggagacgggctcgtgttttcttttgctcgagtctccgtatgagaggaattgcaatggcggcgcatcgggtggccaatctaccatggaagaaggctcaggtcagcaattggcgagtcgctgctcgctcgctcaaagttcaacggatgatggcacgggtggacagtcacagggtagctgcttgctcactcagagcaccagttcaatcgtaagctcgcatgtcaggaagatatgccttgtggatgacattgggggacaactcgtgaagtcgctagcgccgaccgttaatttgttgatgtcccaggctatctcttctgatggtgtttcagagtgcaaactggctgaatgcaagccatcggacagatacgaggctccaccttttgcacagactgtttatccgttgcttgctgatctttatgatatatttgtggacattccgtcaattggaaaagctatggcttctgctcaggaattgctcagacaagttcatgatgggaagccaatttccactgaaatgctgtctgatgtgtatgtatttaggatcgcaatagaagccctcaggataggtttaaacaacgcaggaagaagccacattgacaccagagataatcatggttcaaaaaaattggatttttcagaactcaactctgaggagaaatgccatattcttcttgtgcaagccctcagaagccaggttagggagtttggttctgtggtggctgtagtcgatgccagttgcttagctggaataaggagacactgggatacccctgttccttcagagattgcacaattagccagcagttgcttcaagcaatacggcaataaaaatgacagtgaggacaatgagctgccatcatcagttgacagcacagataaaaagagttgggtagctgagaaacctgtggtcgtagttggtgcaggaggaacagcgattctgggcttttcatctttatcaaaaactgtacaggcatctgcctttcttaagctggctccctataaaacaccggtggtcctgaagtatggcttaatacagctgcaaaggcatgcttccatcgtgttaagcaaggtcctatcgaatggggtttttagtgctagttcaaacgcatccgttttacaattcacagcttcatcggagaagattcgagcagttactcacactgtaatttcatcagcaaagagaactagcttgatggctatgcgaacttcgttctacgaaataatgcagaagaggcaaaaacaacctttcaggatcactccttgggcaacatttggttgcagcatggctgcatgcgctggtctcctgatgcatggagacgggattgagtgtgctgctgaggtcgcaccttctgttcccatgattgccactctgggacgtggtcttgagatcctgcgcctcacatcgcaggaagtgaggcaaacaaggggccaacatataaaggaagctttgggcgcgctgatgagcaacttaaagaaaacagcaaaataaagacataacaaaaaaataactgagactgtatagatttccatcatgcaattttgttgttagatagatttttttttgttacctctgtacagtgcattcttcttgcttttactgaggtaatcgaattcctacaatgtgttttggggcggttctacttctggagcatttcatccatatcagcccaccaaccttctgtacatacatgtatacaacatatgcctaattgacatctctaatgctttcttcgggatcatctttaatgctttagtaactcttattgaatcagtgctgataccgataagaatgtgatgcagctatctgtaatgttctaagtgaaataccacctggagatactgccacatggacagtaatgcttatcttttgtgaatcatcgtcttggctgttctatttgtgtttatattttcccaggcctggttcagccttgtgaatttgcatatctctgattgccccattcatttgctcactcaatgttgtcttcaagcttatctgtgtacttgactgcccttttctttattataaacaattatggttgctcattgttgattttgagctaaggacaagtggtcaatagtatccattgtgatatgcacttgtgttacatataatagtgtataaacatttgtctcatggttacaaaacaatgtggaaagaaaaagcatccttgtgaccttagttgctaaaaattggcggatgccgcctatacaaaagtaaggggcctcgcccatctgtaacacatttacttcccatttcttcagacagttgctgctttgagggtgagaaaatcagaaatttggtttgtgtagaaatctggctggatcgagttgtcagggctctgaagcatctgtacagaagtgacacctgcaaaatgcatccaacacttggtgcttgtactaacataaaatcagcagagcatgcatagttcagaaggagaggaggatcaaggaacctgaaaggaccagaagagttttgcaacctccgttttggccaaacaagatgtcggtatccaaacggtcaccaaccatgcatatctgggatgttgtgatcccaaacctgccacagaggtaaacgagaagaaaggtaagaatctgaaaccatccatccagctacatttctgataccgatggatgaaacatgactgctgctgagacagttggcctctcacttctttgccaggtagtccatcatgaatgttgacggcttcccgacaacgagcggttcttgtttagttgaaccaagaattgcaccaaccattgaccctccacctggtgaaggcaaaatcttcatcatcttaagcatttatccatcatattctaatgtaggaagagctggaatgcctgactaacctgcccactcttgggcatcagtaagatgggtgacggcgtcccggtttgtggcaatgaaaaggcaccctggattctcacgaatgcacagtgtcccgtaccttcagaagttgattagttgtaacttgtaagttagcaaatcttttgtattggttttggttaatgccaaacttatttacatgaacacgagagctaagatgtgatttggcaacacaggcagacagcattggtcaacattggtaaagaactgcaatcatcaattcatcatctgaggcatcttgcatgcatcaattatcaaatggatgcatgattatgatagaactactaatctgattctgcttgccttacatatatgttcatgtcttcttgacaatggaggaaagaagaagaaacttactgtactttgtagtagttaaaatagcgatcgaatcccacaacaactgctccaacctgtgacaaatccaaatggttctcagtgcaatgatcgcattttactgcaaaccaaagtagggatcgtagttacatctttgtcatgttccatgtaaaatccaggcttcagctctatcttcttgtctccatcagactgcaagatgattgttatgtgtgttaatctgtcccaggaatgcagcactgaacatgggttcagaaattttataacttactggcccgccgaggtactgaaatccagccagctccagctccttcagaatcccgtcctctccaatcacataaacctgaacaataaaaatgttaaccttgcgcaaatattatttgccaaaattgctgaacatgaacagtaaaaatggtaacgttgtgcgcgtatctttgcaccaaaacatgttaaaacttctgaagatgatgatatagattagataccttcttgtctttggggaaatcgatggactgcaggtacgcggcagctgcgaacgacgaagcgaagatctcttcctgcgtagagcgttccaggctcatcagaccagattggttggacaagaaaatttggcaaagaaaaattggcagttcatggcatgaatcctacctcattgacgtttagtcccagcgtctcaaacttcttcccgtattgcttcctcgacttggtcgagttgttcgtcacgaacaccagcctcttgccctgcaacgccacaaccccatcatcatcagcttcaactccagcagattgctaatgctaagttggactcggagttcgagaagatcattgcagtttgcgacggacctttgatctgagcatgtcgagcgtctccggcactccgtcgatcagcttgtcgcccttccaaatcacacctacgcaaacaaaaagaacgcgaaattcataacaaaatcacaatcaatcaaaccatcgagcgatcagtgtgccatctcaccgtcgcaatcgaatatgaacgtctcgacggagtcgatgagcgcgtcggcgttctccagcttcgccgcggggaccgcgccggccgccgccatcacggacctcctcctggcagcacagcgctgaccggccaccggagaagaaacggagaccaatccacctccccggcggtactggctcctcccgaaggtcggggaggacggcgcctgctgcggcgagggcgaggcggcggaggtggaggggaggaaggtgggggaggcgcgcgtcaggagcatcgcggctgctgctgctgctgctgctacgtgcgtttttgtttatccggtggcgtctgtttggttggttggtgtcgtttcggtttcggcgaatgtaacggtcacgtaggagtatgtgtagtgtagcaagggaggctgctgctgctcatgtggcgacgatgatttgtggctgggagcagagggaggagggatcagggatttggggtgtggccggctagtgttgtggctgtcaataggcacattggcacggcgtctgtgaggctcaggtgagaccgtgaggagaggaagcaatcaagcaacatgtccggtccggcatatcaatgtaccaaatggtctgttcgatagaactttaacttttttaaatttagcttcagaagttaagtctgtagtggaatcgtacagcagtctaaactcctaaactcagctccatttctttagttcattttgtaagaacgctccacctagctccattttcattttaggtgaagctaaaactgtttgactgtgttttagttctaggagagttgaagctgaaactgtgctaaacaggcacttattgttacttgggatttagcatttgaaagaagctcacgtactccctttgtaaaaaaaaagataagatatcccaatacaaagaactggacatgaacaaatttttcatttttcgtgcgcatacttcttaacgaactaaactatacatttttttttaaaaaaaaactaccgaaaaattgctttaagtaatcatattaatctatttttaagtttaaaataattaatactcaattaatctaaattaatggctcacgatactatttttgtctcccctcaaacacactttaatgctctctttggaacataaatttttggtgagagataatatgatgccaccaaattcttactcataggtacaagtaggtacttctagaaattgtacagaatttacttgtgctaggttagatgacaaacagggactacaaaagcctgctacatgtacaaataaatttctgctaattttattggtgtagttttcatgctatgtttggaatagatgaattttagtaagagccgatatgccttcttacctgcaggttacacgtgaaatcggaggtgttatataatatacttgctccgtccctaaatatttgacgccgttgacttttttaaatatgtttgaccgtttgtcttatttaaaaacttttgtgaaatatgtaaaactatacgtatacataaaagtatatttaacaatgaatcaaatgataggaaaagaattaatccttacttaaatttttttgaataagacgaatagtcaaacatgttttaaaaagtcaacaacgtcaaatatttagggaaggagggagtactattttgtttgttcaacaaaaaaaattttcatgtataacaacatgtgggtttgcaattaaaagattttgtaagcctgctttggtatagttttcatattggtttgtatacgtcaggtgttgcttatgatgaatttaatttactaataaacagtagaccttttgacataaaaatacagtagatcgatcatttgtgtatttgtttttaaaaaatatttatataattcaattagacgttgaatggtagttaatgccacactgtgtgccattttctaacccttttgtgttataaattattatattatgatttttctacttataaatattgcattatgtttcatttggcttaatttacttacatggttggggcttggaagccaacaagtgttggctaaacttctctgcagtttgcactcgatatgtttgagaggaataagatgtgatccacacgattaatctttttgaaactcatcatcacaatatcggtgaatattctcgatttctcctttggctctatccccatttctctatattttttaatcgtaatttgaggtatcttttattattgtgtgtacacacaccccttatcagtctgtcttctgtttcgtaacttctgctagttttttcgttgcttttaatttgtttgtagttgcttcatggaagagttttttcgttgcttttaatttgtttgtagttgcttttctagtctttgtagtcgtctcccatttgtagatgagaaagatgaactgtggttggtttctcattatattagttggatgtttgacttgtaaatcctgaatttgttgtgctccagtcgtttacttatgttcagttgtcattattgtaagctcttctgaattttgttgagtcttgacttttttcaccagtactttggtgtaaaaggttatccttttatatcatccttaattttttgttgcttctttgtacgcgtcatgtgcttttttcatgagttgaatattaatttgagcccctctccgccgccccctaaggcttttgattgtggttttgttcttttcctccctctgttagaccattgcttttgaactcttcttagtttcttcacagtattgttcaacctttttgaatttctttcgattgggtcaatggagtaattcaaccaggagctaactatccataccttgccgtcttcaatttatatagcattttatttgttcttgttctttttatttcattatctatgccaactattgtatttatttgaggtgcacctgacgcccaagaggttgaacctgaacgacatgcatctccaccaaagctatttacctagtgagtgtcgctcaacttttgctctaccaaattcttcattcgatgaaaatgcatgatgttggtggtttgaaggtttctgtgctagggaaaaccataagggaaaaaaattaccgtaagagagcgcggcaacaagtgttgggtatattgagctgggaagtcatgacagtggatgttggaaatatgaggtgttttgccatgctatctagctactactagtagaaccattctagatcattgttttttaatccaatggatcatatttattatattactggtagtagaatattatttttctactggtggtagaatttataaatcaatgttggatatcatttttctagcacgaaaatactggtagtataaaattaccactattttttgatttttttttgaaaaagattacctccactattatcactagcttgttcctattctctggaaaaagagcaccgtaaaatattagttgttcttgttctcttggttgggacgtggagagttgtttgtagatcgagttgaaagttggatcatccatgaagtttttttatgtgtaaatcattggagtatgcttttgtgttgcaacttgtttatacatatactccatatggaatgttgaacgcaaggccatggccaccgtacctggcaaaggcctgcccgtcaaatataatcaaaggtaactgtaatattattcaatttaaagcaccagggcacatatagtttaggatcggatgctccccactttctgctagaataggtccttcaatgtattatgtatagaatctattctacgttgaaaagagatttcctcataacaaaaaataatcactacactatgctaaaaatgcgttttttttcccagccacacttagtgctctaatagtaataattacgtacttagccaactatagcaatatatggctgtacatattgagctatacagtggtgtatagtatatgtacagaatctattctacgttgacactagacaagttttatctcataaccaaaaaaaaaatcactacattatgttaaaacatgtgttatttttctcagccacacttagtgctctagtacacctcataattacgttagccaactttagcaatatggctgtacacgttgagctatagtgatatacaataatgtcaaacttgctgcatccaagtatggcaaggtattgctatacattgccacatacgataggcttttactccttcattaaatgcgtccacctagtaccaaatcactttcagctttcaaatctcaaactctttaaattcccagccttgaatccacctgacctgtgcctcgtactcccataatcccatttcgcatccggttctagctttccttggcttcccatttcctcgatctccagcgatgtcgctcgccgacgacctggccgccgtcgagcgcggcggccacatggtgccatcgaaggcggcgggtgtcgacggcgacggggagccgcggcggacgggcaccatgtggacggcgagcgcgcacatcatcacggcggtgatcgggtccggcgtgctgtcgctggcgtggggcgtcgcgcagctggggtgggtggccggccccgcggtgatgctgctgttcggcgccgtcatctactgctgctccgtgctcctcgtcgagtgctaccgcaccggcgacccgtacaccggccagcgcaaccgcacctacatggacgccgtccgcgccaacctcggcgggaccaaggtgaggctctgcggcgtgctgcagttcgccaacttcttcggcgtctgcgtcggcatcaccatcgcctcctccatcagcatgctgtacagtaaaccaaaaccctttctctgatctctctccgccgccggcgccgcgcgccacatctcgccgtgaatctttacgctttctttcttcgcttcttgtgcgtgcgcgcgcgcgcgcgcgacgcggcgaacggcggcgagcagggcgatcaagagggcggggtgcttccacgtgagagggcacgaccagagggaggcgtgcggcggctcgagccggccgtacatggtggtgtacggcgcgctgcaggtcgtgttctcgcagatccccaacctccacaagatgtggtggctctccacgctcgcctccgccatgtcgctgtcctactccgccatcggcatcgccctcggcgtcgcgcagatcgtaggtgagtgaggagcgaggggctcgttgtttcgttgtggtttttttgaagtgcttgacatgtttgagatcgagtttgcagcgaacgggggaatcaggggcaccatcacgggcgtcttcgtcggcgccggcgccggcgtcacctcgatgcagaaggtttggcggagcttccaggcgttcgggaacatcgcgttcgcatacggcttctcgttcatcctcctcgagatccatgcaagtcaccgttcatccggatatcactaattcagtatcccgtttgatctttcttgattgcttattactatgcatgtgtgtttgtgttcgatatgttccattcaggacacggtgaagccggtggcgccgccgtcgacggagacgaaggtgatgaggaaagcggtggcggtgagcgtggcgacgacgacggcggtgtacctgatgtgcgggtgcgtcgggtacgcggcgttcgggaacgactcgccggacaacctcctcaccgggttcgggttcttcgagcccttctggctgctcgacctcgccaacgccggcgtcgtggtgcacctcgtaggcacgtaccaggtggtggcgcagccggtgttcgcgttcctcgacgggcgcgccgcggcgggcgcgtggcccgggagcgcggcgctgggcaagaggaggcgggtgctccgcgtgggctccctggccgagatcgaggtgagcccgttccgtctggcgtggcgcacggcgttcgtgtgcgtgaccacggcggcgtccacgctgctcccgttcttcggctccatggtggggctcatcggcgcggcgtcgttctggccgctcaccgtctacttccccgtggagatgtacatcgcgcagcgccgggtgccgcgggggagcgcgcagtggctgtccctccaggcgctcagcgccgggtgcctcgtcgtgtccgtcgccgcctcggcgggatccatcgccggcgtcgtggaggcgttcaaggcgcacaacccgttctgctggacgtgctgaatcatctgaggccttgttcgtttaattctaagaaaaaaagagaggttggaggaactgaaaggaagtaatttcacatcacaatacatatgaaatactccctccgtcccacaatataaggaattttgattttttgtttgtaacgtttg

SEQ ID NO: 8767 - DNA, 61867 bp, Oryza sativa
tttgtgaaacaacactaccaaaatatatgtacttaagtgtcaagtatcaaagtgtgtgcgattttctacaacttggaccataaaacgtgtagttttgtgaaatttattcaaaacataagtatgagcgaacgacggggcagttcgttttcaatcgagctcttgagaggaacggaggaagcaatttgaggccgttggatccatgatcaatgcttcagatggcacgagaatcactcgcctctctctcacctcttcttcctcagctccgttccctacttccctccctctccggcgtccgccgccgccgccgccgccgccgcgccggcacaccatggcggcttcgccgtgagctcatcatgagcttcaagcacggctccgactccgatatctccctcccgcaccaatgccagcctcctccctccgcctccgcgccctcctcgcgtcgccggcaccgctccccgcgcgcgcgctcctcgccgcccacgccctcctgctcacgtccggcctcgccgcggactccgccctcctcgcgcacttcgccaggcacctcgcctccgcggccgcgcgctcctcctcctccgccgccgccgcctccgccttccgcgcgctgctcctcctccgcccgcgctgcgcacacccgttcaacgctctcatctccagcctcacccatgcgggcgacccctccgcggcgttccgcgccttcgcgctcctcctcgtcgcgtccggcgcgggcgcgggcgcgcggccggacgggtacacgctccccgcggcgctcaaggcgtgcgcgcggctgggcggcggcctccgggagggctgccaggcgcacgcggtcgcggagaaggccgggttcctggggcgcgtccctgtgcagaacgcgctggtcacgttctacggtgcctgcggccagtgtggcgacgcgaggaaggtgttcgacgaaatggcagagcgggacgttgtgtcatggaccgcgctgttgtctgcgttcaccaggggaggtatgttcatggaggctctcggggtccttgctgagatggacgttacaccgaacgaggtaacactggcaagcgtgcttgtcgcttgtggaaatctggggacggcacgggctgggaaggccgtgcatggatggtacttcaggcgggagaaggagctgaacctaattgttggcaatgctctgttagatatgtatgtcaagtgcgagaaactggatcttgcaaggagggtatttgacatgcttttggcgagggacattgtttcatggacggttatgataagtggcttggtgcagtgcaagcgtcctagtgaagcattggaggtgttcaatgcgatgcagatatcgggagtgaagccagacaaggttgttctttccactgtcctctcagcttgtgcaagcttgggcgcactggagtctggtaggtgggttcatgagtacatagaacggaagggcatcgagtgggatgtgcatgtggggacttcagttgttgatatgtacgtcaagtgtggatgcttggacaccgctgtttccatcttccaagagatgcccctcaagaatgtatcttcctggaatgcgttgatcaatgggtttgcattgcatggtcgtggcagggaggctcttgactgctttgacaggatggttgcatcaggtttgcaccccaatgaggtcacttttataactgtccttggtgcatgttgccactctggtttagtgcaagaaggccgtcagttgtttgagttgatgacaaagtcctacaagctctcaccttgggaagatcattatggttgcatggttgatcttcttggaagagctgggctcatccaggaagcatatgatgtaattaaagccatgcctatgagacccggtgtgttcacatgggtaaccctactaagtgcatgccaagctcatggacgaatggatttctcgcagcagattcttatgcatatccatgagttggagtcctctgggaatgggatttatgtccttctctccaacatgtatgcagtgagtgatagatgggcagatgtagggaaggcgagagggttcatgaatgagaaaggcatgcagaaggaaccaggatccagtgtgattgaggtgaatgggaagacctgtgaattcttagttgggcaacagaaccatctgtatatggatgatgtacgtgcaatgctttccatacttatgaagcaaatacatctggatggtctctagttctttaggatttaaatggttattgtgttctgccgagatcatcttgctgcttgtgttccatttggacaaatgatgatcaacgattcttggattggttactatgtttgcatttacactatttattattcctaagctaatgtgaggattttctggtactaaagcttagcagtcaagtggtctgcctaacagtgaaatccgcaagtcagcatcgtgatcagactggcaaatggaggaatagacctgacagttataagccattggcataatattgagactgctagagtttccactatgcacattattgcaccaatagttatgcaaagttctcagtaagcctaggatgctttcttttttaaagaacatgacgtgttatcagttgcattcttcaatgatgcactcaatttgttgctttgatagtcgcttttgaacatgacatggacaacagttgttgggtgcagaatcagtaggatttcgttcctgaagaaccagataaagtgttctccaagatgagatctgaagctaaattcattcgtaaagcaccttgtttagtgcctggatacgtatcaaaggtagtagttcttaaatgaagatacattaaaaggtccaccattgaccagcacgttgcgatgtgcctgaccccattcatcttctcacatgaatatcacctcttcttgtagagggctatgaatgatcctgacttttatctaatgtaccgtctgcctccacatccgttctccctctggcaattgaagaacactgctgccacaggaggtccaagattatacagtgcggaaaaatctcttgtattgaaatttggtctccatcctggtgcataaatagtctgttgtacatattggcgaaataatataaagacaaaacgatgtatccctgcagttggttttgggctttcataactgacaacttcatttcctgtaataaaaattgttaaaacatgttaaagtcagttcatatgagtattgctctcagcctctcaaacttaaaagttctatgcatgaagtatggacatccattggtcaagtttaggttaataaaaaaatagcatagggatgctcatgttgagctcagtgcagtcagatcagacaagtttatgacaatcatagttaaaagaaattatttccatgggttgatgtcgaaggcaggacgatctgctgtttatcatctgaaatccaggtatgacattggtgtatcgttatccttcagatttactatatgctcttatagtttagttttagtgtttattaaatgtaactacaaatgatacactttgctagttttttatttttaattatgttgtcatctggaccagcacgatatgtatttgctttaaaatcttggatgacttgatgccatcaaaacattaaattcagaaaagaaaagaataggaataacccaccataactagcatttgccgattctggaatgtctgtcaccaacctgtcacatgcaaataaccataagaatagcttttgattttgtatttgtcacgtcacacacaagtggagaagtagaattgtataaaccaattaattctgaaatgtttcagattttaccaatgaaggtattctctttttgttgggttgcttggacttggcgagtcaggatccaccatcacctaaaagcaagttagcgtgttacttctagggaaaaatataactttttagttaaataaaacattatcattccaagcaaaggataaaaactttgaatttgagggtataaggtccatgaactgtgcatctcagttacttgtgttccactaagattatatggccattgctttcttaattgacacaacccagatacaaggctctccataactttgatgctttagaaaattaactttctataacactattattttgttagcttcaatggttgtgtcactactaatgcatcttcatgattctagcaaagtacagttaattttttaatgcatctaatcataatgattcagattcctatacttcatggctgacgtgcataattttgatccacaggcagcattcaaatatgcaggtatatgtgctgacctatcaaaagcaaacagaatatctttgtttacacgaaataaagaaatagaggtgcaaaggtctttttcaatccacccagtcacacagatgaagttgtacaacttacagaaagctgagaatatttgcttccagtgttctatacgtactgaacactaatagcacatgctacaggtatagcactctacacagttggatggggctcgtgtaattaggcacatgcttttttccccctgggctagatgccaaatagtattccttatgaactcaatattgttcaatgcagtaatgaggatttggacttaccagagtgtaaaggttccttatgtcgcggccagcaatttcaatccttggttcatttgctacctgtgacggtttgagctcagacccatttgttaattccttgttgttgtataggaccttgagtgatgctgatttgttgaatgggtctaagatatccccaacaacatgtcctacgacaagtgggtcccttgacatggctagtgaagattgatgatcttcaggagttgagcaagaagaggctgtgctaagaagctaacttgagcagaaatgttgaacttgggtgaactgatgagtgcaggtatgtgccctatatatactcacaatctaagtgctgaaggcattcgtggtatcaggagttgttagctcctgaagacttggaatcttaactttaaggcgtaggcaggtgtactgtattatattggttgccatcactggaaatattgtggtatgtccactctcatagcctacataaaaataaggagtgttcattgctattccacatcgatgaataaaatctgctgaccactctcacttattccctatatctgcaaccctagacatgatacgctcctgctgaaaagtagattgcctttggacttgtcttttagattgacacctcatgtttctcattctcaacaagaactttctgtaactcttcctcagtaagagttgtaggcaaatgggataagtaagcatcagccccctggtagggcaatacttgccaaggttctatacttctatctccatactgtagacaacaagaagttagagcgtacctactatttgatggcattgcagtgaggatcatttctcaatataaattacaaaagaggtttcttgagcatgattggttgggaatattggactgcaacaataaaaaagtgctagaggattttcttgacacttgttcactgtcttctaccaaatcaataattcctgtcttcctttatagcagttcttttatcaagtagatgcttgataagcaaattagtggtacagctgtgtggtttatttcagtgcatgccgacatctagaattcagaatcaagttttcgtcattcaaagattataggttagggtgggttcttagataatgatgacgatggtaaattggctttatttgatctacaacattctgttattcactgctctccaagtatgtctatctaaagttctaaacatattagtcctgttctttatctatcaagcgagattttgctcaaagactaaaacagccttctttcggaacaaacattttggcatgttttgaactgtcacaatatctgctctattgtaacaaaatttgaaaatccaattttcttttattttaatatgcataataggtggtgcagtcaattataatataaaatcagtctgctattttttttgtccaaaatatttacccttttctgtgtctctgtagttctatgatctcacccccccgagttcaagctactacctaaaacaccagtccaagtcacattccaagggcagtaggccttctagaatcattttataagttgcttgacacacaatcactcatattgcggaactgaacatctaaactcacttgtcagctgttctcaagattcaaactttcacacgaaactcagaatttcacttaagggctgttgacagtacgcatattctgctaataaactttctatagaagtttattgtactctgtacatctctattttactagttttcctgatggaatatgatctctgacaaataggtcagaatgcagcttcttacgaatactcctaggggggtgcatttgccttttgaaatgtctgccgctctgtcttccttgctttctgacagaatatgatttgtgtaatacaacgtcctaatcttcttatcatgacaggaatatgcctgcggagctgatggactctacataaagcggacgcagaaagcagagatagataaggcaaaggcctactacatttattcttgaccaacaggggcccgcggaatcccattttattcctgtaattcgcaccaaagattttatgtcaatcacgcctcccccttctgatgttatgttcccacttgcagaacgcaggccttgagctgtgcatcgaggaatcaagccactggttttctcagtcctccactcctgctggcacctaaatgtctcatcctattaagcattttgcaagataaactccaggaaggtaatttcagttaacatttatttttctcgaacgcgcaaaagaagaactgcacatcattatattaagaggaaagaaaagagttcaaaaggacccaaacaagcccagtagggcatggtttagtacaaaacggcttgccaacaaaaaaaaaatgctaatggtagttacccaggttgctcaccaaatatttcatttgtggtcatggcttcttttaggaggcggctggagggtagcaggaaaggcaaagagctcagttacgtggacgaagcgaacgtcaggttgagagttggaatccatgccccgaactgtcgctggcttgataatcttgactggagaacaattgaacaaggcagagaacaatgcaccatccccccttcacgtgggcgcatcccattcgtcgcgtgatcgataggacttgcagagggggggccgtggtcctcgccgagtcgccggcgccggattctctgtgaaaagaggctgcaaaggagattccacaaggcagaaaaatctgccggaaacggcaacatgatcgtgctgctgctctcgaccaccgtcgccatcagcccagttgatgagggcaagtgtagtacaaaacctcagcgcctgcccgctgccattggcttgctttgggtcagaaagcaacaccaaggtttttgggtctttcagatcagaaagcaacgcaaaagactggctcttcggatcagaaagcgacctctagtgtgtgctttcggaattcagatcagatatatgcgtcgacgacacttgcttcatcgagtgtatgcccttcttcttcttcagcactgttgcagttgacctgtccacataacacattccatggatatcaggccaggcctaccgtgtgtatatctgatgatggactagcagcatatcggttggcccaggtaaaactaggcatatatcgcttgtttacatagcttcatctgaagcctccatgatatcatccaatctaattttttgtatcaagttctatctatcctaacactcgtcaactccaatagcgcgggtggcttgatagttgatacatatcctgatatcaagcagattgcggaacaaacaagccgaaatttacgatgatctgtttgcctttttgttattctgctacgcgttcgtattgcggctgacatatttttaaggtgatgtatctggatcagtgatcacatcaagaaaaacagttgcgaggtcaaaagagaggagcagcttggctgtggaagaacttatgcctcgtcgtcgaataagacaggagttttgtaggatgcagaatctatgccccggaagaactagattggtaacaataatgtgtataaatgaaacgatttcatatttttcacaatgttagacatatgcgtgcaatatttatttgaaacttcaatcttctgaatatcctgataacacgattcaactacataaaagtatcagtttttactgattttcttcaccgggtttttctgctattatgcaggcccattttatttattacgagttctttttattgacagctcaagcatttttatacaaggatgcattcaggttcagaatgctgacattcttttctgtatgtatcaatacgttgtcagctaagcgttcattttctccctgtcgacattatggggcagcatatcatatatattctcagcataattcccagcaacgtgctcaagactcatgtagcaagactcaaattggcgcctccgaaagcataacctttctgaagcaatgtttgattaaaaaaaatttgctgaactaatatagaaacgattagtccgcacagcactggcctgctcagtacgtctgcatcatgatctgcccaaagatcttatgcgaccatgataatggtcatgaaccatacatagtgctttgtgaacttcacaagttgatcaataaatacatttttatgaatctatgactatgatgcaacagccacttgatgtataatccacccatttcctcaaaattatcaactactacaacagtgcatcagaatgcatctatgcaggcaccaagaaagcatatccataacgcaaaatttacatttagcagtaaacccatgaagaaattgaactctactagaatgcatctatgcaggcaccaagaaagcatatccataatgcaaaatttacatttagcagtaaacccatgaagaaattgaactctactgattttcatagtttcccaaaaggatgtatattccatgcaatggtgagccagtcagctacatatgcttactatcccccgtctcaactgcaaattgaaatcagaaagattagaattctgcacagacgcatggttttctttttttcttcaagaaagcatcttcacattctcctattttgccctcgacaccataataaatgcacaactggatgaaaggaaatatgaaccacaatacttgtttgatccaatatatattcaataacagccatacagaacttttaaattaaaaggcaaccaatatagcaacatgtcatatactactagtgttgaaggcattgcagctgcaggtagattctaggtatggtaaaaatatggtactagtatgctaaaactaattatatagtagcaaattggggaaaaaaattctgggcattaattaacttccaaaaatcagttggatggcacagattaatgtttagcaaggcatgaaaaaccttctggatcaaatatgaagctaccagagtgaagtaagatggcaggcatagctggtgaaggatcttaacacaactcaccttataggcattttctttgtgatataaatatagaggttctataaacaggactgaagtccgtgacatgctgagatcaaggactcagacggtacaaactggtcaacaaaatgttgtcaaacatttaactgtgagataattacagttgataatatcagttcaaatatcattcaaataatcattaaaaatttgagaacgaacaaaaaggctgatagtatatctccattactctatcactgaagaagaaatttaaggaaatagaagggtgaaaatatcagttaatttgatgaataaaggaactatgaaactttgagattattttcagtcaaatgccttttgtataaccatcgttgccttatatacaaatgttgaacttgataaccatagcgagattcctttgtggctttgcccatctgaagatgaatcagctatccctaaataaaattgaaagaaaaataaagggtcagaaattacaaaggcaaaggagttcataaacctaaaaaattgcctgcccatattgaaaaaataaggtttatgcatacatggtacatcttttcatgcaggattgttcattctgtagtgttattccatggcctccgagttatttttcttgagtcatcatgaattgcactttaggtctctgagtcaccacatctcgcaacaatcttgagatacaagaacatgactccttaggtggaagtgttgtcatttgcatgatttatgatgcagtaagacaaaacagctctagcctccatgaaaagatttgttaccctgccagttcacaccctggtccaatacccaatattaagtagtggtacaatgcaaatcacccaaaggaaaaaagaaactgaagaaacctattgtaataaagctcaaaatgtgaaatggtcatattaacaacaaattgtggaagccgttagcagaaaatactgtactgatgctcttatgtcaggatctacgattcataaaggtgtatcaaaatcaggagtgtaattgtgcacaaatatgctgcatcaacaaaatgctgcccttacccaaaatacaatacaaagaaggatatttaagcagatcagtataccactattactgaatcaagtgcaattctctatttgtaaaaaataataatgcaaagtaatatttcagtctagagctgctcaacaaatggttgaatagcttacaggcatatttcataaaataacactgtcaaatttaataggtgagtgtctacatattacagcagtcttgagattacttgctgatgctgatactgtgaaagaactaaatgaatcccctaagtcaacctgtggttctatattcttgccataaccaacaacaataacaacaaaggtaaatagaaatatttgagtggtatatgaaagaagtagaccaacctcatgacatatgccatagcacaactggagggcttcgtcccacttttttacttcaactaatccctttatgaggcaaacaaagacacttaactcaggtacaaagcctctccttgtcatttcactatacaatcgaaatgcttcctcaacttgagatgctaaacaaagtgcctggatcaatgaagcgtacatgtcattgtcagtttttacagatgacggaacttccatcatctctttgtgcaactccatagctatctccagcctgccagctttggagaaacaatcgatcagcattccataaacaggtgcaattggtactgtgccatatgattccatctcctccagaatacccagagaagcgataaagctcttgctgaaaccttgaattgcacaacggtatccttgtaagtactttggccagtaagtctgcttcatttcaccaagcagtaaacgagccttatccaaaaggccagcagcacacaagtggtttatcagaactctgtacgtaacataattgggagaacatccttttctgctcatttgtgtaaaaaggtcaagactcagatcaatcttgccagctttgcctaatccatctattagagcagtgtaagttacaacattcggactgcatcctttctcttccatcaatgacagaagctttagtgccttctcactttcacctatcctacaaagaccatcaatcatagctgtgtacgtaacaacattaggagtacaagaatcctttaacatctgagagagaactttcattgcaagatcaagtcttccatccttgaacatcctgtcaatcaacgaggtgtacgtatgtacactgggaaggtacccacactttgtcatctgcagaaatacctcctgagcactgtcaatttttccagctttgcaaaagccatcaataagagcatcgtacacaatgtgattgggctcgcaaccagaagataacatagcatctagtaattcatgagcatggtccactttgtgagctttgcataaaccatctactagtgcaccatatgtcacaacatttggagcaagtgtgtgtctgtcctcacatggaaagtaaaaatcagaatcggcgctatcagaagttccaattaatttggcatagacttcaaaagccttactgatgttgcctgctttacagagaccatctaccaatgcaccataagtaacatcatttggacgacagccagcatcaaccattcggtgaaaaatatcattagcctgaggtacctgcttagctttgaggtaagcatgaataagtgcagtatatgtcaccacagttggggagcaacccacactcctcatctcctcaaacaaccactgggcttgttcaatgagtccagctttacaaaagctgtcaatcaaaattgtgtatgtatacacatcaggagttacaccgaccatcttcatctcttggaacagaaggaaagctttctctaccttagtagcatggcagagaaaagtgatcaccttagagtatgtacttgtatcagggacaaaacctttcctcatcatctcctttatgagctgaaatgccttgtcaaacttcccgacaccacaaaggcatcgagcaaaattggcaacgttaaccttattaagaacacaattagcagccagcatctctccataaattttctcagctaaatccagcaaatcagggcttggtaatttctcctgaccacatatacttccaataaaaatattgtacacaacataaccaggagggcaaccacaagtagtcatcctatttaaaagtttataggcatacgcataatccttttcattgcaataactatgcacaagggaattaaacaaggatggatttggattgcagccctcagtcatcatcatattaatgatcctcttgcaccagccaagctgtttctttttcaaaaatcctgagagcaacgtcctatatgtgaccacatttggaatacatgagttgcatcgcatcctatggaggaatgacatggcctcgtcaaaatacgatgcctccatcagcccgctgatcatatgtgtgcataatactgtatcaagcttgaaatcctccctctctatcatgtctagtgcatcagcccaccgcccctctttgcacagagcgtgcgcaaagcacccaacggtgaaccggtccatgcagaaccccgactcggacatctccttctgaacccggaaccccaagtccacctgccccgcgctcgagagcacctggaccagtgcattgtaggtcaccttagacggcctgtacccaaagtccttcagcctcccgagctcctccagcgcctcgttccacatccctccgcggcagcaccgccgcactagcacattgagcaatctgccgagcacctcgcggtcctcctccccaatctccctaagcagcctctcggcatccctggcgcggccgtcgaaacccaacgcatccgcaagggcgtcgtagcatgcgcccgtgtggctgtacccaacctgccgctcggcccagaggaagaacctcgcgcagagctccggggcgtcgcgcaccgccccgagcaccgccaccacgacggagtcggtcaggaacccgcggcaccgccgcaggacgcgctccgccttgccgtcgaagtcggcgccgaatgcccggatcgccttggagatcagcacggcctccggtggcgggagggcaccggccgcggcggcggcggcgggctcccgaagaaactcgaagtctctggggccgaggcgagaccggggtggcggttgcggcggcgcgggtggctcgacgaggccgagcagggggtcctcggagtcgccggcggcgtgggagcaggtgcggcgcagggaggcgcgtagtgtcgctaccgccgccgcgcggcggcggatcatggagcggcggcgtgggcggtggcggtggcggtggggcctggagctccgtccatggaggttttgaggggagaggggattaaaccctagggaggggcactcccgtaaatatctcggtaagctggtagtggggcccactctccagtgggagaagggagtgtttctctcgctgagccagtgagccccaccacccgaagctacagcgccacacttccctcatctctctctctccctctccctctcctcctcggcgcggctcggcggcgctcccctcgcctgcgcggccgcgcagcggtagggcggaggcgccggcggtggctcagccgacggacaccgtgggttggccctctacgacgccatcagcccggctcaccagcctccgctgacctctaccgctccacagaccacagcaaggcagcaagaggtaaggatttctgaaacgaatccctttccagttctcacagtccgcttgccaattattgttgatctgaagctgaattggtcactgaatcaatggtagagtttgagatttcagaaatgtgagtttgagaatttgaagtatttgtgggggaaaaaacttgttatggttgtgcgtttcatgtatgaaacgtttttttaactgaacaactggctgcaaaatcgtacattcgccactactcgtagcatctcatgctacctgtttgacgtatttgcgcagcggagtcgacactgccaataggagttgctctggtgagattcagctttttgaatttatcggagactattgctctgatggtagttctgtgtggtacaaccgtacaaatagcctgaagtagttaagtgttttcatattctctgtgtttccctgtgcaatggtaggtgccgtgctaggaaagttgttagtgcctcgtaattgcctttgcccttttaccatacctgtgaatgacgatggtgtgttcaggtttgaaccaaccatactgcattaatgctttaggcttgaggatttaaattacattgaacagcttggagtcaatcacgttttgagtacattggaatgccataaaccactgtatagtgtatagtatactgccgtagcaaacaataagctattcccatgtcaggatgtttgatggctgtctgatggcaaagtattttcccatcaaacggaatttggaatgcctagcaggctaatgcatcccttcaatttggttttgaggcatattgtagaattatcaattttttgcattgtcactattttcatcgtctgttccttcagataatccattgatatttctgttagtcgttgtgttcattctttctattgttttctttctttcttgacttatctacttttatctgcaaacttgtgcctctcacacaacagcagaatccctaattgcatatctgtgttttattgaaatttttatgttcatgcagtgattggcacttttcaatggcatgtgcttcaaagacaatctctattggttttgccaacagtggtctatatggagaggcaaggctactgtcgccaagctacaaaaactacccaaggagatcctcttacaaatttatcaaagttcgtgcagtacagggaaatgatggtcgtcgaaggctagttgatataatccgaaccatccctgaactctctagaaactatttcagaagccggtcaaggagagctctttttggtggtatctcacttctgggaggcttttatgtggcgcagacaatatctctgtctttcggagcgttgggtgtgaacgatgtcatagcagcagttgtgtgtgtcctgcttactgaatacgtaactaagttctactacagccggcctaaggttaccttcccatttgctctcctcaacaacttcaagatgggtttcacatatggcctgtttattgatgccttcaagcttgctagctgacctgcaattcttcctattggtgctttgacatgttatgttcttgaatcttgaaaaacagcaaagatggtgaaaaaatagcatgcccccacgatgttattactgagacgagggatctatagttctgtggctttcctcagctttgttctcctatgtgaaggcaggcttgttgctggtatagtttttgagttggtggatagattttcaaagattggtccacatgtgggtatactgtagtgtgatgataacaactatttattttgagattcagattacatatgattgaagcccggtgtgtacatatgcaaatttcaagctatctgatcttgatcatctcaaaaaggctgtctaatttttaatggaacttggttcagatttaagtccattttgctggaaagactgtagccttgtgtgattttttatgctaatttcctcgacccagtaactcgaccgagttacacctaaatgcactaagcttcatctgtactctttgatttcatgtatcgaagatgcaaataatacagtagcacttgatctgtcctgttaagacctgctgtgccaagagttcatttcattgttagcaactacaggtgcaacagctttttattattattatttttgaaatggtgcaacatgtaatttgtatagtattagtaccaaccttgggcaaagtgtaagcaaacatttttattcttctcttgcgcaacgcatattatcctgacctgatccaaactttgttaaactcacgataagtttatcctgtctcaggttgatatgggctcatgtggctcatcgacctatgtctgctttgctcaacgaatatcatctataatcagtaacttgtaccatcactgagtagtatactgtatggcaactgatattttcatgccataattggctaaacattttcttatcactttagatcaactgatcaatcatgccaaggtaaccttcagattacattacacatcaggttgttgccaacattgagcaaatggtagacatggaactgtctccctcttttctctttaacaacagtagacagggatagatggctagtggccactagcaacacatgctgttgcctagctgagctcagctcatctttacctccccactgtgtgtccagccaccagcttaccgaaatgtcagagctatcctctccacttcctagtggccaagaaacttctcctcttatagagagatcaagggagtaaagagacagagagaaccaagtgttttgtgttgtagaccacactcccttttgcaaagaacacacacaagattcctaatcgtctcctctccttgctttgttgttgctatggtttgccaccatcacaagcaaccttgtgcattagttagatccagaattccagatctctcacttctttctcagtaggcaagcacataatcttgtatagggtagtatatttatttgttttcattgctgtttctgttgctctcagtccatatctgtcagtgggtcagtattgcatctgcctttttttttctctctctcttcatcgatctttatagatttgtttgggtgatgcctgggcgcagtggtttatcgatctcttccctgccttgtgctgctccgatcgatgcccgtgctgattcttgataatatacaacgcaggaatcgatcgataagcctctgcatccagatctcactttttgtttatgcgtatgagccggtacaggttgcctctttgttcttgttttatagggatataatcactgattgatatatttcttgggagtttagtttttgttctatgtgctagaagtatctcttgatattggatagcaagatttgccccttttcttaaaaaaaaaaagtggatagcaagatgctgtcttccaattaacccgccttgtgatagtttctcttgttattttatcatatccttaactgctgcgtatgaatatatacagctcgattaatggatcgttttttgtacaggcaatagcttgctttagcttaacaaatatcctcatattgctgctgccacttttgcaagcttgttttgtaaattacatttggatagttggttatgcatttgtgagttgtgacaaattacataaagttatggatgatgtattgatgttagaatagttgcctccaattgttgcttactccttttttttctttttgaaaccgaattattgctttattattggcatgctcagaacatattccactctattcatgagtgaactaaaatcaggacaggatcagaaaatcatagtctgcatttctgcaatgaccttgtatatcctttttgcctttgagctcgggtcctaaattccatgctgtatattgaacgatctggacttcagtactcctaaatgactggctgttgagtttattgcatattctgaagaaatatcagaaagcaatttgagtggcaacggtatatctacgactacttgcatttgttggattttctcttgtataaattgtcttgtctccaaaaagcattagtaggtggttgccaacattgttctgatgttttctgctgttctgatattctttgcagagaaagaaatttctactgtttgcccttttagacagtacttaatgatgtttgtttttggagaggaactttggagctatatatttgctgcttaaaactcaatcgcatgatgcttcttttgatatttctcaatttaaatggctacatatatccagttggatatagaggctaggtagaagtatcgttctctaaaaaggaaaaatgatgcttcttttgatcctttctgctgttcggtgagacctcgtgggcctcttccaaatgtttgcccagttaacctcggctatgatgcaatcctgaagcccatccatatatggatcgcaaaggataggaataagttcactttagatcccttaatatgaaagcgagttcgactttcattcttgtcccgcaataccatatacaatgggtccctcaactatcaaaaccgatgtaatataagtcccaaaacggtttagccggtagtttcagctgacgtaaacgcctatgtggttaatttgactcggtcttcatctgacgtggcacatgaatcaaaatttaacaatttaaaaattaaaacaaaatatacgggtccatataacagtcagtaaatttaattaaaaatagtgggatgccagtgagcctcacgtcctccacctgatcctctctcttatctatatcctctcctccggaagggaagatgccctcttcaagaggggagaatataaagaagaagagaggatgaggtggagaattagggcccattggcatgtggctctcactattttttaatcttattggtcaactaacatatgagtccatacaatttgttttaatttttaaattgttaaattttatttcatgtgcaacgttaataccacgtcagataaagaccaagtcaaattaatcatgcaaatgccatgtcaactgaaaccgctgtccaaaccatcttgggacctactccatctatccctaaaatacaaatctggacatatgcatgtctagattcatagtagatgtgtcacatctgatattaaattggtttttataggaggggagagtatattgaaccagttttgatagttgagagatccgttgtatctggtattgcggtttaaggacgaaaatcgaacttaatgtcaagttaagggacctcaagtgaacttatccatttttatgtttgatatgtaagcgacccatttttatgtttgatatgtaagcgaaccaaatcatttggtttcccctgcggagtacagcacagctcagctgattgcaaatttgcacaggcttagaaatgtcaagagcatgccctgtcagggtttgactagcttatattcctccctcatctagaaaatttgaagcttggagctacatcttctcccgaacaatgctgaattgctgatataaaactcagttcaactctgttattctatactagattagacatttttactgcagttgtttatatctctgctaggtaagcaaaagggccacgggagacatcaacctagccaacggggaagcaaatggcctgggtaactaatagcgtttttcgataatagactaatttttatgtgtcaacggctatcgatagaggaaaaggcagcggcggagcccaggcaggttcaggtggctctattgctgatcttacgcaagttatcactatagccgctccttttgaacagtgaaattttatatgattttcacgtgatctagctcaaatcctataaaacttctccctttcttaaggaggcttacaagtttaaagtagctatctccccgaatttgaatacaaattgacagaattattatgctcgcaaaatagaaaccgacacgaggtttaggccaacgaaacgttttatgctgcggtagccaacgagtagctagaaaacgcgagtgtgaaaggcacgcccgaattttccccttgttttaaaaagggggatttgattttatgtgcagctgtgaaccaacttggactgtatttagttcagtgcaaagtttgaattttaattgaaattaaagatgatatgactgaaaaattgtatgtgtatgacagattgatgtgatagaaaaggactgaagtttagatccaaactttaaatctaaacacaaccttgccgttgatttgagctaggttggtcttcgtgtgaaattgggtcagcgtcagcgtcagagtcagatcacatcaagatatcgaccttaaacagtttgcttgtttgtgtatgggcagaatctaggctgagggcgacaaggatgtgtggccctccaaatcctaacggtgaattgacgacagagtactcttgtcaaattgcgagaaatttgtgcaggcattcagcgtagtaatggtccaaaaacgtactccaaatagagactatgctaattatctttacaacgtactacgagtagctaggacaaagaaaccaaggtactcgtaacttcgttgaaatataatgcaacaaaagttcaaaagaaagcaaagaaagctcgtgcattttagcgcaggctttagacacgtactaagtgcaaatgccgaacgtgacaccacaactctacatacaaacgctcccgtatgcgtcctttgttgacttattagacacggctttttcgatatatatcgatggagagacgtgcggtgtgggcaggccgacagggcggtgtatgtgacacacgcgatgacgtcgatcccgtcgtccccagccaggcagccatgatcgatccagcgtttttgcacacgtacgcgccaaaagagagagaaagaaagcattttcaggaggcaaaactataatattcggccggtcatagaggcacagcgggggtgtttatctattggtataaagttttagcgtgtcacattagatatacggatatatatttaaagtattaaacgtggactaataacaaaacaaattacagatttcgcctgtaaactacgagacgaatttattaagcctaattaatccatcattagcaaatatttattgtaacatcatattatcaaattatggagcaattagacttaaaagattcgtctcacaatttacacgtaatctatgtaattagttattttttcgtttatatttaatacttcatgcatgtgtttaaacattcaatgtgacagagtgaaaatttttgccagtggatctaaacagggccatagtaagaggcaaaagatttcgcattatacgtatgtcaaaagttttgtcttcatttttttttattatggaaactttattaaaactcagtcaaatacaccaagataatacatttcaattaagcccgctcccggcctctgcataagatgcatatagccacacacaaagaaagacctacgaagacccctatgacaaaacagaaatattagtggctatcaatccgtagactagatcgccaaccatactcttgagtaaaaaaaaaactcttgtgccacctggtccaacatcgcgataccactacaatagtatcccgaagacccggtttatggaggatagcccagatgcgaagccaccggatgattaaagtaataatctgcaattcaatattcattatggagtatttttttagccataaaaacataaaaatatgtcattcaattcgtaagggcataatttcatcggatttttcgttttgctatttctgtagttgaatttgaacatgggacttcacacataggtgtttaatactattagaagtacgtacacaagttttccttttaattttcggtgatatttgctagttcgttgtgcataaaaatgcatttaaaggttgtgtgggtaggatactattggagaagtgggagcccgggttcccacctccaactgctcagggctctaaagatctccaaaacaggccacgtggggctgcatcccgctagtcacaagcgggactaagagttcagtctcttaattttgtaggctgcgccctaagatcgggtgtaagcccaaaaaaggccccaagctcggtcttctgttgactgctcagggcctctggcataccataattgcaattagacttgaaccgtcattccctcacgtcgcacggttgatctcgtatttaatgcaaaggatacgaatccggcagctatacgtggggtggatgacaagactacgcataatgcccgtgaaacaagccatcaacactcctgaattaccggggcatgggctgtcaagaaatgggattgattgtcacgtcgcttggccgggcccgagaagacacggtgcgtccagcacactgtagcaggcaagtgaatccaccaagcgtcaccagcgtcctagtcacctaccctagctaggccacgcatcgacatgaggaggaggtgcccgggacgaccctgtcacactcaatgctagctccaccaagggagctcaggtgggagctagagagattcattgcgggcactatttgtaagcatgtgataagacttcacaggtctaatttcttcgggtgtcccatttgtaagtgacgaacactacggtattcccagcgaagtcaactataagggcatgaccaaggcgacagatgaggggatcgaacttcaatagctctagcgagaaaaagtttcataccctgtaagagagtcataaaaggagatcgagagaaaaacataacatgaataggatattacgttttgagtggactcggacatgtataaactgcttgcctctctttgtctcacgcgaccataacttgcgtctgtacatctattccctggccgaatcaactaaaaggatttatctgctactcgctattggagcttgggctatcatagacagattcccatacactcttttattttacttttttttttcaaaacatgtgcagttatcgtacagctacagttatatacttaggcacaatcaatttctaccgttgtatatatacgaaatgctatatactctagatacggttaatttatacggagagtaccttcatatacggttaatttggtcagttgctatcgtcagtacgtacgacatgctgtactggatcagtagttatattgcctacccttctagaagttgcggcgctattcaattcgcgtaaccgtagtttgacctgcgttaataaaattttctatcccgaatattccatgaaggaacacttccgcatacatcatggacttgtaggtttgatctccctctatcgccttggccaccaagcaattaacaagcttgcgcgcagtgcaaggaaattacttctcctaggcgaacaagaaaaaacaaactcatgctgctggtagagatgattgattagttattcttcggttcttcaggtgttgaatggttcaaagaatgacgagaaaataggatttcgagttcacgtgacgattgtgctagttacagtatcagggaaactgcacgcactcgttttctggtttgccgtttccctccccacctatagctagcggttgaactttcagcaacaaatcatattggtcagtctttaccagtaggagtacgtacgtgactactacgtgtgggatgattagcatcctgtctgaatcattgatttcgtgatacgctgttttaaatttggctgtgtttagatctaaagtttggatccaagcttaagtctttttattatatcaacctgccatacacacatgacttttcagtcacatcatctctaattttaatccaaatttaaactttacgctgaactaaacacaacctttatacccacccggacattaaaaaaaaaaaaaggtactactacttcccgaggaggaaagaaccgccgcccgccgctcgggtcgggtcggccggtcccccacgcccgcgcgcaaaaacaacgggacgaaattaagctcacacacgaccttgtacgttctttttttcttgggaggctcacaaagtcacgatcggtgcttggagcgtgcgccgctagagatggcgcgcgcggcaggtgacaacacatcggccggccggccggccgtcggcccgtcgcgcgatggctttcacgcggatgtcacggagtggagtaggggaatttttctgtcacggggacggagtcgagtagccgacgaaaacgagcccattagattcaccggccgccgtgcgcgatgcgaaccgacgaaacgtctgttgcgaacgttggtagggaccagggagtagtaccggagtagagagatcgatccgtccggtgtttggtggataccgttcgtggtactacgtcgcgtggagttgtaggcccgtctccgttgcaggcttgcagcattgcgactctgcaacagtgtgatgggcttacatgcatgtcctgctgcttaaaggattgaagaaacaaccgtgcagtgtactatgcttgctggtactccctccgtatagtccatgagccatagtagcctagtaagagtatcattctattcgctcaaaaaataagttctgatttttatatatcatatcagataggatcaggggcggacctacggggtgtgccaggttggcactggcatatgcaattttttttgaaaaaacactagacgtagtatgcaatcaaaggatataaaaatagaatcttatcagaaaattatcatggtttgtctggagatcttgtaatcgtaaagaaatcaaatcagggaagaggaaaggactaaatgaagagaaacaatggggccaaaattcttccatcagaattagatgttttcttttaaaaaatatatatagtggagcgatcgttagaatggatacacccactgtaatttttctgggtccgccgctggataggatgtattttttcccttggaagatggaatggaaatttggatgtgatcctctacttatagagtacttagaaccggaaccggtgtagagtaataaaaggaagtgatagttggaaaactattctaatccctcgaggggatgttccctcgtttgctcaaaaactatctaaacggttatgaaaaattctggaaaaatttgacaacattcatacaacacatatatacaacttcacaaaatcttaagtccaaactcaactcacacgtcgagatataaaaaagacaaattcagcgtatgaatattagcgtactgtttatatctaaatttgtctttttttgtttctcgatgtgtagatcgaatttgaacatgaattttggtggactagtaggtatcattatactctatattgtcaatttttttttagattttttcacaactatttgcatcgaatttgaaagaaaaaggtatattaggggatatcccctcgagggattagaatccactcccgtgatagttgtactattggaaccgaacaccagatatgctaaaccataatattgtcagtcaaatagtctcgttatggtattataaatttgtatcaatatatgtaactatcagagatgattcaaagtaaaaaagtataataatttaagtacttcatgacaatgttctagcatcaacactgacaatatacaaggattaaacttaatgttcatttcattattatgcgtattgatatagcctttttttcgaatatttgggtgaaaacagtatatcacggaaatagaataaactctccactatttccgtttccatttacagacattactatatcagaataaataatggtagaaataaaaaaataaacagcaggtgatctggctaggaaattccagattattttcatttctgaaccacatatgcgtaaattgaggtccaattattatttgacatcatggtccatgtaacatttacccaaaagaaacaatgtgtcattgtcctagagcagtaatacaagcaatgtggtaagcttctgtggcaaaatcatcaactttcgcacaagatcacatgcttgtaagttgtaacacaacaaaaaaataataatccacagcaattaccaggtgaagaccgggcctacacgcaaggatttgcccggaggcttggccgtcgcccctcccacaagaggatatatagccggatgttgccgtgcactcttttcagtattgcccgcggatcacagcataagcatcaccgtaatccgtaataagagcaggtacaatagcaggctatataagccagctataaacatattttaaaaagataaaggaagagagagaagagcagtgggctacagaactgtagccagctgcagcacgggctccaaaatataatgtgtgtatgacaagtgggactaaatattaatagtatagtaagcaactattgtatgaattaactattatattaactatagatgatttggagctaaagcacgcacgcacgtacgttccccgcatccccgggctcaaaacagcgaataaatcggccccggcaattcaggtagcacacacgacacgagaacgacaaaagcaaacatggcacggtaatctcgtccacacgcaggcggatgcatccaatccaatccaaaaacgccattggaatcggtgctgcgggcaaagaaagaatagttggtggcgtcggaaccgagtacgtattcgattccacatcgatctccaccaccctaccaggccaccaccacaccaaaggcaccaacaacttccacagatgctaacgctgctaacccccccccccccccccacacacacacacacacacaagcgaacaactaaccccgtcaatctcggacaagctgcattgtgtagcaggtcgatccccatttcagccgctcacgccgccccggtggccgggcgatgtttcacgcgcggaagctgcagcgcaggcggtgatcgagcgaacggtggtggaggagccaaaatttacgacgccaccaaccgcgcgggcatccgcgcatgtgcggccgcgcagtcaccactttactactgccccaaaacacttgggatccccagtacgatgtcagtttatggaagcctgatgagaaattgagaatgcattcaagcttggtaccatcacgcatttggtactggagcagcgaccagtggagtgggtgctgatgagtgaatccgagggctcctctctcggcgtgccaatggagagagggacggtggttggccaagtgggcaccctccctgagtcccggaaaactttcactgcgtgggcagctcaaacgcatttgtcagccacatggagcacagctatggtgtcccagagggattttactacggtgcattttgcaggagtaaaaaagagtttatataaacctttttttttgccagaaccacgtcgatatagaacggtataaaccttgaccttttaaagatagtgagtataagccttaacttgccaaaccaaactttagacatggtacactttcttaatcagttgtttgagttaacgtatggctaaccatatttttcatgtgacccacgtgttaaatacaccttttctttttctcttaagcttgtgtaagggtggctatccatacttcttgtgacaagtcagtaagtcacaccttatctgggtttaacaaagttaaccatcaatcaagcgaccccagtacctcatttccagccatggattatgttttctgtttgcataggtacctcattgatggcgcaagggcacttcaaagcatttactactttgagagaatgttgcagaaaaatgtacaaaaccgtgaccatttctattactcccactgaaaggaagtaacaggtattaacatcaatggctacccaaagcgaaatggaacacatggatggacacaacattaggccaattttgctgttcatcattccttatgtacactcttcagtaatcccctagcttgcatcgttgcacggggaaatgtatccaacaaagaagaaaataaaagggaaaggggaaaaatactatacagactgtactccattaaacacaagagcaaagtcgatttatgtactccaccgcgccgtactttgtcttaattatgtctattactaatagagacccccataataattctagtccatagaaaaaaccaaaatagctatgtaattttccatttttaagagagagaacgctaaaaaagaactcaataaatacgctcagaaaaatacggagaaatcgccttctttggacggatctctcctctgctcgccatcgccgacggccagagttccacctgcctccggcgaaggcttctccaccacacccgctgcggccccgccgtcattggccgcgaacacctcgttgacgaccttctcgacgtcgagcacctcgccggcctcgtcctcgtcctccggcgggggcgggatgaacggcgggcgcgccacgcggaggatgcggtcccagtcgacgccgttgaagaacgggtgcgccttgatcccgcgcgcgccgatgcgcttctcggggtccttctccaggaggcgggcgatgaggtcgcgcagcggcgtcttctcgccgacgagctccggctgcttggagaggacgcggtagaacgtctccttcctgttcagcccccggaacggcgtgcggccgtagagcatctcgtagagcaccacgcccaggccccaccagtccacggagaagtcgtgcccgctgccggcgatgatctccggcgccacgtagtcctccgtgcccacgaacgagttcgacttcgctggcgaccgcacgccagcggcggtggaggacgacgcggtggtggccgtcgaggatgaggacgaggacgacgccgaggccgtgcgcgaggtggacgttggcgacggcgagtccgccgacgcggccggcttcgtggcgccgaccgaacagaacgggaagcacgaggccgcccccggttgcctcttgcccttcgcgcggttcggggacggtgaactgggcggaggctccggcatggaatcagcaatcgttgcgtcctgctcctccggtggcggcggcggcgtcgggagcctcgtggagaggtcgaagtcgacgagcatgatgtggccgctgtcctgtatcaggacgttctccggcttgaggtcgcggtacacgatgccgaggctgtgcagatagtcgagcgccagcaccaactccgcggcgtagaagctgcaatcagaagcaacaatcaacaacggcgaggtggttagttaacccattcgtgcgcgggtgggtggcggagaagcggcgatggccaaacgggggggatgcgagaagcgtaccggatgacggagtcggagaacatcttctcggtctggcggcgccggagcgagttgaggtctccgccgccgcagcggtcgatggcgaacccgacgacggcgtcggtggcgaggacgccgcggagggaggggagcagcgggtgtcgcagcgacatgagcacgtcccgctcgaaccagatccgccggtgcccgtcctcgccgccgctcccgttcttcttgtgccgcgccgcctcccgcgagaccgccttgagcgccatggaggcctcctcctcccccgccgccgcgggcacgacgtggaacacgacgcccttggcgccccggccgagcatggacaccgccctgaggtcccccaggctgagctcccgcggcaacgccggctccggaggcgagggcgccatcgccgccgccgccatggctggcgaaggaccgcgccgatcgatcgatcgatcgaccaaccgctcgtggacgggagagaggcagtgaggaggggaggagaggatccgagtggggtcggtgcgcgagggaaagcaggggaggggggagcgtgagatattgggggggattatttgcggtttgattcgaggggattttatgcggccgccggcttccttggaggcgaaggcgaaaggcgagaagcgcacggtcacggtgtggttgagaaaatttttgaatggccgcgttttacttggattttttagtggtggtgttacggttttgaggccattgagggcgctgtgtcgcgtggaccggaatcatcgtctggtgcgatgcgaagtagtacaggggtttgtgatgtttgcaatagaaaaggggaggaaattgggggaaatcgggtggatttcgtcaggtctacctgggactgcggttgggggcctcgtcttgcgcggattttgttggtctttgtacggcttctagaagggccgtttggtcagaggcacgactacagtgcccagaaacttttactgctccgtacattcttttcactctagaagggcggtcgtcgaacccgtttaaattagcttactgcacccaaaatttattcagcttgtaaatcgcacataaaatttaatttttaaagcttaaattggattcaaattttataaatcgcacttaagttgtttactttatttttcgatatttattttttaaattgctaagaacacatatataaaaattttgtttacgaattacatttagttgtttgttgaatagtcgttacggcttattatgagtataagcgaaacaatcattgtgttaaaagttgaagggtatcagtgatatccgattataacgattttgtaatggaggttagaattaactaagttactcctaagtgttcattcaaaagatggaagaatgtgttttctttttttttacaggtatagctataattgttttgtgtgggttgcacctgacgggtaattatagagctatccatgtttcaatgcaataaatcacatgaatgtatttgctctctttttttttggaaaactgaatgtgtttgcttcatatgtgctaggttttggcgcacagtttttactagtgacgttatagcatttcagcaatcagagccaaaaccgtttggttagcctctaattcgctagaactagagcacggagctaataataagaataccactaaacttttataacatgtaaaagaatggatcaacaataatgtaaaaaagaatctacaaagaagaaaaaataatgttatgaaaaaggaaaatctagaaaggagaaaggcgtcattcacaccgatttgttttgcgtgtgagcttgctcctctagactctagctaatcgtgagcacacgtgaagctacgtcaacatctttagtagcaataaactcgtactggtttgaagtgtgaacactcatttttctaactaaaatttccttatcattggttgaaaatccaaacaaggtttatttaaacttttcatgtgtttcttgcacaacaaactttgtacccaaactgaccaggcagcagacctgctgttcagtagaaaaataaaatgtgcttaagaatctttacgtcaacattattcgcgtcttccagttctccatagcctgcagcttcggtgccttccgggaaattctaacatccatggatagcaaagaatgagatcgattttcgttccttaagagacacattcttttgttttaggtatgctatataaaaagtttaaaaaaatagagaaaatataacatattacgtgtgcccaagcttttcatgtacgcccatgtgcataacaaataacaaatatcaaaaaaaaattataaaaaggtatactcgtgatattaatgataaggaatttctggtggggtgacgtggaaaataaacgaagggttcattggatttcttgggagaatctaattttaccaaaatacatgggaggcttaggtttcagggaccttcgcctttttaatcaagcgttgttgagcaggcaagcatggcgtcttattcagtatcatgacagtctgtgtgcaagaatcctgaaggctaaatattaccccaactgtgagcttattgatgcagtgtttccggcagatgtttccccaacttggaaagctgttgagcatggtttggagctgcttaagaaggggttaatatggaggattggagatgggaggaaagttcggatttggaaggatcagtggatacctcgccagtcgtccctcaaattgtcgccacagaatggaagatgcaggcttaggtgggttcatcagctgatcaatcaggatacaaactcttgggatgctgacctaattaaaaatgtttgctctccccttgatgtaaatgaaatcttaaagattaaattgccacatcgtggaatggaggacttcctggcttggcattttgagaagactggagtattcacagttcgcagtgcctaccatctagctttgcacaaccaactgaaggctaatgaactgggttcgtccagttcgtcgacaagtggagaacgcaaaatatgggcaagcctttggacagctcctgttccacagaaggtaaaaatttttgcttggagattagctagagaatgccttgccactatggagaaccgaaaaaagcgaaaactggaaattgactcaacttgccgtatttgtggccttggcggtgaggatggttttcatgctgtcatatcctgtactaaagccgcggcactgcgatcgctgatccgggaggtttgggagctccctgacgagcgttttctgattcggtcaggaccggactggctgctcattatcctggactcaataaacgctgaaagcagggcaaaatttcttttactcttatggagagcctggtttctcaggaatgatagtgtgcattgttctgggaaagcttcagtactagggagtttgttattcctccagagcctttgggagtccctgtttatgagtacaagccaagggaaggtagacgataaaggcaaaaaacctgtgatgcagtctcggctcagttctccggacagccatgaaaggaatcacactacgactatgggatggacccccccccccccccccggccgatgggctgggttaaagtaaatgtggatggctccttcattcagagttcggaacctgctagtgctggatttgtcattcgtgaccacactggctcagtactgctcacttcctggagaattatcagccattgtggatcagcggaagaggcggaagcgactgcatgttgggaaggggtgaatctcgcagctgagtgggtgaaaaaaccgttaattcttgagacagactgtgccaacttggtatctatgcttacgagctctggatttgatcgagcgcagctctgccatgtcctccggagtattaagttattactccaagctttgcctgattttcgtgtgcagaggattagaagggaatgcaatagagtagcccatgatttagctaaatttgccatgcgtacgaaccattcagctgtttggcgtatgcaggctccttcttgtgtttttggggctctggcaaatgattctaatcacattgatgagtaatcaataaagcgttcccttcccccgcaaaaacacacacacacacacacacacacacacatatatatagtcttaactttcaactcactatattttaacggtaagaaaataattttttttgacaattttaagagtatatacctattgaaatttttttttgttctatatatatgataaatttgaagataaaaccttacatatagatgtaatactactaaaagtactataacttttcatataatttttatagaatttttagtgatatttgttagttagcatgtacggtgtgtgcacgtgaaggtttatgtgcatataataaattctaaaaaatattaagatagattaatatatgatatatcaccaacaacatataagtttgaattcgacctatacaattagagaaagcaacaaatttaaccataaattatgtgttatatttatagtcaaattcattatttttatttctgtttgtacaagttaaatttgaaattgtattttgtaaagtgatatatcacatattaatatatcatactaatcttttaaatattttttagatgatacgtaaaaacgggcgttccctttgagggactaataaagttttccagcaaagaactccattaagttctgaacagtgctcccagaaaaatgggggagaaaaatgcacatgtcccataagttcagtttcttgttggctagctgcaaaaatttgttgatatatttatgatctgataggaacagcttgaccgaaccaatgatgcggattaagcctcactaacccacaatttagactactccctccgtttcacaatgtaagtcattttagtatttcccacattaatattgatgttaatgaatctaaacatatatatctatatagattcattaacattaatatgaatatgggtaatgctagaaagtcttacattatgaaacggaagaagtagaagaaacaggtgccaaattggccacgcttgttgcattgggtgactggttatactgtggaatgtggatacagttcgaagttggatgtcatacgtcccagcattactacggcctttgtgtactactcatttttcttataaggttaattggttagctcaattcgtcactgttggtaactaaagcacgatgccaatataatcaacaatgcgttttattctattgagaacactcataatttctaatttcttttgacgggtcccgtacgtaactttgtgtaattcttttattctttttctattaatatatgaggcaaagcttttaccgtcctttcaaaaaaataatttttatttctacctagttaggatacacatcgttaaatccactcacatccactgatccacaagttttgcaatagtaaaagaagtgtaaaaggactatcaattcgtaaattagattaccacccatgacggaaagaaaaatgtaatttgtaccccttcatattttaattttaatgtatgacaccgttgactttttccaacatttgaccactcgtcttattcaaaaattttatgtaaatataaaaatacttatgtcatgcttaaagaacatttgatgataaatcaagtcacaataaaataaattataattacataaattttttgaataagacgaaaggtcaaacgtttgtcaaaaagtcaacggcgtaatacattaaaatacgaaatacggagggagtactgtttataataggtgaatgaattgaaacaaggggtttgttggtgagtactttgtacgtgcagggtggccggcacgacagtacgtcgtttgtggaattgtaggcctttgccttaaagcgaatggattttgagacatttcagcaataccggcgttgcattctccgtaaaatatctgtctgaacatgcaaattaaagcaaaatgcacgaactagcagagaacaatcccagagcagcgatatggtattttctcgtgtaccattcttgtttaattacgccggtaaattaagcaccgacagtacgcgtgtgctactttttcctgacttttctcttccggaaataacttttgcttttaatagcactagtactacacttgaaaaaattagtaaaaaaaaagcatataaacaagaaagagcgaattatactatggccttgtttggatcctccgggctattaaatagcccccaagaatcttgctatttaggattattaaacgtatattaccgataaaaccgattccataacccctagactattttgcgagacgaatctaataatctatattaatccataattagtggctgattactgtagcatcacggtagcaaatcatagattaatatacctcgttagattcatctcacaaaatagcttaggggttatggaatgagttttcttagtaatctacgtttaatactcttaaatagcaagattctaaagagctatttaatagtccggaggatctaaacaggaccatatatactgggtgaaggtgaattcggacgcggggtttgacaagctcacgtcaacagggagcagtggggtggtgatacgagaccattctggtgttgtacaggcagctgccgctcgatggatggaacgtgtcccggatgccctgactgctgaagctttggcggcgaaggaagctctagagctagcgatggaagtcggctgtgatcgtgtgatacttgaagtcaactgtgctgagttgaaggttattctggaggacagtgaaggttttaaatcatgcattgccgggatctgtttcgacatcacagagcttgctaggagttttgttgatttcaaagtagaatgggtgcctagggaggctaactcagtggctcactgttgttcgagccttgtgtcttctgctgagcgctccatgttctggtttgatgatatcccggattggctagagggattagtttctattgattgtactcctatgaacaattaatgaaagctctgtgtttggtctcaaaaaaaagaattatactatatacctttataaatttctttttcgatttcacaaagacacgtactactacacaagtgcattaaccccactgaaactcacacaaatgctcccctaacccatctttaaagaaacgagaccaatgataattttttttgtctcactgaaatctacaaactctttctcagaataaattcatttttcatccattctacataaatcaataaaaaaattagtagagtaccctcaattttaccaaattctaatataattatttcctactttatctagtttttgtgtgtttatctcctaattttaaaaacttcaataaaacgattgtttaaaattcaaattattttagaacaaataagagagtgtaaatataatattattttagaacgaatgaagtaatcctttgagagagaaaaaataataagagagaaagacttttgcgtcggaagcactacgtggtgctcgttttacgtcagagatgagggcaagattacgcatatatatactgtatttcgttgtgggttggtgactctgttcgatggagactaaaaaagttcttttttttttcttgttatgcatgttgtcatgttgaggagtagaaataactaatcttttatagatagcgcgatgagatataattcaagctaaaaaaaatactactccctccatcccaatatattaaaacctaggatcggatgagacatttcctagtactacaaatctggacagacatgttttatccggtcctaggttttaatatattgggacggagggagtatcagtttgatggtccaaataggtcagcggccactggcattatccctctttattttaaattcactgaaagacatgcgtgccctgtacaatagcagtgcgtgatcatcagatggtccaaaagcagttcagtgcttctcgtctgccagaatatccgatctgagtgtgtgattgcatttttaattgtcctcgtaagcaaattttaaaaaggggcatattcctgacgagaaaatttaaaaagtgcacaaagttggtttgcttcttatttaactcatgtacttgggttcgtccctcggcaacaagagggaaatcatggattcctcatgatcaaaaaaatattcacgttcttcatttctatcatgtggctggataacaagatcaagatggcctttacaatattgagcatctcacttgcttttctgctcggtcaaattattccatggagcactgatggatcgtgtgcctaacaaaaataaattgtaaaatagaaaaggtaattacaagtggaaaagtgccaacttttgttactagatcgatcggcaagatattgtacacagtacactcctccggaagtggcgatctaaagtttcgctttgccctatcagtgtacgctcctttccttgcatttctttttcgtattgcgcttgtgttgtgcccgcaaattgaacagtggccattctatgggtgtgtttagttccacgctaaaattggaagtttaaagaaaaaagttgaaagtttatgtgtgcagaaaaattttgatgtgatggaaaagttgaaagtttaaagaaaaagttgggaactaaaccagacctatgactcaacagttgacgcactgatcgcacattggcaatagctttatctcccccacaaaccaatgagattctttacaaaggaggtacaaatcacttgaaagccttggagatatttttctctcttttttttagtgatagaagatgtataaggtcatgtccaatgcatcaccatgaagagtgatatcaagcctcccgattggagcgtggtctcacggtaccgaacgtgacctatagaggttatagttttctccacgcgccttagctcgaagacatggttggggtcacacattgggggagtccaaatccctgcgatgcgattggtcacgagaagaaagagaaatggtgaaggagaggagaggagggcctaccaggcagggactaagtcaattgccaacgagctcgttcgcattgacaagatcagatctaacgctagcgagctcttccatgccgacgagttcctccgctctgcgcgcttgtccatacttgagccactgtggccaccggactcgtcgctgtcctcaagctacggtagccgcggggctcatgatcagatctagcgaactcgtgaccatatccgccaaactcgactagagaaaggagaggcggcgctggattcggcaaactcggccaaatctgtcgccaacacctagagagaaggagaaaggagatgggggatatgttggaggtggaaaaggagagcagtgtggcggtggaagaggtgagcgttggacagagagctgaggaggagaggggtggaggtgggcaatggagtggcaaggtgatggatgcgttgagcaaaataaccagtgggcagagaaatggtgaaaaaaaggggaaaataaagtgggaggggctgacagtgggaccgtatggaggctaggggtacatatatgtagtactttttttcgttgttgtaggttctaaattataaaagttctagttagttcaatagtaaaaaatcacaaggaccgatacacaaatacttatgggctgaaacataaaatacaattgattgtggtctccattgtggctagagtggtttttgtgtgatcttatcctatgtgacacgttgacaccatatatcagtggttttcattgtacatgtcttaattgtactacgacaatacttatatccatctttttcttgacttaaaataatcttttggctggggaggagaagatgatcagctcgtgacaaatgctagacatttacaaaagtagagagggtggaaaaggaggagacaagagacgtctgcattcttgactggctatcctatacttacatcggaaaccaattgtggagatggaaagcgacccttgatgctcaagttggatgcagggccaactcagcctctctatgaatgacaaggacttgtcaatggccatcaggcgcatgatgatcccgtttttgtacatgcaggattgtactcaagtaaagccgtggtttgttctgaacttttttttttcaaacttctatcatttttatcacatcaaaactttcctacacatataaatttttaacttttccattacatcgttccaatttcattcaaacttctaattttagcgtaaactaaacacacccaaagttaaacatggtcatgtcaaccttgaaatgaacgaaaactgaaatggcattttgcatcttgcagtgtggaatttctgagtagaaatatgaggcatgggtggtcttgaaggcaccatatgggtgagcaggtcaacttggccaaagtagccaggccatggcaggtttcctccctagcatatcaccgcatcccgtcagcagggcagcgatctgcactgcccaaacgtagcggtggccggtgagttcacgttgtcatctccaaagtcacccataaactgcaacctgccctgcccccatctcgcaggaggaaaaaaggcgacggcgaaagagactccaccgaaatccgcacactggtcaccaccaaaccaccactgctacaactaactgtgtggcccgcgccccgggtgacaaaggccaaaccgccaaaccgccaaaccgcaccgcaggatcgatctcacgctgagacgctgagttgcaaccccacgcgacgcgcgcgggcgattcggctaaccgctaaccacaccgaccgagcggtgtgcccgtgtgcgcgcgcctcaaccgattcccgagccagagagcgaacgcacgggagggagagtgaggtgaggcgaggcgaggcgggcgggtgtggctcacggttccattgattagccgctcgcgcggcttcgactttggaggcgttgattacacgattgatcggtggagagcaacagggagctacgtgtactaactccttttccagccgccgaggtcgacgatgattgagcgggttcggggagccatgtttggctcgttggttggttggcggcgtcggcgatcgcagcgggtggtcctctcctcgtggattttggcttgacgacgtcacgacgatcgataatcggattgactcttggaaagcgcaagcgcgcacaggggcgcgtacgttccgtcgtgccgtccccctctcgcgtggcagcgtccgtcgctgcggatcgctacgcgtcactgtggattctggcacgcgagcagcgtgactgcgtgagcggagtgatatatcgatcgacgcccttcggagtacaccattgagatttttgatggaaatggcccgcttggtcggaggaatcaggggtgtatggaccaccgacccctattccactttgagttgaaacaacttgtttggtttcatgagagaggacatgctatatcccgttctctaatatagtaacttgtcatctctgtgctaataagaaattagggatacttcctgcctcgctaaatataagaatgtctactatttaagccaaagataaattatttcgatttagttatcaatactagttattttggtggaggtgtctgtagtgacttcgttaatcttaatttatattgatccattatttcgaatgcgctcatagatatatgtttataagagtgagcgtgcacgtgttgtgagcgtctatgtttatactatatctgtacaaagaaataggttaagagggaagatttcttttcaatcacctcattggttgaatttttaaattgattagattctcctaaatacctgattggttgaaaaatacttagatttttttgtcttgtaatccgggataaatttggatcttataaatgattatatttagaaatggaagaagcacatatgaaatcaagtcaataaatcttaggatggtcatatcatgaaccatctacgcgatttcaatatgatactaaaaaactaactatagacaagcaggggtgagacttgatggcaattggggcttgccggcttggggctcgaggactaaagttaggtccttaaactcattgaactcctaccagcatgtgataaatatttttgagatataaagcatctctagacgctggcccgtttccggctccacacatgtatacatgctataagaggtaacagcaggcaaatgggggagacatgctgtgtgtactccctcggttttattttaattgacgttttggacaataacacggtctacaagatacatcttttaccttatttttctattataatatatataataaataaatgcatgtttacttttattatagtactttaaaagacaaatatatatatgttgttctagttcctttaaactaaatatttttaaagttattgatggtttaagttataaaagtttgatctcaatcttatccaaaatgttaattaatatggagccggagggagtacttagttgcacactgtagctggagcgtacgtccagctacagatcatcaatgcccaagtgtcgttccaaactgttcctgattccgatccgctaagtcctggtgcaccgctgtcgttggaacgatgcatttagtgcctaacaacacgtccatgttccaggtaagtagcagcatcaagcaacgggagacgaaagctaatctgtgtctggccacgatgtcgtcctagctctatgactgaccaccacttctatcaagtttgaaccaattgtgtgcgtgcgtgtttgggtgaagaggattaatgcgtgtgtccggattagcttttatggttagcaccagatggtattcatttagcaacctaaccgacagtattgtggccaagctggtagctacatggaaagcaagcagtaccatgaatcagcactgtgtatatgtggcactaaggggatgtttaattgatgcctaaccttgccataactaagtttaggctagttgtggtatggtggcacaagtgtgacttagaaatagttgaccacaagtgtggtatacttagttctaaatttgagagcataacatatgggtctcaaagttaagaaagtgtggcataacacaattacggcagcaaaccaaacacatgcgtaagaaactgtggaatcactaaagtgtggcgtggcaaagtgtggcaaccaaccaaacaaccatttactctcgcaactgtctcagtgtgcacgaatcattcaaataggataagcgagaaacgctaaaggtgagtgtttttttttttcgcgatagatgatgaatgaaactgagtttatatgacaattatttgatcgtgcaaacaaatgaattaaatattataaagttgataatttgatctataaaaatgttttacaaaaatcgtgccgttggtatcttacataattcgtgttggtgcgcgtgataagatccaaacagatcgccacaccataaaccagttggactctgtgattaccacaacaatcatgaactattaacagaacgaatatccgaactttttcgtaaggatcggaaagatgagcttagaagggcaagggagagaatggatattgttctggaaggacaaaaaaaaaaagtactactcacaaggcattgccaaggtaggcgattgtcgattggcaattagcaggaaaattggaggatttaaagggttaggcaattggcatcatgtggaggtaacaaataaatgcacataagcttgaataaacaggggcacacggttggaaaatcctaataagtttgcgcacaagccatatattaatcaacaaacatcatcagactgtatacctttacatctctgaatgaatgcagtattggataagaaaatgctggacagtggaaaaaaaatgtcgtaaccatcttagttgatctcggtgttaaatattcacatttaaattttcacctgtcaatcagtcaatctagctaacacgtgtgaatatgtacatcatgttaacttgcacaaattaaaaaatggatatgaacaagcaggaatggctgcagaataaagaatgagaacaaaccgctactatcagggtgtaggcctgcactagatgatcaatgtacacgcacaaggcattgccaaggtaggtaggtagatagaaataagatgttgctttgctgtatatgaagtcgtcagatttcttttgatccatgcgtccggtgcctgcctagccagtctaggactgtcagtaagctcagcggaatgtagagctgtcgtcacagagatctcatgtaaacagacataactgctttccatagaaatatgctggcagcatgtgaaaattttgctccttcagtcttcagtgaagctgcattgctcctaaagtggcattcatatacattctctctatttgctttcagctgtactgagaacaactctatcctggactcctggtcagaccaaacgttctaccggtgaatcaggacaacttgctgccgtttgcgcttccagaactctctgcattgcatagtgacacctaaaatttaaaaagaacagtacattagaatagctctaggtttttaggataaatcaatgcaaatgtaacggcaactgagtgagcatgcaactttcttgtgcgcagataaaaggcgagtttgccaaaagccaactagcaaaggcataccattgaattgtcaacagctgttgaaaataaatggttactaccgcactccaaaggaatcatttttcaaaaaaggttactaactcaaatcaacgtgacattacaagaaaaccccagtctagaaatggagttcctattcagagtatgaatacttcacacgagaaatcaacaaaattatatttgacatgacagacaaacacgcatacttgactgagatgcacattaaacataagaacacaatagggactaaccatcagttcttcattcattctttgtgtgttgttttgttgtcatatggtccaacaaattcttagcaacatagccatggaaaaggtactagcaacagtacattggctactatacaaggtactccctccgtcccaaaatataacaacttttagcactcggaatttgtcccaaaatataacaacttctctatcaacattctctacccaaacaatcacaacccttccaccattcacttttcccatctacttctacttctcaatcaatcataacatctccccatttaattctacctatttttttaataactgtgtccaactctaaaactttttatattatgggatggaggtagtacctataaaatatgctgtattatgtgtgcatttcttataattaaatactgttcgaatcttacctccatggtaggtgatccgtaaacatcgaaggagtaacggcaagatcagtgaagttctccctttttgcaaaaaaagctttatatggtggttcacttccctgcaagctccagcatttccaaagagggaagaggcttcttctttgccgctctatatgaacaactaggcctggaagaaacatttcaggaggctcaactggtatatccctataagatgtgtgacgctgttctgaaccagaatcgagcccatgaagggaaattgtctgggcatcacaatcagtatgtagaccctgagagctcataacatctatggatgaattagacccattatacccattgatgccattttgcaaaattgggaggtctggctcagaagtacaaggtgcatcctggtgaggaaaccgtcgttcagtagatactgccctccctgtaatagtgaaaatgaattcagaaagaaacttgttgaaaattcaaatgagattaaaaaaaggttctgaacagcatagaagattgattcgagtcatcagttcttctatatttgtccaaaaggaacaaaagggtaagataaaataatttccttcaaatgtgtggtgcctagcactatagtcctccattatgccaccatcaggaccattatcatgatacttgttaacattcaaaattctgcgagcaagtttctgtatcattgctgtatcagctggagagttatctgaaagagcccttattgcagcagaccgcagcctcagaattgagttgattgaaaggcgagaagaaaactcatcattgcacacaatgctggaaaggaagaggaaacgaatactcaaagaagttaataaattgtcaagagggcaacacaccatgaattgaaaaccattgataaatgaattttgtaattgattcttagtttagtcttacgttgtaacaaattgcgaacaggcttcagctattacaaagtccacacaaggtagtggtccgtatgcatatacatgcacgtttggatacctgccaaaaagctgtgagagaacaaagttaaactatggagaaccatggacaccatacactccaaacaaaagtaacactcattaggaattataggcagggaattaaagaaagtcaaaaacaaaaatacaaatcaacaatcatacgatgacctggtccagacaaagttcactgagaagttttggccttttgggcaatacgtcagatgcgcacacgcgaacacacacacacagatgactctgctgttcccgtagttcagacaagcttaatgggatagtcatagatgttctttatgttgtcgtatataatgcctatactacagtaacccacttttatagcggtgcagaaggatgttggtcaatagggaaatcagaaaaaggtaatgtcaggctgcagaaagaatatgattaataacaacatgctatgctaaagataaaaggtgaagattcagccagcattaccatcattccaagaactgtagcaacagaaccccctaaagaatgcccaacaactcgaattttatatccatggcattcactgccttcccccaccagtgcaggaagaaatccaactgttagggatgacgaattatctgggttggcattgtgacaagagaagagcagattagccactatagtcatttattgtacttaaattaacaatattaacacacacattgcatctaatcttctaatatgaggtactagtttcctaaaaacaaagagtacatattctgctgcaaacagtcaaatattgcaatatcagacaacaaacagtaactagactagcacctcctgtgcagtcgttgagttgcatgaaaagctccctggcggactctagaattccaccatgtccataatgcggaaaggtagaaataactctctcccttgtagttgcaggtaactgttcacatctgaagaattagcagtgtcaacaaaacagattgtggacagtagatagcacaataaaatggccagcatataggtttgctccctgaaaacgttgcacagtttctaaagtggtccctcaacctcatgaactaattaattctcatccttctatcagttttacttcaagatattatacactcatacactgtactaaagtaggtcaaatagggatgcaagagtatctggtttggctgacccatttacccatcctaggccatttacttcacaaacaattcgaggatgtaaacaaagtggactgccaaattaaatggaatgtgaacagacaattaagtaaggtagatcaactggacaacttacgtccatcactaagatcaaattatctgatttgattaccagtaacataaagcttgggtgtacatgttgtggactttgacaaatggtgatatttcagatgtattttcctatgagccttcaatagaacctcgccattataatcatatttaccacataaactccaattgattaacacaataaaccctataatatgcaattgaacggtacaaaacaacttgcattgcatcgtgttccattgagaaaactgatcatatgatggcaaaaataatcaaaactggcaagtagaagtaaataagaaaattagtataataagttcagaagagcaggagtttaaggatcagaataattaattttgaaatttcaggttaaatcattttgtgattgttcatgttcttctaatcatgtgaatgctaatcagagcaccacagggttgaccattggtatttaactatcagcaaatggcttgcagcaagtagtccgtgaggaaaaaaaaagactaattttgaccacaagagtagaaagattagataagaatagacgagatggctatcaagagggaattactttactagtccatccaaatcctccatagtaaatgcacattctctgcataatccatcggttatgagatcttctggtgtttcagttccacgaactccaataacaactgtctttttgtcatggaggaccacgacaaagtaagcagcttccctcttgctctgcatacataaaaagaatcaaatcaagttcaatgattttactgaaaaaccaaccgtgctatgctctttatcaagtatggctgggtttcaatgcctcccttcaactgtaagcatgtctaatgtaacaacaaaatcagcacagtacggcaaacatatttggtcatccacattactctcaggctctcagttcgttgcattcccagagggcatgtatgaggtaaatgtggcaatgtgtgcgttgggcaaaggcctcaccagccaggagccatagatagtgaactggtaataacatggctagggaggagaatgagcaggagggctgcaaaggtggtaaagcatgatagagccttcaatacatgatttgcctctattgactaaaacatagggatgcttatctcttaacctctatttatgcaggcccatttgcctgggtcaccaagcatggcatgtatacatgtgccgcacatgacacagctacttaaggtatgtgaagtacattactgcaacctaaaggatggcttactttaaccaattcaccaaataacgtcgaaatgtacataattaggtacaggcgggatccataaagtagatatcaactatgagctaaagtaacattaacatgtggcaggttacaaatgtcacttggaacgattgcataattggctgaaatatatttttcatcattgcaattttagtttataaattccaattttatccaaactcgtgttacctggcaaacacggccccgtagaagtgctgcagctggtatgtgaacaaatcgaaggaaagcggcagcatgccctcgccaccagttgtcaccatcaagtgcagggcgcctgcatgaagaccaatatgtggatgtcatataaggcaagaacagcataagatgttcaaacttatctcaatgtaacagttggtccagttcaaggaggattaagcaaaataaaaatcaaatttagcttgcttcacattttaccgaacaaaatctccagctgaactggccaaaaagaggatcatcaaccataggggtatttggcaataaacacacaactgagaagtataagagagttcaggagatataccttctgcgcgaccatggagttaaaacaccttgtctgtaaacccatgcacatggaaacaaaatagggtttctcccaacatcaaggagaggtccctgaaataataccacgtcaaatgcaattatacaaggaagggaggtattaaacttgttccagttagatagtgtttccaaccgtgtaacatgcttcagcaaagggatgaaggatagcagcttcttgcataaggttcagtggcgcttccgtaaggtcagtttgcaaatgaggcaaattttcatttttctgtaatagtgcaagccctaaaacatgcaccgtaaaaatggatccttagtatgctctcaatatagtgacaataacaaggaattccataaaaaaatcatatgtgatgcttgtacactcataacagtctacattatactgataaaatagtttgtcataaagtgacacggcaatacaacccatgcggagaatctggtcctgtttagtcaactatccatggtaacctaaccgctagcaggcaactactcaaagtagaaaagatgaaagcatggtgctatgtaatttaactccaaacagagcagcactttaagctctgtactctttttgcaatattgaaatttccgtggtctatcaagtaaattgcaccaaacccatctatatcctatgaagaatgtaacttatacatattcatttaaacatctgaattcacaatatatgtattatagatttttgcaatgagaggggtttcatcgggaacactgtattactgtcttacaatttactcacctccaattttctgtgctaaatagattcctctctagattttgtacataagtcatgtttttaggaggtggacagattgcacacatatgactacaagtaggtggtaacaaaaacggaagtttatgttggagttctgaatggtacaattgagcctagtagaatttactcactgcttattgaaaacctaaacacctacatagctgtgcacgtctttagaaggtaagtgacaaaatttagaatattcatgtcatcatgtgtgttggcatcaaatttaattttgaaagtccaaataggacacagaacatattcaatgtgaaagcaatgaaacagaaaactgacctgctaaaagttccaaatgtcctgtcccagaagcacgatatgcaaccaaatcacccagaagtcttgccacagagtaaacctcatcctcttccaatacggttctgcatcagtatgtaagacaactagctcatataggtaaataaatagtgatatttctcagcataaaaagaataggtagtgacctacagatactttgcacgccctaggcagcataaagcttctcgaattccatgatcgaacacttccctgtaatgagctttccatgccatgtcatgtgttgcatagaacgacctccaccttaatatatcagaacccgtgaagcattggacaacgaccacaacccaggaaagaataagaaacaaagcaattaatgctcgtttcgagacatgatcagcttcatcctgtcctagattgcgagcaaggcaggccaattattgaacagaattgatggagcaggacaaaaaatcataagcaagtaggcagtggataaaatactagtgccatcaaaacctatcataatttagtactatattaagtaaaggcaaaagttattgacactttttacccatatttttttttcatttggaaactctaaggggagaaggctccagtaatgtttatgtataaagtttacttggcagaaagatttcatctaacaaaggttcaccattcacagctgaaatgcactacagatatatgacaggatctgatcatctgactcaaacataccaaagaaacaggaagtggctcttctttcatttgaaatatctctgacaatgacaagcatgagataaattgccccaaccaattgcattgcacccactgccatgccgaatctagtccaccacaaccagcgtttatacctcacctgttgagcaaaacaaaacagaaatagcagtatgataaataagtgctcagtagaaattctactcttcttacacctactctagcttctatggcagaattcaaatatcccatcagtacccataaagaatattctgagccctcctcactgatacatcttaaaggatggtatccagattacagatttataatgctatgctagagagttaagaactatgaatccatgatcctcactgatatatcgtcaacaatattctccagatttataatgatattaatgcgtgttgtttattgtaaaaagtttatgattacctatatcaatagattaaatatgattacaaagttaatgaactcaatttgaacaatgcagaatgccaacaagtggcaggaaaacaattcaaatccacaaatatgatattagattccaattcgaaatcttaaccctaaaccctcatgtcaggtctctgtgatctaataaaaaggtgctcaagctcacggtcacagtgtaacactgagtcgcttcatagtgtttggctataagcacattgtcctccagccatatgcatcagataaaagctcttaataagatgtattcgcagttcatctaagcttaatacgctgtatcttagcaccattgacaactcccgtcagttacacgcatttgcattaactcgcctcaaaattctgataaatggtgaaatcaagtccacttgttcagattgatcgtgtctcaaataatcccgtattgtaaccatacctagacaaacaaacaaaaaaatgcgttggtttatccttgaacggttgaaccaactgaaatcaaagcacaatttatcacgactttacgatacgtcagagttaagccgagcaaatcacccaactaaagtggcctaagctagccggcaaggagctcgagttctcaccctgatctcgtggcgcgcaacggcgtcagcggcgaccgacgctgcggcctcgtcgaggtggcgcctcgcgatggcatccgccgtggcgtgctgcgcgcgcgcggtgccgatcatggcgagcacgcggatccccgccagcgcgggcgccgcggcgagcgcgagccccccgccgcaccccggtgggagcacgccgtcgatgaggtagagcccgagcagcagcacggccacgttgaggcccccgacgaggaacgagaccacccgcaccatcccgagccggaaggaggcggcggccgcgccagccgacgacgacgccgccgccaccgcagcagcggccacggggtcgccggcgcccgccatggcggcggccgcggcggccctccgtcgggatgcaggcggcggcggcggcgaggagggggcgcggcggcggcgggggaggagggggaagaggaggcgacgaaggtgggggaggaggagcgggggacgaggcccgcgggtggcgaggatggggaggaggggctttctaggcatctctctcacccggccgcggcggccatggaaagcggagagggtcgcggcctcgcgggtggttggaggcggccgcggaaatagaaacggggaaggctttcgggtcgcggtcgcgggaggtggattcgggggcggacgagacgactagaggagtcgcgcggcgtccgccgcccgctgtttgttctggtgcgcgagctgatgtgatgactggcatgtgacaactggtttaaatctcctcctttttttttctccttctgaagctgtccttcggaattcgcttttttagatctaggcttaaatattcgtggaccacgtgagtacttgacgttcattctaagcaatagtctctctttgtatactcctgcaatactttgtttgttgttactagcaaaatacccatattttactatggttatttaaatatataatatttgcttgttcgaaaaataaatatttgactatttcataatattaacaaatattattggccaatttgtaaaaattgcaaaaggaattatgggatactgggttggcagtggcagatccattgtcaccgctactaatacttcatccttcccagattctttctaaattgatcatcatataagtttatgcactaagactaaggataatttaaatcacatcaatcaacacacccattcttccacagagcatgcgtcgattaaaaacccatgccaattacaccctatcatgcacacagtctctcatattgcatcaattgtatttcgatgaaatccgtgttcatgcagttatatgatgagcaatttaagaaattttggattctattatatgatgatcaatttgggaaagagggagtatctttttaaaaggagtacataattgagattttgaaatgagtcggctgctaagggtccattcgatttaaaggatttttggaggaaaagtgaatgattcaaattaatataagtaggaattaacactattcactcatttggaatggagggttagggtataagagaagtggaggatttttccctttgccatagattttataggcataatataggaatctaaacatccactgtaacctctttttttttcttttcctttgttaggtccaaggaaaatcaatactcaagtgactataatttaacaacaacataagaaagtttgtttaatttaagaaaaaagttcaaatgtcctccaaaactttgtctaacaccctgaacattaaaaccaaacatccaatcccctaaattctacaatacccttcatattatcctccgaggtggttttagatggtggtcttccgtatttctaagcttaaactagtggtttttaaataactaatataacaaaattaggtatcatcaatataggttgtcagtttataccatacagtgatgccatactgctgttatgttggtacttgtgtttttaagtgagagcgaacaagtggtaaaatgaaatatcaaagtggagatctcatatatgtccaatatgtatatcatgtgatcaaactgattcaacttatatacaaattagataaaaataaacgctatccaaaatcacccttggggttatataaacaatattgtaaagtttagagggttgtatatctggtttcaaagttcgggtgctagatgggctttcaatcgaagtttttaagaaaaggttagtgcaacgtggaatgtatagacacgggagaaagatgggttaattcgctctgccaccatatcgaaatttttatgacactaattttttttggtgtagtagaagaccaaataattcaatctaaaactttgacctattgcgaagtgagcgtagttaaactggttaggttcccttgtgatggaaccaacccacctgagttcaaatcctagaattgacacggctaattactttttcggtggtagacaacgaggcgagataaggtgtgcgtgtgtcttcatagagttgactgtctaattatattttcggtggtatacaacgtatctcgaggtagggtgtgcgtgtatctttatatatgtgagtctcatagagttgactgtctaattatattttcggtggtatacaacgtatcctgaggtaaggtgtacgtgtgtcttcatagatgtgtggtatacgacgtattccgaggtagggtgtgcgtgtatcttcatatatgtgagtgtcaacgaggcgaggtaggatgggcgcctgcctctgtactgaattttggtatgctgaagcttagatggggatttggtaaagcgtcaaactaattaaaatcagcctaatacatcaatgccacttacaccaacaaaacattttgttatgaagtaaaatgattaaaaaaaacagtgatcctaccaataccagccaccctgtttcccagctttttctgtgagagcaaggaccacgtttttccaccttatatatcacatactatctagtcacaaaataatgtcattttagactctaatttgataagacgtaactttaaccaattattttgtttacagaaattaagaaaaattacctaacataaaagtatgtcaagtgtttttttaccaaaaaaaagaaaaagactttgatcgttgcttaattataatcttccctattgaccaccaatatcaccttccctatctatttgagttggctagcttctactccctcgattttaaaatataagattatatcttctggaacaaaaggagtaactagacaagtcaaactggtttaatttggactttaccttcaggtaaaaataccatctgatagtaatctttcctccattggctgaaatttaaaacattttaaccattttgactatatgatctgcatatataattcgtttttcagcttgccaaaagaacttgtcaaccgtttctaaaaaaaaaaagaacttgtcaaccctatgaacgaattaaacttctagacaatactattcgtgcttgacggcttattttgccgcgagccgttcaaaggaaaaacaagagtggcacgtccctggtatatcgccaacgccaattccctgtcgaacgaaacaggcgcgtgtgggccgcggcccatacatatcatcgcgtcgcgcctcgagtttgaactcgcgcgcgtcgtacgtacgtgtacgtggcatcgtttgtctcggctctctcagagcatctccaacagcctctccaaatctaactctccaaacacctatatagccaactctccatttgatttggctagtcaaactagttgttcactccaacagcctctctatctaccctctctactttgactctatgacgccgggacccatatgtcagcatctcccttcttctttctccccttccttcccctttttctcttttttctcgcgttggctggaagcaggcggcgccgacaagctgggagcgagcggacggcggccgcggccgcggcgcgcgggggccaacggccgcggcgagcgggggacggtgggccacgccgcgcgggggacggcggccgcgccgagcagagggcgggtggccacagcgagcggaggccggtggccgcaccgtgggcggggaacggcggcggtggcgcgtgggggccagcggccgcgccgagcgggggacggcggccgcggctagcggaggcggcggccgcgccgcacgggggccggcggcggcggcgagcacctcctcctcgtgctccttccgtgcggttgtcgtgtggggaactggggatggtggagatgggttgtgtggggcccaccattggctagctaaatagagtggccaaatttggctagtagagggagggttttggccagccggatggctatcggttggagaggctgttggagcatgattttttattagaatggctaaaatttagcttggagagtggaatggagagactgttggagatgctctcattaagctgaacgatcgtgctgctgtgtatgcagccgcccaatcgaagtcacgcgcgactcagctctcacacacgaagctaaaacacaagtgcacaagttacacaacaagccaaaacacaagtgcaccagttaaggccggagagcctgagagcgcgagcgacctacccttgtctcgcgcttggcgaactccaccgtcggcccctcgccgccgccgccgctgccccccgcggagacgacggcgagcgcggtcacctcctgagcgcgcgccgtgccgaccatggccacgatcctcaccgccgccagcgcgaccgccgcgccgaccgcggcctcctccctccgcccgcagcgctcagtcacacccacccactcggccgccgccccggccgccgcgaccgccacgttcacggccgccagcgccgcggacatgcggcgcaccccgcggatccggaacggcggccgcatggtttggcgcacgcgccgcgagatcgaggagaggcaggccgggcgcgcgcggcgccgttctctgagtgcacgcgtgcatgtgcgggcgcggccgggcgacgtttttgtagcggcgcgcgcgccgcgcgggggtgcgaggcgtgcgagcggcatcagccaggccagccaggccagtaggacgacggttctttgcttgggcgacgccgaggcagaatagaatattagtatcacgtactgtacattgttttggccctgccaattggacgaggcgtttgcttgatcaggggtgcattgcatgcatgactgcatgccatgatgcattggccaacgtaaatgccaagccggagggtgtggcagtgtgtgcagtgcactcttggcaccggtacgtccaggcaggcaggagatgctgggagggcgtggctggcagcctggcactggcagctgcccgggcttcgcgtcggtggttggaggctgcttggagctcgcggagtcgcgggaagtgaggcatctattctaccgcgcagtgtcgccacaaaagctggaaagaaaaggaggaagcgtctttctttatctccgttggggcctcggggccgaggagacgctgacatgttagccccagtttagttagatccatgccggtttagcggtttaggaccataccggtttaatacaatagatggatgggccagcccgcctgcctattccattgaaatagtcctagtactaccaaaaacacagcccgttatccacagatggacgacttgagcagcccatttggcccaaaaacctattgagattactcctagtactaccaaaatcataacgaactgttggaatcgaatcacttcgccattgaaaaggtttctaaaaaaacaaacgtcaccattgaaaagggctggtgctgaccacttgatctacgtcggaacttggaagaacactgatacattgatcaaaaatagataaattaagacactgataccaaaaagatctaactctgcaaattctccaatactggcaagttaaaattagggtgtcgatgccattagctgatggcagctacacaaattattttctttttgtgtgacacgtcggtagcttgcgaatctctgcttatggatctattaatccagttgcgtcgctttcaaggtctcgtcaacctaattaagagcaaaacagtttgaagttcggctgtgccatcatgatataataataatctttgcgcattccgtcatagaaaaggggatatagtattatactagccggtgtcgttctttgttgatctgccttttcagatggcacgcaagggtaactttcgtaagggattctttcagctgaattcgcataatctatatatttcctttctttgcatgcgtttgctaggttacgtgcatgctgatgcttgtctccgtcagctccgatcaatctcgtacccttttcccttactcccccccccctcccctcttctctacaaagtgcaaacaaataatattcgatctctggcccaagctttctttcatttgcttggcttagaatttaaggtttgcatctttcagtgagccatgattccggcgtaccaatcacatatcctaggacgttcgaggacgacgcctccatatgctgcttggcccagttctccgaactttaacttttccatcactggtggagaaatgctttttagtcccggttcgtaaccccggacaaccgggactacgaatccgggactaaagatcgctatctttagtcccgggtgaaataaccgggacaaaagatcgatctttagtcccggttggtaactccaaccggaactaaagataaggtctaccaaccgagactaaagagggaataacagcagtacagatggtcatctttcttttttttcttttttattttctcccgaattaagtggcatgcatatccccaaatcccaaatcaaattaacatcccaaatccacatcacaaatctttaagttacttatacacataaatcaaatacatcgcaaatcctaaaaaaaatacacaaatcaaattacatcacaagttctacaaaattcatcgcaaatacatcacaagttcacatcgcacacaaatcaaatagatcacagaatcatgcaataaatcacaaattttaaaaaaaaaagaaaaaaagccacagaggcgccgctcggccggtcgctgtcgcctcctctccgcaccgccgcccgccgccgcgcaggccgccgtgtcacgccccgaactagtcccgaccggaactagcccgtgacgctccaaattaacctgttaatcgataccagtcccaggaaacagtgctggtatcacagggagacagaatatcacagcaacagaggtctctttattatagagtagatgtacagtcatgttgggctgcggacagatcccgagctcacaactgcattacaaaaggaaagcggaagccaggacttggaccaatcaacacaggcgcgacttgggaactaggccgaaaccctaaaactcatcgtagccggcttgctcctggaagaactcctcatcagcaggatccgcttcatcttcttcagcaactgggggggaattatttatacagagcaagggtgagtacgggagtactcagcaagccatgggaaataagtgtttaatgcaggcttcaaggaaaggctggtgtttttgcaattaattttatttgaactcttttctgaaacaactaagtgagtgcttctcaaacgacacggatgagacagtgcgtctcgtccggtcggagtatgtgtaatgtatcagtctttagaatttaaacaaggttggcacccggccaacagctttttcaacggccacccgggccaacaacttttcaaacggccacccgggcctagctcatcccatcagctgcagatttttcaaacaccgaaccccttttcacacagcaatttcacaagcagtagtcaaacaaaactacgctaggaatcacctcacatccgcccatgaccgtgggcacggctgttcgaacagtttgttaacctctgcagagggggtacactttacccacacgacattactaacccggatcacccagcccgtggggatcagccacgtcgggagacctccaagctttcatgacaaggcatttccaaagccgacacaggtttaccatatgccgacgagaggggtcccagaccaacaacaggttaggtcccagaccatactgtgctaggaagcccaggggtcctccccgacaccaccccggcgaatccacatgtctctcggcatcaaggctcccctgataagctagttactcagccaggggtgtcccattccacccatgtggtcatacttgtcttatgtttggatgaaattccaaggaatcggtccttaagtgcgagagcgggaaaccgtacacccggtacgtttcccggtccgcggttttggaaattcatttagttcgcaagcgccgacccaggtgtcgggttttccaagtcttttgtaaaactccagttttacccaagttattactcagattttaagtttgaaggcgaccgtcgatactggcacagggtgcacgaatatcgaggcgcaactggatggttacaaggggacatggtatagcaattaacaatggaaggatcaaatgcaacaagttaggtaggtctgccaatctgccttgcagacggaacaacagattaagtgcaatcctatcaatgcataatattttgcaagcaatataattagatttcaaatataggctcaagatgttcaaaggtggcttgccttgctcgagatctggagcttgatcctcgaaatcctcgcactgcgggtcttcgggctcggaaactatacgcaaaacgggacaactcaacaaatggcgaaaataaagccctattaatgacctctaagcgtgccattagatagatctcgagatttgagaaattttggaatttgaacggagtcaaacggatttacggttgggaagatattgaatttctaagattattggatttttggtctaaaggaaaaggatttaattaaatccttttttttggaaaagaaaaagaaaagaaaaggggagagggagggaatatagacttccctcgggcggctagggcgcggcccgagagaaagggcggctcggccgagcttaacgggccggctggcccaagaaggcggcccagagcggcccaagacgcgcgcgcgcgggagggaggagagagagagccggtggaccgggctcaccatgcgcggtcccgggtgggacccgcttgtcagcggctcggctcaccgtgcggagggagtacgcggctcatgcgcgcgggtgggggagggacgcggtgcacgcgcgcggttcgcggtggacgcggatgcggcgggcccacgcgcagcctcacggctcgcggtggaacgcgcgcatggggagggactgaccggggtcggctcgacccggtctaggctgagctggcgccgacgtggcgcctacgtggctgccacgcgggccggcgggaggtagacgacgacccggccgcgaatggacggcgggcggcggcggcgagcggcggagcgaaccacggcgatacggacaaaagcgagcacatcgggcggttgctcgtgatgaggggagacgagccaacggctcggatttgccagaggaagcttgacggcggtgaatcgcggcggcgacaaccggcggggagggaagagggaaacggcggcgaggccacgaggggtcgattcccggcggtgagagcatctacgcggtttcgggaactcgatgctagcgtcggattggacggagctacgccgagcgaggctggcgacgtgtgggtgctacggagctcgagcggcgagcacgcggcgagcgacgacaacggtcggggcggcgccggctaactacggggagtctactcgagctactaccgaaagctagggggggagatggagcgaggaggaagaacggagggaggcatcaccgagatgaggaggggcgctgtgacgagaggccgacggcgcgggagtaatctctccggcctcgggccggggaagaggaaggagagggcgcggccgaagtccccttccgcgtccttgctcgtgccgactccttcgacacgcgcaacaacgaacggcgacggcgaacagagcacgggggcggcagctatggcgaggaggcgaaaacgagggagattggaggggaaggagctggggtttaaagggggcggcaatgtcggtttgggaaccgacttagggcggtcaaggcgcgagctgcgctcggcggtcgcggccaaagcggcgacagggaggatgacgccggcgggggaaaaggggaaaaaggagggggagaaaggggcttgcccttttgccgattcgggaaaaagaagaaggggagcgggggcgacgcgacagagggaggaggggcgctgcctccgtcccttggcggcttgcgcgcggagtggcgggggccgagcggtgacgacggcgatgacggcggcggcgaccgggcggtcggccactcggcacgcgcgcgcggcttgcaacgggcggtgtccgcgcgggcgtgcgcacgcgaacacggcgcgcgggaagtggcagcgagggagcggagagggaggacttggctcggcgcgggcggcttacgcaggcgcggcagagcgaggagaggggaagggggcgctcggcgcggcggctcacgcgcacgcgcgcgggcggagcggaggaggaggagcactcggcgcggctcttcgcgcacgcgcgcgcggtgagcggggggggggggggagc

SEQ ID NO: 8768 - DNA, 7493 bp, Oryza sativa
tttgtgaaggttggatctcacctccgaaagggaagagatacctttagtggaaggaggagtgcttagtgcaacctcttgaggaaagggttagctaagacccggctcttagtgagctcctcaacggagagtagaatcccctcaaggattcgaactttgagaagaacttcttgagcttcatctttggtgactttacttcctccctctccactagctttgcttgtttgagccgctataggtctagtggctgtttgtgctagcatattcttgttgtaggctcatccaacatggtcctcgccatctcaatgagagtcctattcttcctctcggctactccattttgttgagatgaatatggagccgagaactcgtgcttgatgccttcttcatcaaggaaactctcgatgcacgtgttcttgaactccttgccattgtcgtttcgaatgttcttgatcttgaggtcgaactcgttttgtgctcttcttgcaaacttcttgaagatagtttgtgtctcactcttgtcatgcaaaaagaacacccacgtgaagcgtgaaaagtcatcaacaataacaagaccatatttgttacctccaatgcttagataagcaattggtccgaagaggtccatgtggagaagctccaatggtcttgtagttgtcatcacattcttgtcgggcgatgtgctctaatttgtttgccggcttgacatgcactacacaccctatctttctcaaattgaacatttgttagtccaaggatgtgatcgtgctttagaagcttgtgaagattcctcataccaacatgggctagcctccgatgccaaagccactccgtgttggacttagccactaagcatgtctcatgtttggctttacttgaggaaaaatccacaaggtaaagctttcccttgagaacacccttaaagactaccgaggaatcattccttctatagacggtcacatccacatcggtaaaaagataattgtaacccatagaacataattgagaaacggacaaaagattgtagtttagagattttaccaagagagcgttggcaatggaaagatcattagagattgcaatcttacccaatcccataacatttccctttccatcgtccctaaagactatgttatcttgtgaagtgccatttggatcaagagttgaaaatattgattcttctccggtcatgtgattggtgcatccactatcaatcacccaacttcttccaccggagacatattcctacaagagatcaatttctagttttaggtacccatacttgcttgagtcctctcatgttagtaacaagtgccttaggcacccaaagtactctcttgatagaaatattcttgccccttagactaacatacttagcaacaacacgaccactagcattcttcctaagaacataagatgcatcaaaagaacaatgtgaagcataatcattaggaaggatacttttggccttaacaaaattgctaagaccttggggcctcttgatcatcacactcttgtccacctttccttttggtggaggaacatacctaagaccctcatggttgaagttgtccctttgatagcctaggtactcctttagggtcttactacccatatgccacttaagtaggccattgtgaaggagtcccataagcttctcattttgcttttgcaaagcactcaaagaaatagagttagtagcataagcttcaatatcaatatctttgcatctcacacatggttcattgcttgggacaattttggaacaagatggctcgctagggagagagacactattctttaaggtttcgaacttctcttcaagagtgaggtatgctttgtccaagccatccactctctcttgaagttgagtgttcgccacctcaagattagcatgagactctttggtttgcttgtaaagccgtaccaatgcctcatttttttctctctctccttagcaagctcactcttgagttcatgggaccgctctttctcacgaatgagcaaagcctcttgcctctcaagagttgcatattggtcttcaattctcccaagcaactcactcaagtgtggtagggattccttagttatggacttgaacaattcatcatccataacctcatcctcctcatcactaacaagatcaacattaaatgacttgagaggagaaggtaccttaggctcctttgccatgaggtaaacgggagcatcctcatcacttgagtagtcgaagagtctcggtggtgatgaaggcttgacggcgaacgtggcgactccttcttcatcacttgagcttgactcggagtcagagccgtagatcatcccaaagtgagcttggccataatgtaccctcttgctatgcttgtgcttctccttcttctcatccttcttctcactcttcttcttatcttccttgatgtgggaaccatccttgaggtgagggcaatccgcaatgaagtgcccgagctctttgcacacgtagcacactcttgcggagtgtcttccacttgacttgttggagtagtgcttggaagatcctcccttgaagaagccgcttcgcctcatgaacttgccgaacttcttgatggctctcttcatcatcggtctccaccttgctcttacacttgcggttctcttcttcttcttccattgccttcaaagccaagtcatccttcttgatgcttgcagttgagctttggttgatgtattggatgacatccttggactcttgcacgagcatgtcatgggcaaggatgcgtccgagcaaatcatgaggtgtgagagtcttgtagtccggacgctcacgaatgatggtcaccaaggtagagtttcttggagtgattgctcgaaccatcttcttgaccacaacctcatcggtcatgtccttggagccaagtccttgatctcattgacgatcttgctcaaccggtcgtacatgtcgcttgggctctcaccatccaacatcacaaatctctcaaattgcccctttaggatctccaccttggactcacgaacactatccgtgccttcatgcaagttccgaagcgtgtcccaaatcactttgtcactctcaatgccatccacacggttgaactcacttccactcaatgcgctaagtattgcattagcggcttgagcgttcttgtgctcgttctcgtcgtcctccttggtgggatcttcgggattctgcaaaacatagcatttttcgactattctccaaatagatgagttaatagacttcaaatgcatcttcatcttatgcttccaagcggcatagtccgtaccattgaagtacggagctttgccactataggtactcacataagatgtagatgtagggggatagtcataagggatcttagctcccttatcactatcgatcccctcccccgcttggcccgacatgatctctctaagcggttaagcctaattaggagattaggctctgataccaattgaaagtgtcaattaggcctagaggggggtgaataggctaattcaaaaattcaattaaaagcggaagcagtaattttcggatatttccgaaattttcggatatatccgaaaattttcggagtcagcacaaatagcaaagtaaatcctagatctagttgcctacaacaagaatatgctagcacaaacaacaactagacctatagcggctcaaacaagcaaagctagtggagagagaggaagtaagtcaccaaagatgaagctcacgaagttgttcccgaagttcgaatccttgaggggattctactctccgttgaggagctcactaagagccgggtcttagctaaccctttcctcaagaggttgcactaagcactcctccttccactaagggtatctcttccctttcggaggtgagatccgaccttcacaaacttctcccagccaaccacaagtagatcggtggctcgggagtgacacctagccgcctaggagtccttaacctccaagagtaacaaatgtagcaaagaactcccggagatgatgcaagtgctcacaaatcttcacgaagtcaacaacaagcactcacacaaactcgaatccacaactctcacacacacaccaaatccaaatcgaacacgggtgagaggggaaacaagaaagcaaggctcaaaagtgctaaagagagagcaagccaagggcacaaatgattggaatggaaccagcagccctcacaagtgaggggggggctatttatagccacagcccaaattctgcccattatgcacaataattgagattttcggatattccgaaagattttcggacaagtccgaaaattccagctcagcaccaacagcaaagtcaacgaaagatttttcggacattccgaaaattttttggataagtccgaaaatttccaccaccaaaacatggttctggatgttttcggaaaagtccgaaaatcactttcggacaagtccgaaaatacacagaagcgatttctgcctttgctgaagtttttcggaaactctgaaaatcaattttggaaaagtacgaaaataaacagaaccacatttgccttcacagtcattttcggaaagtccgaaaatgtctttcggacatatccgaaaatttccagaagcaaaaattggttctgtgcattttcggaaagtccgaaaatgactttcggaaatctccgaaaatttccagaacacatcaaactgaggggaaacacttttaaaaaaagattttgagcactttgatcactcctcatatgtcaatgcatcatccctcttaatagtgcggcattcctattgactcaaatgaaaagaaaagttacaatgtaccatttgctcatctgccgcatcgcatcacatcaacgtatttggcgggatatgcattatggtaactcattgaggacataacaaacttcacatttgcttaaataaaaatgttagtcctctttaatcgcattgtaattaatcaccaaaatcattaggggcctagatgcactttcatgcagaaaagggatgtttcagaggaataaaatgttcatacttagtgtatctgtcaacaacaaccaagatcacatcaaatcctttggaaacgggcaaaccttctataaagtccattaacacaacttgccaggctccagaaggaattggtaagggctgtaacagaccagggtaagcacaattttcatgtttagccctctgacagatgtcacactgttggacaaagtcagtcactgatttctttaatcctacccaaacaaacaacttcttgactcgctgataagttgcttgaactccagagtgacccctcacagcagagtcacggaaagcagatatgattttggtttgaatagctgaattagctcctatccaaaccctgccattcttcttaattaatccttgagacaaagtaaaaccctggccgttaggagaagaaatggccaattctatcagcagtaattgagcctgagaatccacaacataagaattcaacacttcttgtatccacacaggctgcacaacagaaatagcctggagagaaaagaaatgtcccacccgagacaaagcatcaactgacttattgtccactccctttttatactgaaacctatactaaagaccaattaacttggtcatagccttcctctgtaattcaaaacccaaaacttgatcatccaaatggcacaaggattgatgatcagttttaataacaaatggtccccttaacagatatgctctccatttgtcaacagccatcattatagccaagaactccttctcatagatggataacttctgattgtttactcccaaagccttactgtagaaagccacagggtgcccctcctgagaaagcacagctccaatgccagtggaacatgcatcagtttcaatggtgaatgacttagaaaaatcaggtgatatcaaaacaggagctgtaaccatatcctgttttaaggccaaaaatgcctgatgagcttgatcagtccacacaaacttagcatttttctgaagtaacatagttaaaggtttagccaaaatcccataattctgcacaaacttgcgataatagcctgttaaacccaaaaaaccccttaactcagtcaagtttgttggaattggccattgccgcattacttgagttttatcagggtcagtggccactccctgagctgacataatatgtcccaaatactctaactgactagcagcaaaagtacacttagataatttggcacatgattgatgttgctacagcactgcaagacacatttcagatgctgtaaatggtcttcccaagattttactgtaaatcaaaatgtcatccatgaaaagcaacacaaacttcctcaagaatggagcaaagatggagttcattaaacactgaaaagtggcaggtgcatttgtgagtccaaagggcataactctaaattgaaaatggccatggtgtgtcttaaaagctgtcttatactcatcaaactccagcatgcgaatttgatgatacccactgcgaagatccaacttagaaaaatatttagtgccagccaactcatctatcagctcatccccaataggcaggggaaacttattcttcacagtgagagcattcaaacgccggtaatcaacacaaaacctccaggaattgtctttctttttgcccaaaagcacaggagaagcaaaaggactgcaactagtggtaatcagtctagctgacagcatttcagacacttgacgctcaatttcatctttctgagcaggagaatagctatagggacgagaattaacaggaatggcattagggagcaaaggaatagcatgatccaaagctctatggggaggtaaatcagaaacattctgaaaaacagactcaaattcagatagcaaagactgaatctcaggaaattcagacacaggtatagtcaccccaccagattgttccaacactgcaatggcccacacatcattgccctttgtccatttcacaacctgttcaggagtagcttcttgaggagtggttaagtcagaagaagactgaattccctgcagcttgatgagagaaccctgatacgaaaactgcagccacttagcagcccaatcacatgtcatagggctgtattgagttagccaatccattcccaatacaagatcatagccccccataggtaaaaccctgactggaaaagaaaactgatggccttgcacccaccaatcaaattgagaaatctttgcatcacaaaccagaacttctccattagccactctgacagaagtgggtggaattggctcagacagaaggtgtaaacgatgacacagagcagaattaatgaaactatgagaactcccagaatcaaccaaaacaataagcacctgattgctagacagagccctgagttggacaatgttggtgtgagaagtgccggccaaagcatgaagcgacaaattggcactgtcttcagacaactccaacccagtaacagcatccaaaagttcatcagtcagaacaattgcctcctcttgtaactccat

SEQ ID NO: 8769 - DNA, 39567 bp, Oryza sativa
cccccccccagcccccacgttgtctctgccgctgcttgttgacttgatccactcggctgagtcagcatgtgggcttacgtctcacccgttttgtgtttagagggcaagaatcatactcagatcatagtcgagagagcaaattaatgtctctcaatcacaaaaccgaatatttcacgatcccaactaatgaaaccggtgcaaaaggagtttttttttgagagctctccactttgagaacaagctgtagtaactgaacatacgtgcaaacgcactccaccacgcacacacactccacacacgcacccctacacgcatgctagacctatcaactatacacacatgtgctaatgagatacacaaagctacctaaggaccttgtgcgtgacgaggacgtcactctattattgtggcgttggcacgggagagctggaaatttatttgggaataaatcccggtgagacgcgcgggtatgatcccagggatcgaacccgcacgggctgctcgctcaccagcaatgctagccaaccgagcaacgctcggttctcagtgcaaaaggagttttgggggcggtttcatccgatatggctcgttgacttgatccactcagctgagttagcacgtggactcacgtctcacccatttttgcgcttagatgggaaacaatcatactgggatcatagttgagagagtcaaagtatactttatatttcctaccatcccgtcaggggacccaaaacacccggcccctccgactagatgtggcccaacccaactcgtggccacgtctcgccgtgcatttcagccgctcttgccgtgccacgcccactcccacccatttcacaggacgcgcgcggcgcgcaacggctggcctctcgcgcgacgcgaggcgcgcgccgatgccaacttggcgaggcgagcaacggggcgcgtggagttggtggcaatggaggcgtacgcgtggtgtggataagccgcttgtggccgcctcacacacccgctctcctccaccacacgccgcccaatcaccacctcatatacctcgcgatccctctcaccgccgatcgatcgagacgacgcatcacccatctcattctcatcatcgtcgcgtgagagagagctagagctgagctaagaatcatggcttcggtgggattcgggagcagagtggcggcggcgggcgtggcgccgtcggcgtcgtcgtcgtcggctgggcggaggcggccgtcgcgggtggcgatggcggtcggcgccacgagggggaagccggcgccggcggaggaggagaagagcctcgccgacttcatcttcggcttcatcttcaagaaggaccagctcgtcgagaccgacccgctgctcaacaaggtcgacggcgcgccgccctccggctccactgtctcccggaaggcccccgccaagaagcccgcggcgagcgccgccgacgaggaaggcggcggcggcggcttcaacctcggcgccctcttcgccaagaaaggctgaagaatcctttcgaattctacgtacgtatatactccaacgcagagcgtcagcttgcctacacgatcgatgtattaccctcctcctcatcaaacagtttgattcaaactccaagcttaatttggaggatgatttgcgtatacgtagcaacatgtgaggtgtgactcaaaagtgattaattttttatgtgaaaatgtggtttatatacttcatacaacacacatcatttgttatttcttttcaactcaacatggatgaatggattaaaagggttaagcctgctgatcatgttgtgttttgtctcacaaagcatatggtaaaagattgtgtatgttaacttagtgcctacgtgtgaggtgtggtccaaagtgatttttgacgtgataatgtggtatactacatcatttcttgttctttccaattcagtgtgaggaggattaaaagggttaaacctgaatacctgatgacattgttttttcttatcttacatacatatactccaatttggagtgaacttttctgtcaagaaaaaaaatagcaactttaggtgttggtatgaaactatgaatcaaataatctggagagttttgcacaaagattggcagcctcatcttcacatgatccctccggccggcctagagcccgcttgattggcgactcagattggaagcaccaagccttttcttttattttgcacaatttttttctgttcaacttcatgagcagacagattgcagagagttccaaccggtggctagttttgcagaatgctttctgcctcaccacaattatagaccaaaactgaacgcatacacaaagtgtgtaaccttatgaacaaggactatgcacaaaacccatgaatgatccaccaaaaaacaattgaacattgaccatatctctttacagtatataattgttgataggtaaagcggcagtgagacctcttcatgtcataaatacacattaggacatttttgcctttgcaaagaatatcccagcaaaaagacctgttaagtacaatcaggagacatgttatgtatacacacattcataaagaaaattagacagcaattcagcagtgatgaagcaagtactcaccaaaaattatgctaaacaaattttcaacactcactggtacgttgaaaagcaagataccagccaccgaaataggtatcttgttcagtgaaccaacaaggctgaaaacggaaaccaaataaaaaaaaatatcaacatgtagtcaactttgctggagtgacaactatgcaaatattattttaatgcaaatgcaaacatgttttattggcaacttgaaggaagagagttagtagtatcatatcacctgtaagttgttgggccagtccgatgtaaaaaccacacagatgagaagctaattgccagacctagcaaaccactagctgttgcaaaagcccagaacataggatctctagtaacttcactgcagatgagaggaaaacatcgtgtataagtacaaatggagaagcatggacaacaaccaattctgcctttgcagcaacagttacaggagaaatctaacatcagggttctcccctgatgtattcccgttaaaaaacaacatgtggaaacaacgaaaagttcattgatcatctaacttcatattcaagttgattgcaataggctgaagcttcatttatgagcaaaaacagaacatcttatttatcgaaacgaagccaagtttagaagcagagtagatgtacagcaagattttcatatgtccttttgtgttacttgcataactggtaaattttagggcagattacttttgaatggttaggttgggagtgaagattgagttcttacacttcataaacgtattgccattcgtcgaagataacaatcaaaatgagtgctaaaggtatggagagcgcattgttaagtaacaccatagaaacttcattgagggaaccggattttgttgattgtttggctacatccatcacacgtcttagtgtaagctgtaacaagaagtaggaaaattatgtacaacccatgtgactagtaggaggaacaagagaactgaaggattagaatacttcccaaaaaaaatctgctaagaagttcatcaatatattaattgtaaagaggcttgcaaagttgcaatatactgtggatgcaaaaactatgatcagaaaattcgactaaccgagtagcctgctgtcagaaagcaattgaaaagttgccacatgtagccaaccggatggaaagaaagatctgtaatccccccacatacagctgatataacctgcatagcacaacagagataagcacctgctcagttcaacaactatgctgttaaggtgtaaagttcttaatacaggccaacaattacataattagctaatatttggaagtaaacaagaggcacgtggagcagaaaaggacataccattagacacaaggcagcccaaacctttttgttctgacccttcctgaaaatatatatttctccaacagctgtcaaaatgtttgtcatgttctttaatatcgtcaccattgcaacatttatgtacttcaaactgaaaaaacaggaatatatagctctgttatactttgtgcaatatcataaaaataaagttcatttggattttggatattggagctttagggtgatggaccgattgtcatatatcatgtcgaagaattacgtacctgtacattccagttactaacatcccaacaaaaataagattcactggaatccagactttaatcaacttccatgtaagtttctccgttgaaatcacaccaaagagctcaagtaccagaagaattatcacgcttataagattctgagccacaaaaacagccatgatcagatcgatgatagaacttgtttgccaatgcaaccataacatcacaaatgcatatgaatgccgttatgtgtaagccactgaactaataaccaactcactgtgaatttgtgattacttcaatgtcggtttgtgattacgtcagagtgaatttgtgattacctggtacagcataagcgatatgccagcattgaaattatagttggagagtacaactttgttgagcaatatcatactgcaagaggcaatacagtaacaaatccccgagagtagaggtccagttttgtttccccacttgctttgctgcttctgaattaagctgtcaaaaacgtcagaagtcttcctcgacaacctggaaaatagcattcaaaacaatccaccagtcaatttctccttccttccatatgaagctgagacacaaagaaaacaagtagtactactaaattagattagattacttgttggaagccgctttcctggcgacattggcggcgaccttgatgatggagttgttcttctgcttgaggaagccgtggatgatcttgtagacggaggcgtcggcgttcttgactgcgacggcggcgacgctggtgttgggggacttggcctcctcgatgtcatcgtactcgggcctgtagtccagcgacatggacgccgcacctgcaaacgcgagagcagtcactcactcctcacagctcactcaccatgtcagacctgagatcgaacagcaagcgagccgccattgccgttacctggaagagatcctcggaagcagaggagggaagaacacggagatgatgagtcgatggggggagaggggaatgggaggagatgctaaaatggaggaagggggagatgcctttcgacggcatgaaggggcttggagacgacgcaaagaggatgaggcggtggaggccgcggggggtcaacggatcggggcgcggcggcgtgcggcggaagggaggccggagagaaagtcgcggggcggcgggagagccgaggaggagaaggtcaatttggcggcaatgggtggaggagaattgttggagtcaaacgcaagtcaagtgagacacctcaccctggagaattcacacactcatcacacgggtttgaccttgttattttagccttttagggtaagtacattgtttacattgttggcatatgattatggtgatgatagtatgtaacatgtccatctgaccatttcacatgtttcttcctctcgtgtaacgtgtaagtacatgtttttcatgtactttagagcgccgagaacgttttagctaattagctacatgtaaaatgagaaatataattaacttataattaattgagtattaatttttaaaacttaaaaataggttcatttgattgtttaaatcactttttatataaaaaattttctcacgaaatgtatcgtctagtagcctgaaaacatgttgacaacatgttgacagaatacgagcagtagctaagctcgattagctcttttgagtgcgctctaaattttttttgttatcatggtttagaatttcgggttttaaattgtaaacacgacaatatgtatagactatataggggaggatctcagtgtttccatcagttaaaaacctctattattcgtttgcgcatgtgtttgttcagcctctaaaaaatatttcgatcggtcactgtgcctacatgaagtttacacgcaaaatatagttgaaatggacaaagaaaacattcacttatttatcctgtttaggtaacttcactcgaatcattttacacggtgtttacttgtgaattaaaaagttaatccttcgtaaaaagctactacctccgtttttgcactttagatgtaatgaaagtaatttgatgctataagtcaaagttaaagagatgtgtagttcagggttcagaattccgataaaaatcggtcaagttccgtgaaatttcgaggtttcgacgatgctcaaaagtagaagccgtctaaaatttcgatgagtttcatccagatttaaatttgaattgataaaaaaaagaaaaataaataaataatataatattcgtaaaacctattaggatataaatttttgaaaaaaaaagatatattccatgtatttactaatttatagtaggaaagaaaagaacaacaaattaaaaaaaggaaatcactttcagttacctctcttttttccagttatcgattgaaatttcgatggtttcattcggaatttcgtcaaagccgaccggttttcgcaagcttatcgataaactcagtgtatttgcattcaaattttgatttatgaaatttgttcagaatctaccagcttctcattctgctagagcatgaaaaagaaggccatctcggaatcgtaaactggtgcagttgcatgaaagaaacggagggaatactgttgaaaaaatcgtaaaactagcaagacattttctgtccgttggatctgcaatcgacggccagacataggccaggtagctgacctccggacgggaaccgaccgaccttcctggtggtggatgttctagccaagaaccctaaaaaaaaaattccccatctcctcccaatctgattcctctcgagacggcggatccgagcaatctctccggcggaggcggcggcggcggcggctgacgagggaagatgaatcctctgacgcaggtgaagaggacgcaggtaatcaaccagaaggaagcgcttctgggcatcggcgaggacgggtcgtggcacgccaagttcaaggactccgcctacgtcttcgtcggcggcatcccctacgacctcaccgagggcgacctcctcgccgtgttcgcgcagtgagtagtaccagacccccccactttttatgtctatgttgctcttcgatcaatcatggatgcagcgcggaagatctgagcagtgtgtgctctctccctcaggtacggcgaggtggtcgatgtgaacctcgtgcgcgacaagggcaccggaaaatccaagggatttgcgtttcttgcgtacgaggaccagaggagcacgattcttgctgttggtgaggtttcttatcctcttatttttcacctaggtcgtttctgtatgtagctttttgtgcttgattccttatcgaattgaagtgctgatcatcttggtggtgtttgtgtaatggcgaagataatttgaatggagctaaagttcttgggaggattgtaagagttgatcatgtgagcaaatacaagaaaaaggaggaggaggatgaggaggagctgcagaagaagagggaggcccgtggcgtgtgctacgcgttccagaaaggcgaatgcaaccgtggagcttcctgcagatattcccatgatgagcaggtaggcttcctgcttgtgtattaaccaaattgttgtacattcactagaaaaggttgctgaacgaatcagaaatcactatcctacgtgtagggtgtagcactgtagctgtttgcattagccagcagaaacatatttctggatcagttattaggtagaaaatgggtaccgtgttgtttcactacaagttttttggggtaaatggaccaatgttttctcatggtgaggctatgctggaaagttacatttgcaagatgcaaggcctttagtaggttcttacatgactatgaaatcaaatatgatctactatttttagcagaatatttgacaaggcatatgttcttttttcttaattgttcctggactatgtcgtggtttgtaattgtagccaagacttatgtgcactttaattgattgagctgattgggaattctatagtggatatgtgaattaggaggaacatcattgtgtatgttgtacgctgttggaaatgcaagatcaatttcattttgtccaagatgcctagatacaactatatggtacagactatttccctgcaccagatttctgttgttttgcaagaaaaatacaatataggactgccattgtgcctttttataatgtagtatggaaatgttttccgttaatataggattgtcatagtttatgaatagcttcagtaattttactgtctcagtttatctgtctggtgactaacatggatgcacatgaactatattctatatatacctatacttgcagaggaatgcaaacactggttggggttctaaggaggagagcaaagcaagatgggagcatgacagacaccatgagccaccgatgagccacaagaagttcccttcgagtgctggggaacaaaggttccctgacagagctaaagaggagaacaaatcaactggcagggaagggcagtcctcaagatcggaggcatacaaagaccgtgattccaggcttaggcatagtgatagaggttcaaaagatcatgacaggtataggcatgatagatcacctgagagatcaagaggtgataggcagagaaacaatgacagatatgcccaaggaagagatgaaaaatcagaaaggtacagatctgaagtgaaacatgatgaaggagaccagaagcgatcaaggcgggacactgattctagtggacattatgaaaggaggggtaacgaagattcagaaaggtacaggaaatcacggagataaaatttggatttgttgttgcttcagacgttgttctgatctgttcgatgtttgttcttgtacgagatggataagatttttgtttgatccttgggtctgatattagtctaatagatgccatagattacatttgagatgattttgaacgcactggcccatagaccatagacgagtttgcaggatgttaactcaatacattaattaatcatttgtgatcaatgttaatacacttgtctgatgaatcagcagcttggagcctttttaagaaactttttttaaaaaagaaacttttgaatattgctgacgttacgaagagaacataacggcaatttccttctcttttgaaaatatgcatttgtagagcttgttcagttctttattttaaaaaaaaacttaccatttgttggtgaagtcaagatttaatgatgtgaagggtagtgtttagtttgacaccttatcaaattttagtatagttttgtgagtagaagtttctaaattactgaatataataatataggtagagattgggaaggttgtgatggtaaaatcatgtttagtttgctgtcttactaaaatttgatattgttggtgacactcaagaacacgttctacagctcatctccagctatcgcatcctgaacacaggttaaccagctgtcagacattccatctgctatacatttattgaatttattacgatggtttaatccaaagcagcgaaatcctacagcacaagggccggaatggtttctgctctactagaaagcaacagaacataaaacaaagctgtcctaaactgggtgatctttttttatctgaaaacctaagctggatgatctactcatctacgaatgtagactcggcaagatcgatggcacgagcaaggccagcagccttgttcaagcactcctgatgctcatcgtcaggcttgctgtcagcgacgatcccagctccagcctgaaggtgagccacccactcctgacgagcattcttgtcagtgtaggagtacatggtgtcgaagcgagatcccgtggggaagacgatggtacggagagcaagtgcgatgtccatgtctccacggaaagaaacccctccaaagccaccactgtacggcccacgcatcttcccttccatctggtcaatcagctccatcgctctcacctggttgaagacgaggatgagagattgagctcggtggaacatgaataatgcatggtagatgttactccctccgtttcagtttataagactttctagcattgtctacatccatatatatgttagtgaatctagacatatatatgtgtttagattcattaatatttatatgaatgtgtgcaatactataaagtcttataacctgaaacggaggaagtagatgaaacgaaggaaaggcagtggttaacaaactatggtcaacagtcatgtcaatatctgatgaatatgatggcgcatatagatatattgagttggcagagtgtttctcgttttctttctgaaacagcattcaggtgatgcaaccatacggtgccaacatgtatttccttacctttggtgcaccactaactgttccaacgggcaatgctgctcgaagagcatcccaacaagtcagatcatcacgcaactctccagtaacctacagaaatgcagaaacagaccttgtgagaactattaataagtaataacacagccatgacgaatcttagtagatatgacagtaagaaggatggttcctagctactagttactccaacaactgtacacaaacaatacttgattgtccaaggatattggatattgtcaaagctgtatatcatacaggtagacttactgttgagctaatgtgcatgacatgtgaatatcgttcaacgttcatcagtttctccacctttactgaacctggtttggacacctgaaaaaaaaaaggcaaaagtttatcacagatcagactagatgaagtcagaactcagaaatgtaatgaagccaattataatagcaacaggatgctcaacataaaaaatagagagtccaccttttctaattaaatcaggcctttgttatcactaatgcacagacctatttttctaccggatcttaaaataacgcattctattattctgttacctgttatgagggcgtcaaaaacagtagactctttagctgctctgcaaacctattgtttacataaaaatgcagcacataaactagtttaggtgagaataagacaagtgaatgacccttttttgtgtgtgtgtgtgtgttttgcgagtggacattgagacatttcttgtcacattctggtaataacatgataactatgctcctcggaagaaactagaccatcttagatagagaagcaagggtcatttacaatatcactgtattatagtgattgaaacaaaggcaggtgctgctataagttgtccaattgaataatattgttttttttttgtatgcagaaaacagaggaatggaattgattgagaacaaaacaaatgcatggaaaatcaaacctttccaacatcattccgtccaagatctactaacataatatgctcagcacactgctttccatcactcaacagcagttgttctaaaactttgtcttctgctttcgattttcctcttctaattgttccagcaagtggcctgttaacaattgtcctctggcagacagaaaattcactctgcattaatatttctagagaacttttacaggtgctacagttagggagatcatagtaccttcccttttggaaacacaaactgcaagaaatggatagttttaaaagggaattgcaaggagcagttctctgtttttggagaacaaagacacagaatagtaaacagttcagtatgggaagtccatttcagagtcactacacttgtttattattgttgttcttgcagaaaatcacacccaaagacccagtatttcatcagatactagaggttagtgcagataaagagactaaacacagaaagtgtctttgtcatggcacataagaagcaataattagatatgtgcatcccttagacaataatgtgttattcaattttgaaacttctcaagaggaataaaactaggagtgatggtatataaatactaattaggtgcctgttagctatggcatatcaaaaggaatactttaaacatcacatgcttctacccaacagaaagctagtcacagccctcattgcagtgtttcacctgagagatgccttttccgcatcacattaaaggactcactagttccttaccgcatcagccaactacacaaatttagaacttttggattcagtgttacatttacagctgaaccttccttataccaactatgggttttcatgtatcttttctgttcaaagatacaagttacatcacaatcattagatttagacggccacataacacatagaatagagtataagcccctacttcagcgtaccttttccacccgggtaagaatttcaggacttgatgctaccagaatacaaccacgagcctgtgacgatattataggatataaagcatgttgttcagcatgacacataatttaccataagaaatttcaacaggagtactgaaaatattcgtcacctgtagataggccatataaggactaggattgacaatacgcaatgcacggtacacctcaaaggggtcagcaaatgtccgcctctcaaaacgctggcttaagactacttgaaaaatgtcaccagctagaatgtgctcttttgcttgaacaacagctttcttatagtcctcccttgacattgatgatttctgtagtgctgacccaaattgcccaacgttaagttttacagaaccagcagtaagagttggcctacatataagttgattgaaatatgttagtgagaagcagaaatctaggacaaaataatagcactaatcaaaatggataaatggaaaatggaggttgatcagtcactgtaactcacacattaacactatgtaatcttgataacaaagcttccagctgattcttcccgtcctcatatgcttcgtcaactgactcatggcaatctaccctcacccaatgtataacatgtgttttctagaacaaacaaaacagaaaacgtgaagccgatggttacaagtaactatactcgtagttccaaaagtggtggttatagtagacacttagcaaaagctgaaaaaatgtgtcttattttttatggcgttaactatttcagaatttgttgttctctaaatgggccttgttcatttgtgaatagtaagagtctacataggttggtggtggtcaattatgaaatggtgaaattttgaatcaacaacagagggtggcataataataactaatcaaaattgaaaagtaatacaatgacataaaaaaaggaaaaaaaaattaccccatataagaacatgacataaacaaacagttgtaacggcatataaaagataaaaccagaaggcataactagcatacgttctttaacaatttaacctttacttcttaaagcatatttgtaagacaaaaggcaggatttgcggttcggatatgcttatgtctaaagtacaggatatatgattacctaaattacacacagttcataaaagtagtcagggtaattattcataccttttcaacatgatcaaacacaactatgtcattgtagaggcctaaatggatgtcaggaaggttcctatcatcctctggcgcgttagaaaatggaagcttctttgtttcaacataacgcactgtgtcgtaagagaagaatccaacccatcctcctgtaaaataaatcccaagatgcaacagaataaattatcatggctttagagggaatatatttgcaagaccactttgttagctgaaagaaaaagacaacaacgctgtacaaagccatataaatctcaactggctgatgtcgacaaccgtacaaagccgtacaaatccaaactgactgatgtatcattttcattgatctactagaataaaagcgatcggacaaaaagtactaaaacgaaacacgtgtaccagttggtttcggatgaaaatgggtccaagagaaccactcaatgatcaaccaccgtttatcgttatagcttttgtttttttgctgggacgtttaccgttattgcggttaccattatagcttcacagacaatcaccaacaagacaggtgcctactataagtagaaatgcaatatcacactattatagccaacaatcatcgcattctcattccaggattccagactaggacagataagttaccacaaaatgcatcagggaggccttcaacaatctgtgggttccactgttccataatgctccttggtatcttcatcgggtcaggcgcaaattgctccctcctagacttcatcttatgatccatgacagtcacatggttggccttggctacgatctccatcgcaggctgtgccccaaccacactgtacctcccctgcaaattatccaggaaaccctcataacactgttggaacaaaagggaacagattaagcggatgaaacagtaccacattggtgccctcggatccctgctcgacggactcaaacaggaagctgggcgcctcgcggtcgtcctccctgacgaggcagcggtacgcgagcaccggcgtgaggtggtcggagaagatgcatcgcttgagcggcaggatgttgcaaccctccgccgcccccgccttgaacttggactcctcctccctcaccgctgcggccacgagaacacacatttcaaatcaaaccaccaatccgcaaaccaagacatgcccccccacatttgatacggagactcaccgacggcgtcgagctgctggaacgtggcggcgcggcaggcgacggcccctcgtcggccgcggaatcgccccccgcccagccccagcggcggcgtggacggcgcgatgcgcagggagagcacgaggctggccataggtgggggataaactctactggaccgagccgttggtggggactagtgcagttgagagaatgcgggatcggggccgcatttaaataggtgcgcggcgcgccgcgcggaggcggcgaggggctcgggcgcggcgcggcgtgcgcgcgcggtgcggtgggacacgtcgcggccgagccgggcgtttcgccgagcaggtggtgggcgaggtcgcgtgcgcagccgccgtgccgctccaagactccagagaaagggattgagttagccgcggaataccagctacggttacctctgcttcttggaaaaagtaagggctttatttctaaagattattttttccttttctttttttcctttttgggacggatatgcttatccgccacgacattttgttgttgccaaatcactgaattaatcgtttcggggcagcaagataaacacgtgcaaactctgacacattatacattttttttgccacattatacggttcttttaacgactagataacacgaaatttatattgataaacatgaaaaagtttataagatcacaactatgagatatgagatatcgtaactagaaaaacgaaaaaaaaaaactatcacccacacactgatacctgaatacatacctgaatgaatgaagactagcatcggaccgatcgctgctatgtgtaaccggccgccgctaggccacccacattatacgtatattattttataaacacgtccaaataccattgtatcatgaagcgttgatggagaaatacaatgcattaaccagcaaagctttatcggtgacagtgacactcaatacaacagatagcataattatccacttctacaattcctaataacgtcttctcaatgaaagtgtgccactcaatgacaattatccagggtttattgggcccttctaatgggtgctcgatcgccagctatcacgctgggcgatcagttcatccccccctccccatatactcctccctcttctccctccttcctcctccccttcttctcttcctattacagtacaccacacaaattttttttaaaaaacaaaaagttagaaaaattcatgtatagaaatactctatataaaaaatttgaattcaaattcaaatttgaattgggtatgtaaacttttgacttataaactttgggtctataaactttaggtgtataaacttttagatgtatagaaatactatatatagaaaatatttgaatttaaatttgaatttgaattcaaattcaaatttgaatcggatatgtaaacttctgacttataaactttaggtctataaactttaggtgtataaactttagatgtatagaaatactatatataaaaaatatttgaattcaaattcaaatttaaatcggatatataaacttttggtctctaaacttcagatgtgtaaacttgagatgtataaattttaggtgtataaatttactaaaatagaaaaagtaatacggtaaaaaaaaaagaaaccatgtgcaggggtgaaggaaggaagggggaaggggatcgatcgctacccccatccccgtagcgatcgatcgtccatcagcattcctgggttttattagccgtaattaaatgttggtgctctaactcgtttaggcctcgtttagtctgaaagagatgctactgctgccgaagcaacatttcatggcccaagtaaggcccagtgagaacttgggctgcccatgtaaatttctgtttggggatatgggccgagccttgttgagtactctgtattttgggccgcatcttcgcgtcatgacatgaatggaacgatttttttttttgagaaatacgaagtcgaatgagcgaatcgctgatgtaaacaaggtagattagcttaacttgcacgatttggacgtggagcagaacaagcctttcaaaagggtagaaaaaaatttcacgaggcgtagaaaattactccagattgatcggatattctgctggccacgcatatgctgctcatctgacctttcgattgcctggtcattttcacagatacattttattcaatcttttgccgtgctagctgaattaactgcggacaaaagtaattaagttgcaatggacctctccttttagttttcttttaacaaggataccgtgacagccatgtggtttgtgcttgattaatgatgggtctcactcttcttttgcaagtatatgtttgtcggtcccttagaaaaacaaactaacgaacaattaaataattaagaacagtatgcctgcaccgactacacccctgattattggcatgcaccgttttggatgattggctcatattttctattacaacttgcttgccatgtgtagggtttagttttatatagctcttacaagaattgaactatttcatatgaaattacaacatttctggtgatttctagtctctacatcctctgtaaaaaaacaattctagctataaacctaccagagacacacgtgtcaggttcatagttagaattaagtttttctataagatggagcaagtctttgactgaacccattttaattccattggttatatgtggtgtttaaggggagaaaaggacgtataagtaaaccttaacagacaatagttacaaaagacttccaaatattgaataaaaaaagaacagggaatagttggtgtttcctactcctaatcattgtctttttactcaacaaatgctgatcagacaatctggaggaatcaaggagacgatgtttaattgtaatttaagaatagcatacatagctacttaaaaggcaagttacaaaaagacaaattctaactctcttttttagatgaaaattctaaaactctgttttttatatttcacaagtctaccaaacatgtggtttgtgagagatgaggcatcctggaatgaactgactatagtgtaatgttagaaaaatttcgaacaggtactcctacttgttacgcctctttctcaatgggaaaaaaaaatcgtacttgtcatgataagattccaaaaaaacacacagtcgtggcaaatcctaatctgcaatctgcaagtagatttttttttacataaatctgcaagtagatggttctaaggcaatctctcatctcatgactaaactttgacaagttgtattagtataatcgaaggttaaaaaaatgcagtatttgtaaaatccgaattaactaactgataaatactccatgaaaccaacacatggatgcgtgtggttgtcgcatagttccaatagaaaagagaaccccaagaaaaaaaaatctttagattcctgtaatagcatatgctttcccattaggtagagagagcaaaagagagaaccttctccgacactgctccccggaccccacagaccagtgaccccaccagtcagcgacacattcaccaacactcgtgggcccgcgttgcggtgaaccgtgaacgcagcgacccccactgactatgacactgggtcccacctgtcaggcggtaactgctttccaagtctaaagtccaacccccgcacgggtaggaaaggaaagaagaggagaggagacacgcaaaagcaaagcaaaccactcgccgaacaccaactcctcgccgccgccgccgaggaggaggaggagggagcgagcttgacgccggcgccatggcgggcgggggaggtagggagcggcgcggcggggggaggctgctcgtcggggtgctgctcctgacgctggtggtgtccgggcactgcctggagagcacgcaccaccgcgggctgaagcggcggcggcggaagcacgagatccactcgccgatcaagacggtggtggtggtggtgatggagaatcggagcttcgaccacatcctcgggtggctcagccgcacccgccccgacatcgacgggctcaacggcacgcaatccaaccgcctcaacgcctccgacccttcctccccggagatcttcgtcaccgacgaggccggctacgtcgactccgaccccggccacggcttcgaggacatccgcgagcagatcttcggctccgccgacacctccgccgtgccggcccccatgtccggcttcgcccagaacgcccgcgggatgggcctcggcatgccgcagaacgtcatgagcgggttcaagccggagtccgtgccggtctacgccgccctcgccgacgagttcgccgtgttcgaccggtggttcgcctccgtgcccacctccacccagcccaatcgcctctacgtccattccgcgacctcccatggcctcaccttcaatgcccgcaaggacctcatccatggcttcccgcagaagaccatcttcgatagcctcgaggagaacggcttgtcctttggcatctactaccagaacatcccggccacgctcttctaccagagcctccgccgcctcaagcacctcgtcaagttccaccagtacagcctcaagttcaagcttcacgccaagtggggaaagctgccgaattacgcggtgattgagcagaggtacttcgattgcgagatgttccctgcaaacgatgaccacccctcgcacgacgtagcgagggggcagaggttcgtcaaggaggtgtatgagacgctgcgagcgagtccgcagtggaacgagactgctctgatcatcacctatgatgagcatggtggattctatgaccatgtgcctacgccggttgtcggggttccacagcctgatggaattgttggccctgatccttactacttcaagtttgatcggcttggagtgcgcgtgccttctttccttatctcaccatggatcgagaagcgcactggtaagtacttgtgctgtttgcatctattccctttcaagaagttattccttgaattttgatgtctataagtaaagactattgattagcgaacttgttaagattagtctctgttagtatgaattttactgcaatattcgagggagaatttgtcattcattctccacagaaacattcatcgagtaacataggtgtgtaggctaggtaatatagaccgagcctttgagtttccatagtagataacatttcaaaaagttgcatatgaataaaaaagtgcaagacatttttagctaacttgttctatgtagcaaacatgagttctatgtttgctctttgcttgtaaagttgtacttgacaaaccaaggaacttgaacgttgaaccactgtaaggcacaactgtacaagcaaagagccaactagcatgtatcatgctgttttatgttggaagggccagttgtgccttacacaaccatagaaatattttaatggtgttctgttttgtatatctcttagtattaactggtcttgcttttcatttctgcagtgatccatgaaccaaatgggccgcaggactcctcacaatatgagcactcatccatccctgcaacagtaaagaagctatttaatttacattctaacttcctgacaaagagggatgcatgggctgggacctttgagaactacttcaaaatccggaaaacacccagaactgattgtccaggtatatagttttgtgttcattatgttattattagaagatatatgtactctactacaccaatgccattttgttgacgctgacaattatttagggaaagtatcacaaagttcagatattgtagagcattctgttctggaagctcccaatgcttacagttgcttatcaatgcagagttttggaacttagttaattattactgaaattgcattgcaacctaattatatatgttattgtttcctaacagagaaactcccagaggtcacaaagtctctgcaaccgtttggccctaaggaagattcatctctgtcagagtttcaagtggagttgattcagcttgcttctcagctcaatggtgaccatgtactcaacacctacccagatattggcaggactatgactgtgggtgaagcaaaccgctatgcagaggatgctgttgctagatttttggaagctggcaggattgctctaagagctggtgcaaatgaatctgctttggtcaccatgaggcctgcactcaccagcagagcctcaccgtcctctgatttatcatctgaactctgatggattgttctcagatttatccacaattctgcatcatgatttgcaccgcgtcagcttttggttgatgagaactcgtacaatgtgctaagaaaacataggtaggttggtgtacggcaaagtgtgctagtattatgtaattgatagatcttaaacatggctttgtacatagacatcatgatacttgatatctcaagcttttacttcagctgtcctctgataacgctgagatatcagctcagaagtatctgataagatcctactctggataagctggagagggaatttgtaaaccatcgatattcagctctgtacctgcttattcagcagttgaactgcacttctgatgaaatactttatgtacaccagttatagtggtattgaaagatttggcccgtatgaatgtatgatgtttgtaccagtttgcatctgttatttctagctttaaacaatctgtgcgttaatctgcccaactgtagtactgtactataggcatagtatgaactggttgttcaatgctgattttgtcagcttgtcaggtgaaaaattacaatccctcccttccaaaatataagaacctaaaattggatgggacattattcgtaatactgaaaaatgtcctattctatccagatccgtagtattaggaaatgtcatatccggtcctaggtttttatattttcggatgaatagagtactatattcctgaaaccatatggtattagggcccgtttagttccccaaatttttttcccaaaaacatcacatcgaatctttggacacatgcatgaagcattaaatatagataaaaaggaaaactaattgcacagttatgggggaaatcgcgagacgaatcttttaagcctaattagtctgtgattagctataagtgctacagtaacccacatgtgctaatgacggcttaattagtctcaaaagattcgtctcgcgattttcaggcgagttctaaaattagttttttcattcgtgtccgaaaaccccttccgacatccggtcaaacattcgatgtgacatccaaaaatttccttttccccaactaaacacacccttagattcttaatttcaacagttttagttgcttgcaatttaaaaaaaaatgaacttaggactgaacggcattgcttcttgctcatcaagtcaccagccaaacataacaaaaacgtgggatggaaaaccaagcaaaatctcaattgcaccttggctccagttgtacaactccagtacatccctgatgaacacaatgtcgagggaaaataaaagatgacacttgcaggctctgctgccaaatgtttctgttctggcagtcggaagagacattggctgggctggaagaggagttttgcattgttcaaaaagaaaaaaaaaagcatcaattgatcaatacatggccaagcgcatttgcctggtttctaatccatccataattctcgatgtatagcatttcagtgtttcaccatttctccacatataagaatgtgtacaggaaagcagtataaacccatcagcgacaaggggtgtatagaagataaattctcggtcaaaactaatgtcaacggaaaataagacgaaataccagtttcatgctctaccaaaaaaatccatgtttcctttccattttactggcgtgtgactgaatttaggccttcctctgttgccatttgagaaaattccattttactggcttgtgactgaatttatgcctttgttgccatttgagcaatctaaccctaatgatgatccactggattttcgctactgcttggtgtagatgaggtacacaagagcgcccagatgctgtacttccaggcctgccttttcgcattcttcgaagaagagggactggtccttgccaattcttctacggcagctcatcagaaaaatgggaaacttaacaggcacttgagttcctgcaagtggagaaactcactaaaggtattcttatgtaggcaatatgtacaagttagaagaatgcattatgtaggcagtacctgatttgttcgtgatggctgtactggcacttgaaccagcattctgactgcagcccttgtattctttcaggagaaaggataatgttctggttaggtttggatattgtttgacatctaaaagcagaagtgtatatcatattagcatacagcaccaaagtaaggtatgatgactcgagatattaacaatgaacacttacacaataaaatgtcactggcgataacaatgtcccaatctggtatgagaactggaaactgatctccccatgtatctgagggtacaaaagaaacaataggaatcaatttttcccttttggttggtgcatcttccctgcacctaaaaggcataattacaagtctagaagtacttagttttcttacgccggatatgaggaaggacacccaaatcattagctttgcagttgtaagctatattctcctggatctccccatcatcgtaatcagtggttgtgatgtctacttgaaatgccttccgcaggaagatggccaaagctcccgtcccactgaacagttaaatttacaccatttatcatgttaataatctttgagaaacagcctagttattatcaagacaggtatactgaatctcataggcaatacaatcacaatcaaactaactgcttagttaacttgcatactccctccgttccaaaatataagggattttgaccggatgtgacacacccaaccaaaatcccttatattttgggacggaggaagtacatcacaccgctacatcttggcagcatgataacatagatgtttaaattattatagcaggaaaaaaaagagagaaccattttcagatatagattaaatatatgatatatttattcattggttttctggtgacaactaacagaagtctaataaatagcccttcagtaatcacctagatatagaaaccactagccaaatgcttatcaatcagtatgagcagaaaggaaacaacacattttcatacagcaaggcatagcctccataccttcccaattccaggatccgccgtccatgcagaatcgatttattctttaccagccaatcagcaaataagaacgtcccaggccatagcatgttagcattcagctgatgacttgagaattcccttattttcagttcctgcatgccatttccaaaaggtgaacaaagagattgatatcctgcctgcaagcagtatgaaacaataatctacaatgtatgaagtactacataaggcagggatatcctgcctgtcacttcatgtacccttaactgatattgtgtggtagcacatagaatcgcaacaactattaaactatacaatacaaacatgagctccattacatgcagacaaaggcttatcttgaagagagaaccaaattatcttgggaaaatttaaacggtagttactatgctcctatacctttacaaaaacaaatcagctcaatcccaacaaagtaatagaatggactgctttgaactattcagcccataaaaaatgtaaaaagtttgacaagctattcatctacataacagaaaggccttgagagtgatagtatttaggccctttctactagtgcatctataggatgctcatccacagatagaaatttgattcccacaggcaaacagagatagcttgcctgttactttgttagcatcgagacacattaggccagtactggaaacagagacataaattaactagaatgcagctctatttggggggctcaatgatccttcaactttcaagtatcacaaatgccaaacaaataaatttcctacttgttcaattcatgtactacctgaatttttagatgatgcacaacagattatgataactagtaactaccacatctaatcttctttctgagatgcactgaagagttgggaaacctacacgagatgaaggcattgttggttccagcacttttagtttttcctttcaaccatcttctttattgaatttgctacaggcatgactcatggggataaagcttagcaatcaattatcaaactaacaaaataccaaggccgaatccagacatgataagaacaagccagttcttcacccaaaccgatctaccctgtctttacaagattaaaccctaaataaaccccagaaattctccaacaagtcaaaacatgtcccgttcatcaaatctaaccaacacaaccgaatcgcaaaatcggagcccccaaccactacagaaacacccgaaactagatctcaagacggcaagaacccaaccccgtaacacaccaaacactttcttgattccataacagcaaagattaccacgagttgcaataccaaaccagaattcaagaatcgctaagctcttaccatgccggggaacttgtgggctctttcctcgtactgcaccgactgcacctgctcatcggcgtccacctgcatctcatcttcagacgcgtcgcagcaaagaaccaaacaaacaaaaaaaaaacaagaaccaaagcgaggcggcggtcaggtggaggaggagcacgggggaggacgcgaagaggagaggggagagtaccctggtcgtcgtcggcgtcgcggaagagggaggcggcggagaagagggcggtctccatgggcgtaggcgtgggcgtgggcttgtgcagctttgggtctcgctgctcgtcttggctttgcaatgccctcttcctcgcggtcgcggggctccacgacatctcggtctccgagggcaacatcgacatttcctatctggttaactagtatctttattattatcttccgctaaataggagattactactactatcaatgtgcgatggtttgatactcctagagttagttttcttcgtttatttcttggtggcctacttgttcagatgttgcttgggatgggagattttgattttgtaaagtggaggcagcttcactttcatgattttgttctctacaaaaaaagctagttgaaaagaagtatgaatgaaactatgaaagaagctatccacgttttccagagtaacctgtgttctcatatccacaatcgagcttaaatagattataaattatattattttgtgtgtataagcctgtaagtgagccaaattatactgctagacttaaaaagtacaaaagaaaatgtttacataaaaatattccccctgtttttaaataactgacaacgtgtgctattcacagtttctctttcttttcttttcaaaatatttaccagcactgacgtgttattaaagtgtattatgtcctaaatataagcatgaaattttattagctatggtctaactatttaaaaaagtaattggtggtcaaagtttaaacggaaaagacaaattcatcagttatttgtaaatggacggagtgtataaaaatactttaaatgctcagatgcatgtgataggttgagtgtgtgcacgtgtatatggatatgttttgaaaagaaaaatcttagttactttcagccccatctttttgctaatgattacacttatcagctaaaatttgaatttttaactttaaatttggagttgatttttggttttttcatcgaagtttatctttcagccttcacttttagatcactaaaaacacatatataaaaggtttttattcacaaattatttttcgtttgcaaactattaacttattaactaggttaaaccccgcgcattgctgcgtgaatttagtatgataacaataaaaaaaatagcatgtaagatagctagataaagattaagtaaattaatgtggtttatgataatttaaatttaaatagtatgtagaatggtgattcaaacataaaaagtaaaatggtatgactttatggaaaaagaaaagtagggagatagtttggactgtagattaatcatttaaaggctaaaaacaattgtgtgatatgacttaattagaggaaaaaaagagaaagataatttggaccatagattaatcatttaagcactaattaactaagtgagaattaactatataagtatatagaatatcataaaacacaataaagatatacattaaaacattatgtgaattatgttggatgataatttaatatgtttgtatttgaaaagctctggaattataaaaaactataatgatataacatgtttgcatgatatttaaatgtgatgattgttagtagatgatgatgtggtatcttgttaattagtagatgatgatgtgacatcttgttagtggatgatgatgtgacatctttgcatgttaagtttaaagagttagtcggagataactttatagtaagatagataagccaaatgacggggggcctttgcaaacagactgaagttatctccgtacacgtacgcgcaaggaagagactggtggacccaaaaggccctccgtgggagagataggcttaacgaggctcaaatacacctaattaggctcaattggacccatcctaaacgagccccctaattagtatccttagcgaatacatggctcccatgagttgaatggtgaaatttcaggcccaaatctgacaattgcctatagaaaggaagcgcacgtatgcgtcttgcagtatcagaaattcaagagaactttctcaaaaacaggaaattcaagacaaaccagcacgtgacaatggcccaagaaagatcctgcaatatgcaaataccattacatggtagcttcttttttacacgctgtcttaacagcttttgcatacataggacgacatagcggtatatgtacatatacggatgcacgtatgtacatacactgatgcaaaatgacccaaagaacgcaaatttaatttactagtaccatcatatctctctctagtcctactctgctgtagcgtggggtaattatcaaacgtaatacgtactatgaacacacaccaagccaagccccacgtcactcgcactggctgatcgattgatcaatactactactaatttatgctatatgcgatggtcgaggggttgtggcgttgttcatgcgttgccggtggcgatccgggcgacgtggaactgcggcgcgtagttctgcgccttgccggcgatctcctcctgcggcggctcgttcaggaacgcccagttgctcctcgtccacctatccatccatcacatcatcagttcatgaattctcataaaaaactcaaaatataagcatttctaatttaaatttagacaactgtgagtttaaatttatagaaaaaactattatattttaagagggaagtagtatatagatactactgttgtgcgtaccagtcgtggctcttgctggggctctcggcggcggcggcgtcgtcgtggggaaagaagccctccacgcgagtcgccgggtcgatacggccgccgcgaggcgacgaggcgtgcgccttcgagcggctcaccggggccgaccgcgccatgccgccggcggcgggggagccgagcggcgagcccgacatcatctcgccgccgtgctgcttccagaacgcctccacctcctccctcgtcagcgacttgttcctcctcgcaagaactacacatatatccaaaaatcaaagtcatgagcaaatcatgcatggattgacacacatctgcaggtacgtaaatgaaaactacgtacctctgttctcatcgccaagaacgggtgaatcccatccagccatcagagaccccatcttttaattcactactcagagataatttctctgaatttggatcgatcgacaaagttggtctgatttgttatccagaaagaactgaagatgaaatcaagctgaagctactagcttgtatgattagttatcaactttaatttgcagatgcaaattgtagcgaatggataaacaacggagagagcagtgcagtgaatgatggctaggcatcgatccgatccagtcgttttatatacgcaattgacgcttgactttggagcgattaaagcggcactagtgcaggggcaaagcacacaggttttataaatcagagtggtttcatctccaaaaccttggactactgaatatgtcgttgtctggttcttgcccaacttaatctcgtggccttctcccagccgtccgattgtggttagcctttgatcggacggtgcgtgaccgagttaggaagcttaatcggggacgaaacatgatcgagtagccagctaggcccgtccaattaggtggtgtgtaagcagcaaggagacatgctcgtactgactgatcaataaacaaagttgctgggcctatctctccacgaaatatctatcgaactatctagccttttctgagcgagaaaaaaaatatctagcatggccttaattaaattcacggggttttggtttgattaggatgtgacgacgtgtacagtagtgaagtccagtggacggatagacttgacagtccatcgtgtagcctataaccgattgcaagttgtaaaaaaaagttgtaacatttattaacgactaaggataaattatgagcaaaactataataataatatttaatactatttttgtttttaatataggacattgttgattttacatttatcttatttaaaaatatgtaattactattttttcctgtaagttatttataaaaaactctaaacatgatttatatcttatatatgcatttgcacaaaaataaaataataagaatggttagatgggtgaggcaaactaaaagtgttatctataaaaagggaaagagtatatgtgttattgacgactaattaagttcatgctacaaaataaataacgatatcaaaattaactttagaattaatatttagttttaaaattttgattgtgatcataatctgaaaatggaaaagatatactccctccgtttcaaaatgtttgacaccgttgactttatagtacgtgtttgaccatttatcttattcaaaaaatttaagtaattatttatttttttatatcatttgatttattgttaaatatacttcatgtacacatataattttacgtatttcataatttttttaataagacaaacggtcaaacatatgttaaaaagtcaacggtgtcaaacattttgaagcttaggagtacaaagtacagcgatggatggataggcgttatccgttgctgccgtgccggaggggcacacacgtcgctgcgtcagtggctacgcggcctcgtcatcctgtgctcgatcaataatctccagaagccgctggttaattacttaattagcagtgcgggttaaggtcgttcttatctgttagcttcccaggtgcatgcactagctgtctaccactgtagcacgtacgacaatgggttagtatatatgcggcacagctagctaagaatatgggcctttttgtttttactcggtgtaagatcgaattgatctgggttgtgcacggacactgttttatagcgtggcacgagtctatttgctggataatttgggactcacatctgtcacagaggcagtcaggcagtacgtacgtagtaggagagtataaattgggagtaccccatccttaaaaaaaaatttaatcgtaactataaacctggacacatgcgtgtctaaatttattgttaggattggctttttttagggagtagtacttgtggacaagactcggcaagtgattatatcgattgaaatttttcggttttctcaaattttaaagaatttggtcaaattatgttaaaatttaaaaaaatcagtaaaaaagtgttaaaaataccgaaattctggccattttggctctaccgaaatcaaaattgaaaaccctgatagagagtattgaaatgtaagcccctaggccatggctagggaataattaacctcttatataatactagcctcaatatctcgtgctaaaagaaaatatttaccatatggccaaatagcgtatgcctatatatactactagtactcatttagaattttattctaatttttcacctggtccccactgaaactctcctttgggatactatttttatcttttcatccatgttacgcccgtcttatatatatatcagatgagatgaaaagacacaaattaccataaggacccacatgtcaactccctgcacactcttcttccttccccattctccttcttcactcatatgtacagcatctcttaaaactagcttaagattaaattcttaataatatataatatcacattaattcgagctacacatggagagaaaaggactacgtaataatgaatccaattgtgaaatcaagccaacgttgtatatactttttctccttatgcgtacgttcattgaatttttgacattatattgcacgtttacgaagagatttatatctattatatactaaaaattcattaaacttcttacaaacgcttctaagccgccacgtggtatcctataaacgctactaagtcgtcacgtagcactataatttagaaaaatttataaaaattctctagccattgattttcattaaattaggtggacccattatttaccaccattagatttatcttttaaaaaattgcctaacccccaaaccgagtccaccatgggccgtacgtattactatatgtatacatacgtatttttaaggatagtacgtacgtacgtacttccatcccttccctcaatttcttcatatttttgcacacatttattctcctattatcatactttattagttagaaaaaaaactcttgtgctgaacaattccacaactataacatctaaaaatcataccacaaatttttaatccgccattgacaatatagtttaactggcttacttattgataaaattatggttcacgttcaccttgaagagcacgactatatcatgggacacatgaataaggcattagagaaaactccttagcggctatagtcggcttcacccgattgtcagaggagcattcatatacaagtttaattgttttatcctattaattggtagaagcggtatttttaaatatttatatataaatttggacatctgtgagacatgggcacttgggtatgatgtggagattaactttttatggtattaatgatgtatttggtttatttttttgatacaactgcaattctatctattaaaacgatactcatgtttcaagacaataaaaataagttgtggtgaatgccgaatttatatataatcgggataaagtgatttttggttggatatgataaccattctgatcatttagtacatatcaaaatctatggtctatttattatagtgaatatggtgagatattgcttcttttagtattgtttttatagataaaaaataaattgcccgcgcatctgcgcgggcatccgtcctagttgtataaatttaatttcgacacttttagtaaatatttagacggcatatacacatgaaataaatacaattgccatttgagatataatccaaaatagtttctggacctacagtacgtgttccctcgctcatattattgctgggagtaggggtgaaaacggtatgaaaatttccgagattttcggttgccgtttccagtttacactgaccgtttcagtaaccgacagtggtggaaatggaaacggtaatatcttctggaaatggtagcgggaatgggatggaggtttttccgaccgtttttgtcggtaaccgtatttgtatggtaatttccatcaaaattccggaaaaaatccgaaagttctccagcgactcagcctggccaacccatcgaaagcccatgaatgaagtctggtaggcttgcaatccataaaaaaaggagaagtgaccaggaaaaatgttgttaaccctatgacatggcatgtggattttgctgaactttggtctcctcgagttatcgatgttgaagtattgtagaactttgtttatattgttcgtcaagcttattatcctatcattaaccatcatataataatgttatgtggagtgtgatgatgcaagaataatattaaagacatttacgtgcatagttaaatgtgtgctatgccacactccgctgattccgacatgaatttcgactttccgatataccgatattactgatcgttaccgttttcgagtctaccgttccgatttcgttttcaagaaaaatatctgaaaatgaaaatggtatatggtttttccgaccgttttcatccctagttgggagaagaggaaaaaaaaagaatgaacagtgtaacacagttgaaacagtgcaaatgatttttagttttttacatatatatatatatatatcatacattaagaagtcacagaactactcacacacacacacacaaagtacagtcttaacacaattaactatctatataggagagactagagagagtatatacatgagcagtatctgtatttacacggagagctgaaggattaaaagctctcgaacgccggcccgatcctatacacttctctactgctctttgtatagtaatattctacacatacaaattgcatgcgtacttaaccactactacagaacacactactctcttagaggatcaggacgatgcagagctgcaaagctaagctagctagctaaccagcctaagtactaacgtatatacgtacgtacatacgtacatgcatatgcattccctgacatgtggctagctataactagctgaggcctaggcgttgccggtgacgacccgggagacgtggaactgaacgcaggcgtacgtctgcgacttgccgaacatctgctgctccggcgacggcgtctcgttcaggaatgcccagctgctccgtgtccacctataccaaattaacatcgtataatcaattaattattggccggtgaaacatcagctgttaattaaataaatttaagtatacgtaccagcactcgctgctggtgctggcgacgtcgtcgtcgtcgtcgtcatgatcggcagcgaacgacgaccgctgatgacgatggtcgccggcgtgaggagccgccggcgacggcggctcgctgtgggagtacgactggtacgggtgatcgtcggccctcgtcatgacggtgcgcgccagcggtgacggcatggagttcatcctctccagcctcctcaacgccaacgtgcaacgactactactcatctcctgctgctgcatgagagaattaattatattaattgattaattcagtccaagaatatatcgatgcatgtttaattagtttaattacataccgcgcggccgggagaggcggcgagcggcgagatgtcgccggcggcgcggggtgatgcgagcggcgagacgacgttggcggcggcgcggggagaggcgagcggcgaggtggtggcgttgggctccgacgacgtcgacgacgacggtggctgcttccgttgctggcgcctccagaacgcgtccacctcctccctggtcagcgagcggttcctcatcagccgaactatactcaacaaaaacagatcaaattaattaattacagatcgattgaccgatcaatacatattgaattatttgtgtgggtatatataactaaggaaataatcttcccattcagttcgttatcgtcgatcgatcatattgttaatttgttgcatgtacctttcttctcatcaccaagaactggtgagttccagccagccatcagagaacccatctctgataggagtattcaattctcaggtcgagatggacaaagaaagtgatggatgagaaatgatgatagagatgatgatcagccccagtggatctgtaccgttttataggcgctcgcgcatacacatccagtgttggggctcgctccactaggagctgatggagcaacaagtgagctgtagcacacaggttgaactgaaaacctgcggcgtacgtgcagctagctatactcgtagcactgatcgcctaatttggcaatcgtatcgatcgcaacgacgatatatacgtgcaggtgcgcataggtacgtgcactgagcaaatccatatcacttactcgatccgttctaaaatatatgaaacacatggtagtactgtccaaattcatagtaataataatatgatgtgatgtctatctatatctgttaattattatatatgactgctgttacgtttttttttataacgaaccgctgttagacagtgcacgtagatatgaattgtacagtaactaagccagatatagataacacggtgacgaagttgtaacaaaaaaagagcgatacgtgcattgcatgcaacgacgcaagctggagggggccaaatgaatgcatgcatgtatgtttgtgcagagaggttggttgtgacgatatgggatcgcgcgcgcgcgccgagtagagtggagtggataggcttgagctggattagcttagcgcgcggccggtcgcgcgcagcgatcgatcgatcgtcgttatcccgaggtggcagcggcagctagctagtgcgcgtgagcgtgcgcgcgcgtggcgtaagaccctgcagattacgacgagacgagacgacgtctctgtgcacctggagagccccatgccggccggtgccccggcacatggcggcgcgccactggttgggttagcgtcacgcgtcacgtcacccgttggcgccgttcttatcgatcagctaggagcccgtaccataccgggccgggccggacaggacggcccgcgcgcgcgcctatcgtatactagttgtgttgtgtagtacgtacgtgttcagtgcaacggtgcaagacgccaactaagggcgaaaacgctaatccgccaccagtcgcgcgactggacacgtgttgcgcgtggagagaaacggcggacggcgcgtgtacggtattctttttttttgtttttttcttcctgcgcgtgtacggtttcttttttttttccgttttttctgttttcttccgtatttttggtttctttttcctttgttttcgtttttttgttttctcccgtatttttggtttctttttctttttttcttttttatcgttttcagtttttttcggtttttataaagtttgtatacgtgtatataaagtttgtatatgtgtacataaagtttgtatacatgtatataaactttatatacgtttatttttttgatttttatatgtatgtgtacaaagtttgtatacacatatataaagtttatatacaggtatacaaagtttatatacacgtatacaaagtttgtatacgtgtacataaagtttgtatacgtgtatacgaatatacgtgatgttttttttatattttttaatatgtacgtatataaagtttgtacacattgtatataaagtctgtatacatcatatataaagtttatacacgttgtatacaaagagtttgtatgtgtgtatttttttatacataaaaaatatacatataaatatataaataaataaataaataaataaataaataaatatataaatatatatatatatatatatatatatatatatataatactagtagtagtatagaagtagtagtactagtaatagtagtatagtagtagttatagtagtagactactagtagtactaagagagtagtactgtagtaccagtgggggctggtcatgcgcctgggggccgcgcgactagtcacggattagcccccccccccgggggcccctttgaatcgcagggttgaaaaatagaggaataggaaaaacacatgattctgatagaaattgaagtgtaaaacagaagattgcaaaatacagaaaaaacatgaatgatcgtttgattggaacgcaggaaaaacacaggaatcggatgagagagatagactcaaaggaaattttccaagaggttggagctcttgttatatttcctccaaaatccacatgcaatgtgccattccataggaatttcatgggatttgaaaatcgtcaatcctttgaatcaaatggccaaataggaaaatttcgtataggatttgaatcctatgaaaatcctatataaatcctttgattcaaagggccctaagtttcgtacgtgtgcaactgtgcatccagcacgtactactacgtactcctatgtacttgtagtggtgtagcctatacatatgcatgaagcgttccaggaaaaataggagtctcagtaatttgtgcaggcatgcggcccatggagtaatagaccatgctgaataatttcagttcaaatttcatactccaactgtaataccatacgcaaaccatcaacttacaatactgatatacttgacatttcaaaataacatagcctttggttttagctgacgtagcgactgagtaagctagcacgaggctcatatgggtcccacatgtcagcggcccaatcttcttccacatctctcctctcttcccaatcctaatctctctccatgcctctagggtggtgggggtgggaagaagctcgacagcggtggccaacacatacgcaaggagaagctcgaggactgcaagacgactttcttttcgcctaccactggaaggcaacaccttgtttccctgccttctagttgagcgaggacactgaatgcatggaggtgttgtgacccaaatctacggcagaatccctcgccggaagttcgccggagatctagcagagaagaggcgagaagaacagggtagaaaggggaaacacgaggaagcagctggggaggaggatatttttcatttctttcatgaattgttttctcaatacagctggagtatatatactcacgcactccacccctcttgcccttagggcccaccttgtcatagacacttctatctataaagagtagaagatgtattcacttctgaaaagcgtcaatgtagaatacgccttcaccctgttgctcgccattgccgacacgctgatcgcttcacacatcagtcgtgacattcgcccctccttgagtcggagcttggccccaagcgacggcagatggaaacctggtgtgcaccacatcgaagtcctcccaggtcgccaaagcagcaggcaaagtaccccactgaaccaaaacttgaaaaacggcagcattgccctttttcaccatgtggcgatccaaaattgccgtaggcaccaactctgcaatgtccaactgagcagcagacgacaattgagaaaacactggagaatacttgggaacatacttcttcaactgagagacatggaaaaccggatgaattaaactaccagccggcaacttcaaacgataagtcatcgagccaacagatgcttcaatctcaaaaggaccaaagtacttaaacgccagtttaggaaatggtctggacacaacagacttatatgcatacggttgtaacttaagaagtactgacttcccaacttgaaaagcacgatctgagcatttgacatcagccatttgcttcattctattttgagcacgagccaaatgatgtttaagcaaagcagaaaacatatctctttcctttaggactgcatcagcttcagatgagtcagaaacatcatcctcagattcagtcacgggaacagccggcaatatcccataagttggctcactcccatataaagttcgatgaggagaacactgcaaagaagagtgatagctagtattgtaccaatactgagcaagagacagccatgcacaccacttagttggaactgcagcaactgcacagcgtaaatacatctccaaacattgattcacacgctccgtctggccatcggattgtggatgataagcagtggtcaaattcaaaggaatctcaaaccttttaaacagagtttgccaaaacttgctagtaaaaatcttgtctctatcggacacaatagacttaggcatgccatataatgccgcaacatgagtcaaataagcttcagccacttgtaatgcagtgaaagtgtcaattaggcctaaaggggggggggttgaataagctaattcaaaaattcaattaaaagcggaagcagtaattttcggatatttccgaaattttcgaatatatccaaaaattttcggagtcagcactgaaagtgcatctaggcccctaatgattttggtgattaattacaatgcgattagagaggactaacatttttatttaagcaaatgtgaagtttgttatgttctcaatgagttaccgtaatgcatatcccgccaaatacgttgatgtgatgtgatgcggcaaaggagcaaatggtatattgtaacttttcttttcatttgagtcaataggaatgccgcactattaagagggatgatgcattgacatatgaggagtgatcaaagtgctcaaaatctttttttaaaagtgtttcccctcagtttgatatgttctggaaatttttggagttttccgaaagtcattttcggactttccgaaaatgcacagaaccaattttcgcttctggaaattttcggatatgtccgaaagacattttcggacttcccgaaaatgactgtgaaggcaaatgtggttctgtttagtttcgtacttttccgaaattgattttcggagtttccgaaaacttcagcaaaggcaaaaatcgcttctgtgtattttcggacttgtccgaaagtgattttcggacttttccgaaaacatccagaaccatgttttggtggtggaaatttttggacttatccaaaaaattttcggaatgtctgaaaaatctttcgttgactttgctgtggtgctgagctggaaatttcgacaagtccgaaaattttcggaatatccgaaaaatctcattattgtgcataacggcagaatttggctgtggcaaaaatagccccctcccc

SEQ ID NO: 8770 - DNA, 23174 bp, Oryza sativa
tttaatccgaatagttgaaaatgataacaatatttgatcacgttgtaaagttatacataaggacttaccttgtttatccaaaagcttaaactgacgaggaaaaatgcaattgtgattgtaatcatggaatgtgtggatgacatggcatggcaggtttcttgacaaggcggccgtagtggagcacgacggcggcgaggagcggcgcggggcgtggcggttggcgacggtgacgcaggtggaggagacgaagctggtgctggcgatggtgcccatctgggtggcgacgctgccgttcggcatcacggcggcgcaggtgtccaccttcttcatcaagcagggcagcgtgatggaccgccgcatgggcccgcacttcacgctgccgccggcgtccaccttcgccatggccgccatcggcatgatcgtcgccgtggccgtgtacgacaaggtcctggagccgtacctgcgccgcctgaccggcggcgagcgcgggctcagcatcctgaagcgcatcggcgtcggcatcgcgttcaccatcgtggccatggcggtggcggcgacagtggagaggcagcgcctccgcagcgcctcgccggcgtccatgtcggtgttctggctggtgccgcagttcttgctgatgggcatcggcgacgggttcgcgctggtcggtctccaagaatacttctacgaccaggtgccggacagcatgcgcagcctcggcatcggcctctacctcagcgtcatcggcgccggcagcttcctgagcagccagctgatcacggcggtggaccgcgtcacctcgcacggcggcgccgccgccggctggttcggcaaggacctgaacagcagcaggctggacctcttctactggcttctcgcctgcatcggcgtcgccaacctcgtcttctacgtggtcatcgccaccaggtactcgtacaagaccgtcatggccggcggcaaggtcgtcgacgacaaggccggcgacatcgagtgcgccgccgccgcagctgctgctgcctactgatcaatatcaagcagtagctgatcgattagctagctagctagaaaatcatggtaagaaagaaaatggcatcatcatgtattatgatctgctttcgtggtacgtgacaacaacaaaaaaattgtaaggattatgtcgttcgtccatgtatatgcttaatctgcttgtgattgccatctgatcgtgtgatctactgctactgctgatgttgccaagtcctgaactgattcagtgtagcagtgattagtaagttacgcgtgtgcttagtgcaagaggcgaagtgctgagtagatggattacgtgcacttggagttaagagtgcgagattgagatggcccgaaagcctgcttaattcggacccatgggcggagccactacgattcctgcgtattccgaggaatatacttcagtatacgcacatgtacacatattagttagccaagtactcttcctaactgagatgcgtatagatgaaaggtttagaaaagtgaaaaatcttcttaatctttccattatgattgttgaaacaaagttgcacaatagacatgagattgtttacaagcttctcaaattggttatagtactttcagtagtaacagctagtgttcaaataatcttttatgccatgaataatgtgaagaataaattgataaacaggctgggggatcaatacttaaatcattgcttggtcacatttattgagtgtgagatgtttttgaaagtcaaggactgtgatattataaaccgctttcaagctatgaaggaaccaaaatagaaaattagaggtaccatgtaatatttgtagttttatttcttcgattatcggtattgacatactgtgaaccattgatttttttttactatgaactttttttttgttaaacgggaatacccaacttcgaaatcctggctccgccacttcggaccgagtttgcagccttgcgctgtgaggaaaaagtccaatgtatgtccctctaatgattgagtttcgatcacgtccctcaatcacagaaacaggtacaacgcattcctagtcttccaaaagccagtgcaaatatagtccaaaggcagcactgaggtcgtttttagctgacgtggtgcagtggtgcttatgtagcgtattgactaggttttcgtcttacaagacatctacgtaacacttacattcaagaacaaaaaaattttaggacctatgtggggccaacatgttaggggttcttcttcctccaaaacctcccttctttcctctcttccccatctctctccacctctatcctctcttcctaccttgtcggtagggtggtggcaagtagaggccgagatgatggcccaacacaggtagacaagatggtcacatacaatgagatggctaccatcactatcgagtgtcgcctgccttagttattatgacgtaccactttcattcatttcagcgagtcgcgtgtattagatcgattcaatcggtttctagtgcatatcgagatgacatggcatccatggagatggatattacaatgatacgacaagaagagcaagtcacaccgccctggtgtgatactgtggctttatggatgactacgagcaaatggaggacgatgaaccaccctcaccgtgagtcaacaagcccgggtttttttttccttatgccactgccggagcagaaggtgtccgtagcatatcatgcgtagctttggcgtacgaatgcccgaataaacaacaagtatgggtctcgtcggcccaatgaaaagaggaggaagaagaagaagtccaagcattatgtgtcgccgttgtcgtcttcaccatagtcgaggtcgccttcgccagcctacgagatactccctccgtactcgtaaaggaagtcgtttaggataatgtttaagtcaaaccttaggaatataaatcatgaataactctcaggttgttgagtttgaaaatataaaaattatataaatagatttgtcttgaaaaatactttcataaaagtatacatatatcacttttcaataaatatttttatagaaacaagaagtcaaagttttgtttttagagaccgtgtcgctatccaaaacgacttcctttatgagtatggagggagtatctccaaccctcgaacccaacgacccatactagataccaagaagaggggggagaggtagagatagatggggaagagaggagacagggtgaggttggaggaagaagaaccgctgacatgtcggctctacatgagccccatcgggtttttttattaatgtaagtgtcttgtgggatgaagacctaatcactacacaacgtgagagccacattacctagtccctacacaacgtcagtaaaaaccggcttcagtactatctcaggattacattttcactgattttagaagatacagatgtgttgtagccaattttatggttgagcgacaggataaaatggccgttaattagatagagacgtaaaagtagacttttcctgcgcatcaacggctgaaacagcccaaagagtagttacggtgctttggttgggttggactcgctgagtcctggtattgggccatcaagtcgcaatggggaataagttcagtttagacccctcactgttgtccagtctaaaattgataccgaaatggatacaacgtgtccatcaactcccaaaaccaccccaaataagatcacaagatggtttggatgacgatttcaactgatgtggcacctacatgaatggtttgattatcgccatgtcacgccacgccaagtgcagtgcgggtaatagttaagggagtcgaaagcccaataaaaagttggattttggcccaatagtaacaacaggttggatttaggcccattgtgtatgtaagctacagtaataagtactccctcaccaaactgcgtgacgtgttcaagatacagtctctcagttgacccgtgaccgtatgctcaccaaacttttttcttaaaaaaatcgccctgttctgtaagactgtaacggcgagttctgtttttttaaataaagaaaaaactgccgaccagcttggctaggctcgttactagaatcaaaatattgcattataatactcgtattctgaatctgagaatacacagccgtgctacacgtttgtcttaaggacgtgtcattaaaattctgattcgattcctcgtgtgtttggtttggataggtcatatgttaagaaaaaagaaaggctttattaccatgtgggacacatgtcgcagttgttttaaaacggttgggagttttggcttcggactggctttcacacggccgtgaatggacaccaccaaccaaacgatgccgcggaatattccttgcaacgattttcatcagggtcaagtcaattaaatttgtttatcatctgggaaaagtaagctaaagcgaagcaagagcaaaggagattactgctaatttttctgctctcttcatccaaatatatactccaacagtctagaacatatttagtagagctctgacttctaaatttgactccaagagttatgagtagagttgtagagccgccgaaaaccgtcgaaactaagctctatctctttagttcattagagtgttccactcagtttcacttctattttagatggaactaaaactctgtttgactaaagctgtagatgtgccaaacagacccttaaaataagattagatccatttaagaactacgaatataaaaataggatttgaaattagcctatttccatattcatagttctaagctagtccaatcaactactttctctgttttataatataaaatttttattaacgtctatataaatgtatgtgagtacgaagagcgtatattgctatatattgagaacgaaaggagcattacaaattgcactatttttgtagaaaagaaataaactaatctccgcaccaagacaaaagggagggagcaaccagcctcgctggaacggtagcgtccttatcctcctcctgctattgattattttgcgttcccccgtcgccgcggtcccattccgacctgttatcgcgtacggataccggccaccactcgcggatcttctatggcatcttcacttcaagagtatcatgtgcaatctttttcgattaaacagaagaggcacaaccgcacacatcaaatgcacatccacaagtatgacctcaacatgataagatcaaatataaacaaagaccaatagtatatatccttaatcccactaaatttctattaaaaacacatttaatgtgtaatattcgtgagtatagatttaaaatctagcgagtgagagttatgcacccaccattgcaccagtgcaccaccgatgtttcctcaatattatgtacatattggtgaagtgaagaaagtggcggacctaacaaccaagaccttacttttgtgttatactcatgatagtaattcttttaactaaccataacacttttacgatatagacaaatgcaaagcatgattaacgaagggtcgataataatggtgaaactgcattacatctggtagccttatgctcatgatagtattttttaagccaaccatagtgctctagcatctatagagtagtagagtccaatgtaattcgttgctatattgcttagacaatagaggtaacaccatgtacgaacaagattactatatcctgacactagcatatcacaattctttagatccaccactcccgataccggtaaatcataatttctgggatccacgactagttggtattaccttcatcctaaaataaaagagattttggttggatgtgatacctctagtactcgtgatactaggatgtgtcctgtacatccaaatttttttatatttaggatagaagaagtaagcagcgttaatagtaccaactacattagtaatatcacataaagtttcagtcatatggtgggttagtgatactattatccattgatttttataatagataagtatattataaactgtaagtagtagcacggtatataaatagatggtactggtacgagattaggtgctactaataagagtgtgttcttcgcagagcacagcacgggtggttttgtggtgtactatggccggcacagagaatcccagatggcattgcaggctggaacacctccgagtgggagtggcccatgaaaggtagtgcttcgtcgatcttatctccggtgactcatttccgcatgtgaagtggcgcgacgctccagcttatcaattgtatttcggatgtgttttttcacataacccctcctgttattcagtttctgctctgcacttccctaatatagaaattgaaaattaaggcccaagtttgcttcaagtttgtatcgtagacacacttccaactttccaagacattttacacaagagaattagagatgatattgatctaagcttgcaagaacatttactagtttgatttggaatatgtcggcatctttcatttaccaaaacaaggttgtgttcgccagtgtgagttcctaactccacattcttcattttctgtgtgcacgtttttcaaattgctaaatgatatactttttttaaaaaaaactatacgaaaattactttaaaaatcatattaatctatttttttaaaaaaaataatactaaattaatcatgcgctaataagtcgtttcgttttgtacgcaaggaattagagcatgtttaatagtatatcgaacgactaacttcaaatcatctatagtcaatttagtagccaatttatacaatagatacctataaacatatacaacactagtaatatctggtcctacctgtcaaacacacattatattttataatctaggtacaaatttatagcccgctgctcttctctcttcttatttatctactcgatatgtgttaatagttggcttatagtatgctgttgtactggctcttaggtcccatctgaagctactgaacacaacctaagtgtgatctaagcttgcataaacatttaccagtttgctttggaatatgttagcacctttcatttaccaacacaactaagtgtaatcggggtcatcgttttcttctaggatattgggttgtacataactttgtatttcaatgtacgtaagagagaaaaaatccattaagtagttttatgtgctatgcatatctttgtattttcctctggataactaagggctcaaattatgaacatgaattatttgtgtcctattttcggaaacttcatgtagctaatttttttcttaaaaaaatatagttttaaaatctagtaaactaggagttggttcagattctcatcagaaatttttagaatcaagctcatggagccttcatactccacaattttggggaaatgtagtggtcacacaaaaaaaaagagaaatatggcgataagaatctcctaattctatcacaatataagggcccctttagaagttgtacacttatcatcacaccacacacccctatctatcgtcaacttggtggtttctcagtgggcaggggagcagaggggcacacagtttagattttgtccctataagagcagacttctattagccgcgtacagatagatagacacaacagcaacaacaacaagcgaattcttcttgcagatagggaaaaaaaaacgaaagcgagagatgaggagcagctcggctctgttcttggcctttgttcttctcgccgtcttcctcgcggcgctccccttcgccgaatccagcggcaggcaccaccaccaccaccactcccatctccatggcagaggtacgagcaaaagcagaggaatcgaaagatatttgctttcttggagcgacttcttgcttgggtcaggagctaaattgaaggagaaatatttgggcttcttttcaggggaaggcgagagaggaggagaagcacggtcgctggcggcgaagggggcggcggcggcgtggccgtgctgcgacaactgcggcgggtgcaccaagtcgatcccgccgcagtgccagtgcatggacgcgaggccggcggggtgccacccggcgtgcaagagctgcgtcaagtccagcctcagcgtctccccgccggtctaccagtgcatggaccgcatccccaacctctgccagcgccgctgcaccgccgccgcccgctgacctcccccgccgcccatctgacccgacccaccggccaccgccaccgaccggccttacttaattaagagtggtttttgtttgtccctttttttttttggaaaagctgaagaagtgaagaagcagtagtacctactgtactggaggtgattggagggagcagctggtttcaggtttatgtgctggaatcagcctccagttttcatctcctcgctctgctaactacggagtaattgtgtagagattactcgccgagctatatgtacaaacggcctgtgtgatgagacgaaattgtaatggtaaattttttttcaccttcatatgttggatatgagtgaaattgttgctagcgaaatgatgatggatgcgtgcttggttcatattttccgttgctgtttgtctggctctgatgctttctctcctcttctgtattaatctcaattggattacaaggatgcctgtaaaagcttatgacatgctgttggttgattttgtctacttatgtcgataagggttaggagaggacgccaaaccctaaatctaattgcccgatcaagtgcgcactgtaaggagtacgtgaggttctctgctgtttcttttcatcaacaggaaatcagaacgagaaaagcaaatgaacaaaagacaaaactagaagaatcattgatggcttcaaacataggtcggtagattgattttataattaggagaggtgattgtttataggctaaagcttaagatcttgtaatctagaactctaacatgatgagggtaatacagcatgaacctggacgcgatccggcatgctgttccggggtgtatgaacctggacacgattggggacgaacggtcggtgaaatttgggaactgcacatcagaaggcttgtgttgctgtcaaccgaattaatcaggacgattgccatgaacaacatccacgatagtgagcttgcactttgcttagtggaggacggtctgggcctctggggattcgcatttccacaaggatatgcgttgccatgattttcactaggccgcttgtttaggcacgaaaggatgggaaagtgaggaatatgctcggcaagaagccaagaaccaatctccaatagtgcaaatttggggtgactttacatgtttgaattcaacattgcagtcgcgcaagtttgcaataccactatctgaatccgtggtccaaatctgaagagacctgcagtctgcacggtctctagagcaacattgccagtactaaagaagaaagagttccactaaattgctcatgtggtgatgttttggacttagctaaaaatatgtcgacaattttttgggctgatctcagtcggcttctctgtgcgtccgattgctctgcacgagttttcggttgtgcttgccggaccgttcgatttcttctcaaaatcatctcctataaagtaaggactgcatatgcttttgctttttaacttttccaatgtaagatttaaatttacatctcacttacacaccacttacatatgtaattactatgtaattttaagacttacatatgtaattttaaaatttacattgtaaatccattaaatttacatatctaatttagtaacttacaatgtaaatacatgctgactattttttgataaaaaatatggcgctataaatatagctactcccgatgttttttattgattcatcatgtggtggtgtcgtggtgatgttgaacagttgaaggaacagagggagaagaatctgagacaaaggacggcaagagagagacacacgtgctgaaaagaacaggaaaaagagttgtccaggcccaagtgtgcttctctcgtactagagtgaggcccaggaagtagcttacccgtcgcagcctatcaatgtgggcctcttttgtctccaaaccagtagactacggcccatgcaggcccatcttgccgcctaccgaaaagaattttttttatttataattttttttattaaaagttttacaaaaataattttccattttgaaaattgacggaagtagttgcctaccgctctctgggagggcgatttttaagggcggcgaaaatgacgtggcagccggccgttcgctctcgggcgacggccgtcaacgaaatttgcaggcggcccccttgccgccctccgctagggcgattttatactgtgcggggggccgcctgcaaatgggcggcgaggggggcatggaattttgcaggcggcccccttgccgccctccgctagggcgattttgtactgtgcggggggccgcctacaaatgggcggcgagggggcatggaattttgcaggcggcccccttgccgccctgggggagggcgattttttgcctccccctataaagcccagtccctcctctgttaaatttcattatattcactaaaaatccaaaaaaaacgaaagagagagaggggagggcagcagaaggggagcggcgaagccctgctggttcgctcacttcatcacaggtatgctcccatacatcttttgcatttgtactaatatgttatgtttgagtatatatgttgcgttttagttttagttccatatattttagcacatctgtagcacagagcacatatgtgtagatccagagcatagaatataatagtatgaattgagacatagacagtagtgttaattgtaagatgtagttagtttgatctggagaatgtaacgtaattttagaaatttagagaacaatattgtagagaatgtaacttagggcgtagtacagaaatgcaaggttaacgcagttattgttttcatcaggcacaatgtcaagtaaggtcacatttcagatagttcacggtgaaggaaatattagatttggtccagatggtgttgatctgtcagattttgtaatgacatctaagggcatcgataggcctgcggagagaacatttcagtcaatttatagttggttgttgagaggatttagaatagaccaagaagtctacacaatgtcagtatcagttgtagtgagtcgtgcaacagaaggttatttttgggaactaatgccgatggacagcactgatgcttggagacggtatgtggaaatggcttttgaacggtcatggcccctcgttatatttgtgttggtacaagagaaagatataaatgtttcaatgcaaaccgaagatgtagagggtcctatcaatgcaggggatgttgttggaccatcgatgcaaaatgaggaaaatcaaccaagggaggagcaggccatgggcatggcggatgagggggagagagtcggtataattgttgatgaaatggagagggaagattcggataatgaggaagcggacgacgacgcatcatccgatgaggaaggtgatgtaatggccactgattgggcaaatgaggacttctctggactttactttttattactactgttaaatacttgtacgaaactgatggtccttgtccagcaggattcgcagccgggatcttcggtactggggcctcttcgtctcacgccggtaggactggtcctactagccagttctacgacgacgacttgcacggtgcacaccaccacgacgtactaggctcctctcagcttggaggagctccagaggcgcacactcaggagcagccagaggtcacacctgtacaggcaggacgggttggccgtgccgtacccccggaccgactcacgtactcccaggggcacattagggcgcagggtaggagggacaggggtaagaggcctcgtcagtagtgttctacctcttcagtccttatgtgaccgtttcttttggcttacaaacttgtaaagcagtactacttttgctattactactgcagtactacttgtgtttgtctcgtctacatagttcttttcattcatatggtgctagaacaacttatgctcacgacaacacactttcggcgcttcacggtagtgtcagatccagtagcgcgcacagtccacaacagcacacatgaaaagcggcagctcgagttatcactatcaactttcggcgctgcctgttgacataaagtgaatcacgcccacgcgtgatcgtcttgtcacatctaatgaataatgtatctcattgagttcacatatattgcagtgaaaacgacgctatataattgacaatctgaaggcaacctcttcatatcttctttcccactagcacaccacacacgaaaatggaagcctattcattggtaatacgtaatctagatttaagattatgtagaacattcttcactacaattttacattttggcagcaaaccaaatatgatcaaatgcaattttaccttaccaaatatttggtagtgccaaaacttgcttatattttggcacaaacaaaatatttgtacggtaacaatccaaatatgccctaaaaataataaaattgtattttaccagtcttggagattttaatcttgtataattttcaatataaaaagatttgataactattgatatttattaaaaaatatagagcacactataaaatcgccctcccccagggcggcaagggggccgcctgcaaaattccatgccccctcgccgcccatttgcaggcggccccctgcacagtacaaaatcgccctagcggagggcggcaagggggccgcctgcaaaattccatgccccccctcgccgctcatttgcaggcggccccccgcacagtataaaatcgccctagcggagggcggcaagggggccgcctgcaaatttcgttgacggccgtcgcccgagagcgaacggccggctgccacgtcattttcgcctcgccctcccagagggcggtaggcgactactcccgtcaattttcaaaatggaaaattatttttgtaaaacttttaataaaaaaaattataaataaaaaaaattcctaccgaaaacgggtggaagcgtcggggattagtaccacctcgcggagtcgaggaggtgcgggtgggagagatggctataagtagagagccccgtgcactattgctccatacttacctggacggggtcaacgggcgatcaagaaggctcgtggcctaggccaatggcccacattgcacttggtgggcgcgttagcttaccatctccccaagtgggagagtggacgtcataatttgtggtagagggggtacgcgtccgcgcggcccctgccaactctcttagattaaatttcggtccttgctattgttggttaagtttaagttctttattgcattcgtatgctttcgcgcggcctctaccaattctcttaaattaaattttggttcttgctactgttggttttggttcttgattgcataggctccttgtatcctgaattttcggttttggtccgttgggtttacgagccatgtcaatctcttaaattaaaattttggatttgggtttgcgctggtaagttttgcatctatcattaaacattgttatttttcgaagagaaggtccaaatcaagcagagttcattacaggaaacaaaacaaaacgaacacagcaaccacttcaggaaaactggggaataccagctaaactaggacagcactagaacacacacaaaaaccaacttctcaaacaaccacttaaactacttctggggataccagctaactaggacagcactagaataccaggcaccagctaacgagggcggaaatactcttcatcctttggagaacgtgattggccaggcttcagttaaaggcttggtggtgtttaccttagctgaagcactgctccccgtccgacaaaccagcgataatcataaagggaagacaattggcatgaaaggaaggctgaaggaacaaggtgctcctgggaacttgaatcatcagcgtcgttgctcaatgtcgttggagctttcaacccagaaactggtagaggagcaatcggactcgtggttagaaattcagatggacaagttctcctgtcatcttggaaattcctaaggcgttgtgtagaggcagaagaagcagagctcctggcttgcacggacaaatcatctacttcctccatttcatattataaaactttctagcattgtccacatttatatagatgttaatgaatttagacatatatgtgtaagatgatgccctctaaaagatggcaaacgagaattcaagtacgatgctgccctgatgtttcattgacaaaagaataggatactagtgtctactcctttctgaatcacgacacagcgagtcatgaatttaatacatcagatacccgtaaattttcatggaaaatgctatgcataacaatcaagtttagcctgcatatgttttcttggaaatatatgccagatatagttatctgaagaaaataaaaagtaacaaataaatggcttctctaatgtaagcccaacacaatcaaacccgagaccattaccggtccaacccaacagattacacctgtctaggattgcaacggcctgtaatacaaggtccattacaaaccgccttattttggcagcccaagctagcacaaaacctctcagaagtcagaacacgagatggaaaccgaaaagaactctgcgttgctccacattagtaccacctcgaaagtttgcgtcgattgcctggtgctctttcggtataagtacagaaccccgagatccgttgctccatacttacctggacggggtcaacgggcgatcaggaaggctcgtggcctaggccaatggcccacattgcacttggtgggcgcgttggcttaccatctccccaagtgggagagtggacgtcataatttgtggtggagggggtacgcgttcgcgcggcccttgccaattttcaaaattaaattttggtcctttgctagcgtttgcttgcaattggaaaactaaacagtccctgctttcgttttttgtcgcttcttgaactcactagaagtaataaatttatgaaaaatttgctcaatttttagaaaaattgtggtgtttagattaagttttctaaaaatatgtggtggtttttgtaatgtggatatgaatagattatgaacgattaaagtaattgttttatttctcgcgcgagcacgaggtgaggctcgattcactttcactataatcgcggccatggcggcgaaggttgggttgttcccctcgtcgtcactcaccaccagcccccacgccatcgcggctgcgccgaccaacgctccccgcccacgcggggctcgtggattggcgtctccaggtcgatccgcggcggcgatggacgccttccacgtgtcgtcgcaggccgccgagccgctcctccgcaccaccggcgccgccgccgccgcggcggcggcggcgacggcgacctccaaccccaggctccgcgtgcggaatcctgaccctaatcctccgcgccctaattatagccgtcgtcgcttcttctatcctggggcaaggtgctggtagtggtcgtggtttttgacgacatggaggtggatgtgcaggtgcggacacatgcgcagggcggcgaggcgccctccagcggtggcgccggagatggcgcggccgggaaggagttctcgtggtcgtccatcatccttccgtaagatagctcccctctccatctctttggtcagtgacatttggggataaaatcggacagtgataggtgataagaggaatgcatttctagtttggttctagcttcccaatgttgagggatagcattggcacctaatttcaattcaagggagagagaatgctttttaactgttcagtagatattgcttgtttcatcgtgttgatgagaacaatcatattaaattagggcagactgtacaatgcattgtaagtaagatgcaatataattctgcactgtcttctcttctctgctttaatgctagataagaacatattataattcaggagatgataggtttgcatagtattttgattacatactgaagacaaatgttatagttggatgtaaaccattggtggttattatattaatacggcttggaatatggataaaaaaacaaaagcataaaggggaaattggaaaatatatcaagctttaactacttgtgggtcaatgtttggaacctaggttcttgttccctgcattgggaggactcctttttggttatgacattggcgcaacctctggagcatgcatatctctgcaagttagtccctattttggttggctatgcaatctgttatagttgtcatgtattgattcactctaatggtgtttattcctccagtctgctgaactcagtggaaccacttggttcagcctgtcatctatacagctagggctcgtggtaattttttagatattttcatgcttaccaaactttttgttttcccaatcaagaacactactgtctttaatgtgattttttgtcatccaatttaggcaagcggttcactctatggtgctcttggtggttcgcttcttgcatatcgcgttgccgattttctaggtgattcgaaaaaaaatgtttttcgttttttttccttactgtataatctttagcaagaaaattgactgctagtctactactaccatccttggttcaggaagaagaatagaactggtcacagctgcagctttatatatttctggtgctctggtcactggatttgcacctgattttgtacttctgatcataggccgtctcctctatggtatcggtattggtttggtgagtaactctgaggcaaccttttttctccccaaaatgcaatgccactgttattgaacaagtaaaagtataaattcatgtagatgaatgtcagaggaccaatagttatatatctttttgagttgggtagcacatgaaaactttaagagaggaaactgaactgcataatctgtatacttggactgcaaatgactcattacttccagatttagtaacagtgtagcttgatgaccacattttggtggaattaattataaaataagtggaaaggaaccatgaacgcgtttgatccttccagatatggcaatattgtgaatgcttgtagttgaaatccatcatttgggacaaggtctttccatatgaactttggacattgttgttactcagtgttgcggcagatatctatacctaattaaaaaaatacataaagcttccggtaaaaatttcgtccgtcaaaacccatgtccgagagactcttttatccccgcacaattagcgaagtcctgtttctgttaaccaaattaacaaatttaagttagaagcccaaacacggtcacgccaaaaagaaggcctgacctgggccttgaagaaggcccgacctggtttgtggcgttggggaaaaagatgaggaaaacagcctaagccagctggtaaaaccatggaaaaaatttgtatataccaaaaataatgaacaccacgtataagtggaagagatatagaaaataataccatctaacataaattattacaataatgggataattttactaatcagacccaataaatttaaccaaacattatcaacacagacatcaaataatctttacacgcatatttctcggtggtctcagctcgggttgggggaggaagaattactaataaaagatacacaaggattccgcatatttcttttcgtacgctgtccataccaatccactgcacacgaatgatggccagccggcgagcttccgagcttcccctgacctttttatcccaagttttgtgaatcactccgattttgagggaaacggaaagaaaatatcgtgtgggtaaaaaaacctcaactaattttgggagatcgagaaagatttggccggatttgatatgatgatcagcttcggtattgtatagatatgggactgtctcccggaggttgaagatgctactaaagcgcgtgggtttggcttggcaacgagagaagatatatgactatgctatctgagcctgtggctccatttgtgggctgggtcgaagagagccgagccgagcagagatatatagaggcagcagactgagctggggcttataaggaaggaatgattttagtgaaccttttgcattataatgtatagtgatttcaatattttaatttattgttcaacttctaatagatgttgtataaaaaaacgcttttacccgttgcaacgcacgggcattttttctagttaatactacaaacagtatatttgtttactgccaactaaaaaaatccgcaaatatctaaactgccgatgctttgttagaaaggtgttaataataactgaagaggaacataaatgcaaatgaacatattcatatcaaactaaaggtttggagataatgaatcattgttgtgtccatgtatattacatcatggggttatgttacatcactgaatcaccatgctttgtgccaagcgacgcacggtgcacctctttatattgcagagacttgtccttcgcgaatacgtgggacattgatatctttaaaggagttgtttattgtattaggaatactggtatatctctcttccaactgctacacacttttaagtatacccatctatcccctgctgactactccctctgtccccctcccccccccccccccccaaaaaaaaaaaaaaaactactgggtttgaatctggacatagcctatgtccagattcaagacccagaagtgggttttcttctaggacggagggtgtacttgactagttgactattaatacaatattttgcagactggataccttgtagggagtcttgaaattgatgtggtaggaggatggcgttatatgtttggttttggtgctccactggcagtaataatggctattggtatgtggaatttaccgccttcaccaagatggcttcttctcagggcagttcaaggaaaggcgtcagtggaagataacaaaaagaaggcaattcaggcattgagatcactgagggggcgctttaggagtgacagggtcttagcagatgagattgatgatacccttctctctattaaggctgcttatgcagaacaagaatctgaagggaacatttggaagatgtttgagggagctagcttgaaggcactcatcattggaggaggactggttctcttccagcaggttttgtcctcatcagcccacttggaagcaacacatctaaatatgaaatctgaccgtgctttgatcatccttttaaatttgaaattatgtgccctaagttcagtgaaagttattatgtccaagttgaggtagaaaaagaagaaagataatgacctgtctattcatttcatcctgctttggtcatttcttgattttttaatagttgactaatgttacttctttgttatatggaactaaagcactgatattaattaaactattatttcagataacaggccagccaagtgttctatactatgcaacttccattcttcaggtacctctgagtttcttttcatacaaggacagacagaataagacttagttctccatatggctgtgtgccctgatacatacaattaaatccattctatcttcaacagactgctgggtttgcagctgcatctgatgctgccaaagtatcaattttgattgggttgttcaaggtaattctatgaagctaaattatttttataatctagtatatatatagggagaattagatatctattttgttatccagatggtaggtggaaaggtatagagcttacacttttttttgaacctctgtgtaatatttctattatttgcagttgttgatgacaggtgttgcagtatttaaagttgacgatcttggaaggcgtccactacttataggaggcattggtggaatagtgagtaattcttacagacttgtttaagttctatggatgcatggaaagtgtcattttcatcaccttggcacctccccagttatttgtactcattgatagtcttgcttgatgtggatactaagaaactggatgcttaaccaagttttgatcaaacatgttctgaataaattatgcttatgctttctattccctggaaatgcaggctgtttcactgttcttattagcagcttactacaagattctgaacagcttcccttttgtcgctgttggtgctttacttctgtatgtcggttcttaccaggtcggtgcctttactttctgtagaaacggtctatgactagtgcaagaaatttatgttgtccttgtgtttgcaggtatcgtttggtccaataagttggctaatggtttctgagatcttcccactccgaacaagaggacgtgggatcagccttgcagtacttacaaatttcggctcaaatgcactggtgacatttgccttttcacccttgcaggtacgttcacccagattgttgtcacctcacatatatatttatctcatgatgtttccccctccaaagccagcgtttttttagcccttcccatttaaactaaaaaataagtttaaaaaaatcagcctcttcttctatctagaatcaacactacgtattttaccagtttctcccccaaaaaatagatgaacaaactaaactcttttgccggcaatgcacgccttgtttggtgcaggaattccttggaccagccaatattttccttctatttggagccatatcgttgctctcccttgtgtttgtcatcctaaaagttccagagactaaaggacttacattggaggagatcgaatccaagctcctgaagtaagctcactggtactcaagttgtatgtgtgtgtgtgttttttttgagggcaagttgctatgtgttcattagatgaggttgatacgtgtcggtgtaaatttgttcagtcgatttatgtgattaatatagtcgtacatgtagtattttgtacatgtaaattcttgtttggactaaaaatattctagagaaatccaaaaaagctgttcttgaagtgctattttttttggtcaacactggactggtgctatttttttttttgccagtgtaacacagttaattaaattattactagcgagacttaatgtggtactccgtagcagaagagtacgcgtatgaagtatgaactaactcaacatcgctgtaaatggggacatgaagttggaacctgtcgctcaggaaacgttaatgtctatcgctataaacccattaagcatttgcctctagactaacttaacattggtggaccaagcttatatcacgatcaacgaatttaataatcaaacaaaaatgctgaaaatataacatcttttgcccatattagaattgaactcagctgtagaatttttgacgtttgttacgtgacaagacgatttgcctgacgtgcttggtatggcgccctggttgtaatattattgtttatgaagttctttccttcggtccttttagctcaatacggtgtttcttttttatttctcttccttgatcatgaagcctaactcaatcgtctaaccaatcagtgattattcccaaaacaagagttgagctttcatggttcactgatgctttgccatcatgatggtaacatcatggcaagcaagaatccaatcattctagagggcagtagacgagctgcaacatcaaacgactgaccaaatgcagcaagccgaacaaaattgccctgctcacacaatggtagaagaaccactcattcagaatccaatcaaagcttggcctgttggaacgatggcatgaaaaatgcaaccctccgatgcgaacgtggccgttacttaggctgaagggcacacgtgtaaaatgttttttctcccacagtgaaatttgttcatagtgtagcttttttttttaatttaagcaactttattagagaaagacagagttaaggagctaaaccctagtacatcgcagaaggatataacacaaacaaagagaccatctctaataaggtagaggctaaccaatctaagaaagcaaacttccagatgaaactaaatagcagtagaggaccagatcgacggagctcagcagccgctacgaccggatccttaggcctccgtagacatgcaccctgcttgatagactggattaaacaaatcttataacttgtcattctctgatttttaagggatttgaggagcatcacatcttgtaggttcacatgtcagcgatccacgtcaattttttctgacgtggcaagctaggcctgacgagtgcttgcacacttgcaagactcgagtcatgccgtcgtcttcttctctgcaggacagccaaatctgaaactctgagaccagcaacgaggttgtttagactgaccgatcgatcgacgggagctttgggttccctgcaggaaggacaggaccggtgcaaccaccgggataaattccgtcttctgcaactctgccgttctcaactccgcacgcgttccttgaccagccatggctgcttcttcgctgtcgccgcaatgggcctcacgtgtacctgtccatcatcgatctatcagttcactacccccatttccttcatgatttcatctctccccgtgaataatccgtgatccgatcagcttccaacgccccggatttgatcctgtgtgcaggagatatactctttaaaaatactaggtatagtagattcatttactttcagaaacttcagatttcttggggtaaaaaaagaacaccacagatccagtaggcgagtcatgcgagcacgtaaagtagagaattatcccaaggatcccagcgttgcacgttggcacatgtgaagaatccatgctttccaggcatgaaaatctcgcgaatcaaacaaaacaaatcattttcaggacgtgaaattctttaaaacattcgcgtttagcagaagatacgatcacatagtggagatggacttcgtctagttaggtggtgacaatgatatcactggtagagaaaccatctttggtcggtcgacccatatccacaatagtcccggttccattaaaaaccgggactaaaaatgatttttagtcctggttaataagaggaagatctttagtcccggttgttgttaccaaccgggactaaaaatcatctttactcccggttggtaactccaaccgggacaaaagttcatttttagtcccggttgattccatgtcaggctgtgtcagggccctatgatctttagtctcggttagtaacaccaaccgggtgatgaactactgtaccatatggtaggtgattt

SEQ ID NO: 8771 - DNA, 81189 bp, Oryza sativa
ccctacccctaatataccattagagcccccataatattcctaaaattctaatctatatatttatactatgtattagaaatatagccaatttatatgagacatgtttcaatttttattggccactttggtttagccccgctataattttattctggctccgccacagtcaacaagccatgtaagatgaaactgcctccaaaactccttttgcaccagtttcactaattggaagcatgaaatacctggttttatggttggggaacattaatcttacccgggctatagttaagggagacaaaatatactttctggaatggtattctaaggcccatcttgtcttcctagttcctacccttctgccagaaaggaaaatgatgaatttatttttacccattaatgcaattgggcagctactggtacgagtgctaccaccaaatcccgtccgtaattatgagtgatcacggcctgaatcattaattttttcagaccgtaattgaatgaataccgggaccgccaacaacactcactcactactcccctctcctcccctcccgactcgacgaggatcctcccgtccccacgtcggctggcgattttgactcgcccgccgccgcctgcgccgatctccctccgacgactggcggcggcatcttcttccgccgctgcattgagcacccacgcgtgaggcatcctctttctcatctctctttctacacggtcctaaccttttttttccctgtttaaattaacctctgcatctcctctggatctggaagcttttttcttttttcctcctttgccttaacctgtctaggaatagtagcactttgtttcccaaaagatataataatcataataataataatattggggagccccacgttaggtccgtccctggccttttgatgcgtattgcgtagaaagtgcgtttaaatgcaatagttgggtgggtctatgtgtatcttgaggactttgttatggtatgcattatccattatgggatattattattattttgatgatattattattattttttttgttctagtactactgatttaattgaattgctttaggcaagaaatattggcgttgtacttggagatctagtgcgctctatgttcttgggacagtttgttgtgttgtgatttgtgatgttcagttcagcacaagatgctctctgcgagcattcattagttaagggaaaatttatgcgcatttattagttttctctctgtatagaagtatagaacccccataactttataaatgttccatgaatatgtgtaggcagaagttctcttcacctgtgggatgatgtagcaacattttatctcaactgatcctccatacagtaatctccaagatggaacagatttcagtgagttaattctttctctttcattgtattgctcttgcgatgaaatgtcaaaagtaaagattgagaaatatgtatccttttttgtttttaataacttttgtagcttgagcatcggtacaaggagtgcaggccacgaagaaataacagctgtccaaccaaaacacttgtcgggaaggatcagttgaaggaattggagcacaggagaccatcacctagtgtgattgcaaaactgatgggacttgatgtgttgccacctgcttatgtagcccacaatcagcaccaggaattcaaggatgtattcgaagtgtcagaggaaccacaagaggccgtcacgaaagagagatcacataatttccctaaagggttgccaagcttgaagcgaagtgcattaaagctaagaaagcttatgccatcaaagtctccctacggcgatgaaacatttgataacaatgtagtgaaccaagatggttttgatcgcttgaactcgctagagataaataatcctttgtttgagaagcacccctatgatgtgaattgttccccaaattatcgatatgagaaagatagtacttcaagtactttcaggaagtaccctgttggtttaggtaactcttcacttaaagaaattgttgttctggagctaggcttaggggaagtccaacattcaggtaatgccttttctacaccagaaccctctgatgtcaataagaatttcaggagaaagatgaagcaggctgagttttctactacgaacaggggttcgcaaaatcttttaggcactaaagatattaatgtgcctagaataaaaggagaaagacacttgactagcaatgctgtagattcactgttaaagcgacaagattcatcacttgatcaatataacacagtggatacggataacactggatcatctcagaagtgtgttagcagtgaagttaactccagaaaaagcaacaggtcatcatcaaatagctcaccctggaaaatccgccgcaagtatgaggaaggtgccattggttcaaaaactcttgcagagatgtttgctttatctgattcagagaggttgaagagggattcagactcacatgtgcagattcaagacaataaacttaaccggggcaacaacaatgacaaggaaggatgctttatagtgttgccaaagcatgcacctcgattgcctcctcacagtttgttggacaagaattcttcctgtgaaaggtcccctcacgatatttttttctcaaatacatcaattagtcacaacagtggtcagtttcacttcgattctttctgggataaaccaacacggcagcaaatttcaagtcccacccaagatgacttgaggaatgcttcttgtgcaagatatcacaccttggagcaacatagatcttctttcccttcttatgataataccagaaacaactcatggcatttaactgatgacttttcaacttttgcctgcataaatgagaaagtacttttcacaacagatgaagacttgttgagaaaacctactgaaacagtgcattcttcgtttggatcacgattatctggggaacaaaaggtcagtaggcccttacatttcagtaatccaaaacagaaagagagttagttgggggaaatttgcttcaatctggcgtactttcatggtatttttcttatttcaaggatcatgaattttctgaaatgacaagaatgctctactatgaagttattaataaacttaaacatttatttttactctaattttaattttaaaaagggttcaattgctgttcctgtatcatttcttatttccttttttttgtttaacattagatcgcttctttcttatgtttttcaaagcagtaagcacttaagaaagtacactctactgtgaacccagaaacatagacattgctcttttcttaatttttcttctttatcaatagtatggcttctttgtttaagtttttcttgagtgcggacatgtgctattctagtatggtactaagtacttggtttgtgtacatactgcaataccttacttagccttcattttgtccaatataatgatgaactgggagttaaccaattttcatttgttgacatctttggagccttaaaacgtctggtgttgtcatactatatgcataaatttgtggttaccactcacccagtgctccccctttcaggtttcagcatcgcctttccattgcggtgtatatgaagccataactatttctgatcatacttgtgcggcaaagtctcgtagaagcttgaaagaggttgaccgaccaagcccagtgtctattcttgagcctccaactgatgaagacagttgttgttctggatacttaaaaaatgactcgcaagtcatgcctagtaagtgagacagaccagcaccatttggaacaaagaaacattcccttcttcataaaagaattttattgcttcaaaggagaagtctgtactgcgtttatcagctatcctaacaatgttgaagttgatacaaatatttatgaaattaagctaaaccatttctgtagtctatagcacatgactggagcatcattcgtgattaacatactctagaaaggcatttgctatctagtaaatatgactagttaactaactaatgataaatttcttttgtagtatcactgagttaaaagttggaaagttcaaagttcagccctttaatttaactagtttgtaattagcatacactgaaaaggattttagtttaactaatttagtttgtaattaacatactcttaaaaaggaattttctacccagttgaatgttttactagttatgaaatgttcattgcctctgatcaatgaactttcagagcactaaattgattgttgaatcttttatgttggcctcaggcatcgataaacaaatatatggctgtgagctccgatatgagcaagaagtatccttgtccagcgacaatgacaatgattcttctgaccagtctcttgaagcatttgaagttgaggaggaaaaggaattctcttatctacttgacatacttataagctccggtgtgatagtcgcggactcacagctcttgttcaagtcatggcaatcttctggttaccttgttggtcctcatgtcttcgacaagcttgaggggaagtacagcaaggttgctacatggccaagaccacaaaggaggcttctgtttgatcttgcgaattctgttctttctgagatcctcgcaccatgcatcgacacgcatccgtgggcaaagttgagtagaaattgctgccctgtttggggccctgaaggacctgttgaggttgtatggcaaacaatggtcaggcagcaggaagagcttgctgtagcacatcctgatgacaagattcttgatccagaatggctggaattcggtgagggcatcaacatggtgggatggcatatagccaggatgttacatggtgatctcttggatgatgtcatactggaattcctctcaggatttgttgcttcatgaggaaaattaatcaaattagtttgtacttcgtgttattcatcaatactagtaacagtagtcgagtgcaatgacgagccaggattttgcctgaagaaacttgaaccacattgggtggtgtctgtaacagcgtttcaagtgcacatatgttgccttttttctggtccatgatagaggctcagtataacatttcataactctttgaaggccgaagatgtatgcacaacaccataacatgtgtagaaatgtgattctctaggatacctttgcttgttatcggggtttcaaattgtttttgaaaatcttaaggcaaatgtgcagcacattttaaaggaaaccaacatcatatgaatgcttgtaatttatgttcgatacgaaatctgcgatcacaaataaatattttgataccattgacgatacaaacatctcattaattttttatcggccatgtgccttatggcagaggttagggatgaaaacattttaactattttaaaaagaaaatatttatctagtgcctacttggttgggtgataatgaattatagaagttcaattaatattgattttaaggctttttttcagtcatattcgttgttcgcctctcttttcaaaagagaaacaaaaaaaaaccaaatcattctttgagaatcaaattttaaatttcaaaatcgatttctcaaataaaaagggttaaacggtacgtgcattttatgaaaaaaaaactatacataagtttttttaataaataattcgttctttaagtttataataattaatactccccgttccaaaatattatttagattcataactaaaagttgctatacataaattccactatattttccgtgctacttaggtcctctttgtttaggcttataagccaacttataagccaaaatgtctaagcctaaacaaacaagcagctttttcgtttggcttttttgaagccataagccactcttacactattaagccaaaagctaggttggagaagttttttttggcttatatgagatagatgtatgactccaccactaaacttaggatattaaattcactggcttataaatcatataagccaataagctgacttaaaagtctaagccaataagcctaagcctaaacaaagagggccttactaacccaactaagggcttgtttgggggagcttctaactgctacagcttcacctagaatcagaagttcccataaatagtataacttttgatttagattctgagaacctatagttgtacaatccagaaaataaactaaaagtcagaagctggaaaatccagtttttctagattctcagaagctggttatcaatcaactgcttctcaaaatcttaagcccgccccaaacatacctttaagttgcacttgcaaatatagctcgaggatggataaggagatactcttttcatcccaatttgatcatcctctaagatttttttgggtgttaccaaattgatcattatataacttgtgtctataagtttgtatgtgtagaaataaaatactattgtttcatgtctattcgttttgtatgtaggagtaaatgatattgctgtatgtttgttcgcttatctgtgcagtgataaatggcatcattgcatgcctcatattcatgtatagaataacactttgatcaatgatgtttaattttaaaaggaacaatgttttcttgtcttggtcttagcgtcgtttgtaaatataatgattaaattaggataaagggagtatgatataaatgaagttatttaaggatgtaacatagattgtagaaatggaatcctatatatctgtacaagtcatccccactaagtgcaatttcctgagctgtggttaagccacgtcattatttagttctcagccgttcgattacatctcgaggatcctcattgcatctccgtagcgccctcggagcgaccaacgccacaggtggaccccgcctcacggccgcatcgcctcccgtggctccggcgctgtagtcgccacttccccttctccccgcgatgtcgcacccctgtgccgcagctgccttcccgcgcccccaagcacccgcctcccaacctcttcgcctcctaggcgtgtgcatgaagaaacggaagcatcagtggccgcacagggcaagaaactgaattaaactgcccgaagaaattagtcccgtctattcatcttcaattcttcatgttttcaaacggtcgcttgcattactccggcctttctttcccatcttatttatgtatgatgatatacacagcagctggatcgatcttctcagccaacaagctggatcgatctgctcgaccagcaagaagcttctcctccatacacagatccctggattgatctgctcggccaacaaaggggttgttccacttccactgcttgctgatctcagatgttccagcgtaagttctttccccattcagctaaatctttttataatacatcttgattgatgctaattgagtagtcacactaatttcttcgattcaattatatatcaattttcaaccgaattcagtatcccaaatcagtccctttttattttccctgtacaacagtatttgcactacatgactacaaataatttttatcactaagcaacatttagtgaatcaatgattttatatacagctcattttgtaaacatgatttatcttgcggacttgagatactaaatgatacttcctccgtttcacaatataagtcattctaacatttcccacattcatagtgatgttaatgaatcaagatagatatatatgtctagattcattaacatcaatattaatgtaggaatactagaatgacttacattataaaacggagggagtaagataaaaaataattgcagataattcccaatatatcaaaaagtatggtgatccttggtcaactctatgagaatacacaggcaactgtatgattcaatgaagcaatgacctagatggagattttttttatcatatatgcaacacggtgctctcattcagagttctttttgtgtgattcttcaggctctggatttggaagttagctcttattgttcttctccttgccccatagatttggaagttagcttttgatcaataataaactgagtttcggaatagcaagctacagtagttgagaaaaaatacataaaaaaccatttagggcccctttgatttggagaaaaaacatagaattttagggcccctttgatttgtaggaaaatgtaggatttttggaggatttcaatcctatggaaaaaaaatccaatgaagacctttgaaataaaggattgaatactatccaatcttttaaaattcctatggaatgtgtaatcctatgcacattttggaggaaagttagcaagaggtctaacctgttggaacatttcctttgagtctatctctctcatccgattcctgcgtttttcctatggtccaatcaaacggctattcctgtgtttttcctgtgtgtttgtaatcctctgttttacaattgtattcctgttagaatcctgtgtttttcctattcctgtgtttttttcattcctacgattcaaatgggcctttagaggattttaatcctataggaaaatttcttataaagccctttgaaacaaaggattgaatcatatttaatcctttgaaattactatggaatggacaatcctatagagattttggaggaaatttagcaagagcttcaacctcttgctaactttcctttgagtctatatctctcatccaattcctgtgtttctcctgtggttcaatcaaacggtcattcctgtgtttttcttgcgttttgcaatcctctgttttacacttacattcctatcaaaatcctacgtttttcctattcatacgttttctcaatcctacgatttaaaggggccctcaactcttacctctgcaacagataacaagcttgctctttgccattaaccttatcctattttgttcaccgtgcttaaatatgatcctattttctgtcaagcactatggtggtgttttatatgagatctcaaactctcaatgtactcaaagtgaagcattgctattattatattccttgcaaaagttgctacaatatcatccagaattttagcctctatttcccttcttttcttacttttttttatcacacaaagtgtacttgaatttttaaattttattttaatacaaatattccgcagcagcgcggtatcctctaattattttagaatctcatgtcccaaattaagagatatttaaccatttgccacatttagatgtggcaattaactttttgacactggacccacatgtcatagacacatgtggacccacgtgtcattgagataggggtggcaaatagttatttgccaaatctaaaagtggaaaatagttaaaagccccccaaatcaagaaccccaccttaaaatgtttcaactaatttcaagcaactatgactgtgtttagttcagcgtaaagtttagattttggttgaaattaaagatgatgtgactgaaaagttgtgtgtatgacaggttgatgtgatggaaaagaactgaagtttggatacaaactttggatctaaaaacagcatattactcctactactacgtatacatagacgcaagagtaacgtgatcctctcccgtaaaccgccaccctgacataagaggacagttgggcccacatgtcagcggcatccacgacctacacaagaaaatgtgaaagcaagaaagaaagtcacgtcacgccgttccccctccctaaacgtggcccccacaaaacgagccccacaccccgacgaagcaaagcatcccaccaaacaaaccaacatttcggcggagcaaggaaatacccaaccccgagcgccaaaaccctctcctctcctcgccttgccgcgcccgcgcattcccgcaaacacctcgccggcggagcgcccccgagatgaagggttccgacctcccgcccggcggctccggccagaagccaccgggcggcccgccggggaacaggaagggcaagcgcggcgctgaggcgcctccggctacctcgtcgtcgacgccgacaaccgcgaggcggagtaagcgcctcgctggtgcgcctccggatcaccccgcggaagcagggccatcgtcgacgaacgcgaggcggagcagtcgcctcgctggtgcgcctcctgctacccccggggctgcggcggcagcgccgacctcgtcgtcgccgacagccgcaaggcggagcaatcgcctcgctggtgcgcctccggatccccccgcggctgtggcagcaccgccgacctcgtcgtcgccgacaaccgcgatgcggagcaatcgcctcgctggtgcgccttcggatccccccgcggctgcgacagcagggccgacctcgccatcgccgacaactgcgaggcggagcaatcgcctcgctggtgcgcctccggatcccccggcggctgcgacagcagggccgacctcgaaaaccgcgagacggagcaagcgcctcgctggtgaggctccggagacccccgtggaagcagggcagacctcgccgtcgtcgacaaccgcgaggcagagcaagcgcagcgctggtaagtctccggctatccccaagggatcggggcaaccctcgtcggccgagaagagcaagcgcaccgctgatgcgtctcggctgaccccgcggaagcaaggccgtcgtcgctgtcgcccacaaccgcgccggtcaggactacggccgtgtcggtgtcggtgaggaaggcggccgaggggcagcggcggaccaccacctcggggcgcgggaccaccacctcggggcgcggggacgctgcggagcaggaggcgatgcgggaggcggtcctgtacgtgcgccgagagctctccgtcgtcgcgccggatgacctcacctcgccgcacaactagccgagggtggccgcggccatggcgctgagttgggcgcggagcgcgggcgcaggggggctgtggaacacccgggggcgcgcgcgcgcccacgtgcagccgatgcgggaagtgatcctgggtgcgcgccgagagcgcaccgtcctcgccgccgatgaccccgcctcgccgtacaacgagccgagggtggccgcggctaccacgctgagttgggtgcggagcgcgggtgcaggggcgctgtggtacaccccggagcgcgaagacgatgcgggaagcggtcctgcaggcgccggcccatgaccccgcctcgccgtacctggaggtgagcttttcggcacgcgtccagttctggttcggcacatttgagttcttgggatgctgttgttgattacgcagtttcttggtggtcttgatcggaccttttgcctatgttaatcttggatgaatctaacgtagaattgaggcaacatattggtgtctcgtactcgccacctttgcatgggtttgccctgttagggaattgcagttgcttatatgtttcttcatgtgggattccttcctattcattagtttgctgctcatgtcttgcatgctaggacgacctgtctttgtttcatgggctaagatttttgtagctgtagaaatcggtgtctcttttgttagtttcgacagcttttcgtactttagtctgtgacttcttgggtacgatgtttgtgacgattgagtgagatatgcagtttttagcttccaatatcaccttccgttgtgtcatgattttcttaggacatattgttgtttatgaaaggttatcaactggaattccactgatcagtatgttaaattgttgcttgcatcttctgtttttactgcattgttatatctgtactttttcacaattttcagggtcaacacttatgatagtgtcacgtgtataaagtaacgagctgattgtaattagtattctagaatgctgcgttgtttagttttacagttttgctgccattttcatatgatgactgcgcagaacggagtccgccataatttaggatgttgaatgtggttttgttttgacggtcttgctgtggtcggtcttcattagttatgtaatagtggagcttatgctcacgtggacaaggcattgttcctattgtgcttattttcattatttattttctgtctagctttcttatggttgtgtagagatgaactctatggagtagggatggacgcgagtcactttatggatagccgtcgatctagtctaattcaacaagattaactaaaatgcaatgtttttctaatgcatcctatgtattttagtttatttggttgaactagagtggattgacgagtatcgataagaatatctgttgtttttactgcttgttttgggatatggcttccacatgctttttttttttatcttagtctagtactttattttctcctttgacatatctgtaagaaaaaagttactcgagcttgcatctaattcacttactataaacagcagaagccctagaagaagaagagctcgggatctttgaaaaggttagaaaaagaaaatacattctgaatattgttctacttgtggtttctgtgacctgtcaacagagggattcttggctcccttgtaacagcaatggaattttaggaaaccaataatgttgggcactggctattgcttttaattaatccaagagttcatagtttccttaaaaaaatatatcaaagggtccattggtggatggtcactgtagctattgctgtaccagtacttttgaacttcttggaaaatgactgtcacatttttgcacaatgctggatgcgtgtgcacgttaattgttaacatatgtacttcttgtcagaaagttcttttaaatagaaacagtagttcattgtgaaagttcagaattgttctttttccgctgcaattttaatccttgttgatctttttattattgctagtgtgataattatattttaccactgttttctttgacaggtccaggaagtagaagtatcaaaagaatttggatggtgggtcattttttgtagcagaggaagtagaaaattcagagaagagtttgatgtctaattcgacgtggttcttttcttttcagtactcagtagtagtcggctattgcagattacatatctgactagatacagtcacggttctccagtgatcctggatgtaggtttcaccaccacccgaggaaaaaatacaagccgagatgaattagtctactgaagtaaatgacagagaccttgtgtagttgcgtgatgtattcatgagttttgcttcgcttttgagagagaagtgcataatacgaaagagaatgaaagatgtgggaaattggtacagaactggccagatgtattggtcatcattttggaatcattttgacatagcacttatatcttaaattcaaatattgctgaagcataagtgtcctggggaattttcaatttggctcggtatcattcttgcagggattgctacctgcatgttgttccaaactgatttatgaaattttgtcctggtgatggtactttgcggtatttatcattgctggattgagggttatctcatcataaaccgttggcaatttggcatatgtcaataacttgtatctctggtgatgttgtatgcaaagagtaaagaaacgttgttcttcgagtaattcctggttatggataattcaatccaatcaatgaaccaaacccaaattaaagaaagctatggcggcctcaagaggagcgcgtcctcacgcatgacatgcatgcgcgggtgtgcctatataagcagcagatcagccatggaagcagacggatgcaggtttctgaagaaatttcaaagacaaggaaacgtcaagtagtactgtactaatacctcttcaggctcatgcaaagcgtccttgtttgatcgactggatataggaaaacaatggatgagcgctacaaaaataatcgaagcaatcagaaatgtcttttgataaatacttttacgtctctattcctaaccgtttgaatatgaaaactgtagtagaaaataaggaaaattaatttttaaattgaaatttcagcagacgaatgaacaaaaacttcttttatcacaagacctcttgttactatgtaaaaagttgtcggtagctagcagaacgaacttggctagtgtttagttccacgccaaaattgaaagtttacgtcaaaattagaagtttgaagaaattagaacgatgtaacggaaaagttgaaagtttgtatgtgtaggaaagttcgatgtgacgaaaaagttataagtttgaagaaaaaagttggaatctaaacaaggctttgttcttgtttcagctaccaaattttgatcttttattatggtactcctataacagtagtacaaggtatcatttggagttctgctgagttgttgtcaacgacacgtaggtacaatattgtactccctccgttttttaatagataacgccgttgactttttctcatatgtttgaccattcgtcttattcaaaaaatttacataattataatttattttgttatgagttattttatcactcatagtactttaagtgtgatttatatcttatacatttgcataaaaattttgaataagacgaatggtcaaacatgtgagaaaaagttaatggcgtcatctattaaaaaacggaggtagtactatttatttttccttgcatcacgaaatccaagtcatacattcctatcctaaactgattgatcctagataacaatattcaatttcatctgcatgctccctccgtccaaaaaaaagacaaactctggtttccgtgtccaacgtttgaccgtccgtcttatttgaaaaaattatgaaaaaaaattaaaaagacaagtcacgcataaaatattaatcatgttttatcatctaacaacaatgaaaatacgaattataaaaaaaattcatataagacggacaatcaaagttggacacggaaacccagggtttgtctttttttgggacggagcgagtagaccgctaataatctgaccaattctggcacctaaatctttaccaatcacaccatgacatcacagaaagtcctccacttcttcccgtcttcctgtatgaacttgtgatgccacggaccagatgtgaacccttccaggaacagcaacctaacttcaatagttcaattaaaaagttacaattctggaaccaatatactttatcgtcataattcatacgattacacaactatacagaaaacaattatatcactttttagataatggaaaacagttatcactatatataccgtccaaccagatcaacaattaaagaattgggaagcgacatagtagcgacctgcaggtcgtcggagcacaccgttgacctagctccaggacagcaacatcacgctcagcaaaggcttgtgccattgaacggcaccaagtcatcgtccccatatttatgcatccaaaggaaaaacgatgaagcaataatcagaccaagaaatttttcctctcgatcttcttgccatggaattgcctgcagccaagaggcagttcagcaccaccagccagggcaaagaagtttcagggatcagttcttgcaagcctacttaccagagataccaatcatgccctcctgaggtctaccgtcgtcaggcttcctcttacagcgttccatcttcagagatcagcaggagctcggttcgcagcagcggctcgttcagggcggcggcgcagagtctcgccggagttttcagttgctttgtgcccaggaagtccagaaatgaggatgaacttgagatttctcggacgacgatttctcaagggagcagaagtacaggttaccaagtctcgattgatccaggtaagaactattcctctatcgaggaatttgcccagcaattctgccttctggtgccttccaattcttcagttcttggttgttttgctggttaagtagagtaaatttaattgcagattaactgtacttaggtcacctgttaaaaggggaaatatcaagcagcaaacaattagtgtgaaaaactgcaatttacttttattttagcactagataaacatgaatatcccccaccgtgtgaaaatcagaatggagaaatgacaaatttaagtgcagcagggacagggtatccccaagaaagcacagagctcacagttgcagagatatttaaggcaacctcaaacttcagtgacaagaacataataaagcagggaagttatagcagcatctacagagggaagctcagggatgggtctgaaattgccatcaaatgtgccagaaaggtatggaaacaaagggaatacgcatattcagcaatttttcatgaggtatgtaggttggagattggtacttggtaataagtagtaaccatgtcttctgttgcaacagttaaacagtcagtatgcatcagctgagcttcggagagagcttgaaattcttcagaaaattgatcataagaatctagtgaggttcctaggattctttgagcgcgaagatgagagcctgaccgtcgttgagtatgtcagcaatggttccttaagggaacacttagatggtacgttttgcccctgatcgattcattcagttgcagtaaactacaatgccaagaagattctagtctgtaatagtaccactgttactatctattcgaaataattctagtacctagtaggaggaattgatcaggatttgtgcaaatgcaacacactgcagaatcctgtggaaatggtttagaacttgcgcaacggctcaacatcgcgatcgacgtagctcatgctatcacatacctgcacgaattcaaaggtaagtgacatatattctctgaaatttcagagatatgaagatgatatgagaagtggaagtctgaattctaaactgaaactcgccgtttgcagagcagcggatcatccaccggaacgtccggtcatcgaacgtgctcctgacggacacgctgacggcgaagctggccggcgtcgggctggcgcggatggccggcggcgagagctcggagtcggaggacacgcaggggaagagcgccgccgggtacgtggacccggagtacctgagcacgtacgagctcaccgacaagagcgacgtctactccttcggcgtcctcctcgtcgagctcgtcaccggccgcccgcccatcgagcgccgccgcgacctcgatccccgccccaccacgaaatgggtaagaaaccaagccaaaccaatccaatccaatcgcacgcgcaagcacgaacacaccgcaagagatggaaaactcacagcgatgcgatgagattgcaggcgttgcagaggttcaggggaggggaggtggtggtggccatggaccccaggatcaggaggagcccggcgtcggtggcgacggtggagaaggtgatggagctcgccgagcagtgcgtcgcgccggcgaggaaggagcggccgtcgatgcggcggtgcacggaggcgctgtggtcggtcaggagggaataccaccgccggcaggacgcgcccgccgccgccgccgccgtcgccgcggcgccgactcaagacaggagctccgattgggttaaggtagtttagcatgcaacgatgtgatcctaagttcctacttaggttgagattttgagatgaattaattattgttggtaattaatttatcatctttaagctaccatgccgccatgctttgtgaatacaaaatatgaggggttgggtctaacaatctttcttatgaaagttagaaagattgttctgtactataggttgattatattatgtaagaacatttgtaatttgtaaagttaacttgaaaattctcagttcttggaaggcttgcatctatcatgttatgtacctatgttcaatgatctcaggttgagttcaatcacaatcatagcaagctgatcactgccaattactccctccgtcccattttaagtgcagttgtgggtttccgtatgtaacgtttatccctccgtcccattttaagtgcagtcgtgggtttccgtatgtaacgtttaaccgttcatctaatttaaaaaatttataaaataattaaaaaaataagtcatgcataaagtactattcatattttatcatctaacaatagtacaagtattaatcataaaaaaatcaaaaaagatagacggtcaatcgttgaacaaagaaacccataactgcacttaaaatggaatgaagggagtagtacatagcagtagagcatagcatcttccaggagtcaggatgatggtgcaagaaagattgatagcatatctggggctaaaattctcaagatgttaaaccaggatcagacagctgccagttccttgtgtaaatatcataagttagaaaacaatctcaagtgtgacaaaattctttttgcatgactaaaagctgtacttcccgaactagctaactgatgggatgcagcatcgtgaggggttttttctgtgcagattgagctccccgatgcagtatgatgtggacaagctccttcatgggtgattggatatcctgctaatatcttgttctgcttatctgcttctatgaggacctgacgtttcactgtgcaaatcactaatcaatattccttgaaaatgatggcaacggagcgccttcttgtggccgcaggatgacaagaacgctaaacatcccaagcattggaagaagcacgagccatttcagaagcttgtaataatgcatgtggaaggtgagcgagaactcgtcagagaagtagaacccgtttttgtcaaccatttccacaagcacagttcctgtggttctcacaggaactgtgggaagcttcatccgctgcttgcctggttcattataagctgcattaaccacaatgcgcctttctccttgataattcccagggacaagtagagtaacctgaaatccaatggtaagcgagggtagttggaagttaaataaaaatatttggaatatccatcagacaagccattgggttgacaaaatgtaccgtcacgttataaggagcttggttcccataaggaaccctgtacttgtccacaatctcaaactctacccagaaatgcttgccctcttcgtcacggaatgttctggaaccgtgtttaacataaataccttcacggttgtaacgatatgcagcattgtttcttccctggtttgatgatctccattcctaccattaaattggaaggaattatattgttatcctactgtcagcagtacttccactatcttgtttaaacatccatgaataaatagaaggtttaaaggaaatatgcaactctcagccaaaccagattaaacataagttacggaggattcaccaaaaaatctactgacttgagttaaattatgagtaaattgcacaaaatcacgtgattttgttatcctattgtcagcagtacttccactatcttgtttcaacatccataaaaaatataaggtttaaaggaaatatgcaactctcagccaaaccagattaaacataagttacggaggattcacaaaaaaatctactgacttgagttaaattatgagtatgcacaaaatcacgtgagttttgacacgtggcacgtaaccatgggtattatggtgttagtgtttcacaaaaccatgcaattgaccaatttgacccaaatctgaacatgatttgacccaaatctgacgtgggattatgagttctttcatccaccgtggttctatgagcatataaaagtttcatcccacatgtcaaatttaagaaaaatttggcaattgtgtggttttctgaaacattggtaacataacaataggggttctatgccacgtgccaaaactcctgtggttttgtgtaacttggacacaatacctatggttttgtgtaatttactctaaattattgacataaaaaaacatgctatgtaccttaagtggatggtgcggagagggagtggagaagcagaagacattgccattcatggtagtaacaataagatcgaggtcatctccaccatcaacattatcagccaaaaccatactgtacctgtcaatatgcaaagaagtgagccactttgttgaatccagaaattgtacagagtacagaattgcaaagcagacaagaaatgtcatacgaggtctctccaatgtcaacaacatctgcacagccacttgagccctcaatcaaatacaagtaaccatcaaaggatgtagtagcaagggtgaggcctttagacttttcatcatgtttgctcatgtcaagcaatagaacaggactcatgatccttccatgcgttctatatgggaaaggctgaatttttgagccatcctttccactaagaacatatatgtttcctgacacggttgggaccacaacttcagtgcgaccatctccattaacatcaccaacagtagggcgctgtcatcatatgacaatggcaaatcagagggtatgaaaagcatagcccaaataaaactgaatgcaccagtgaagacagtgaaagcatatagtaatactaaaccaagttatgatattctgatttctgactcggtaaaaaggtaatagaacaagatggaaataaattgtgacaatctgacaagaaagattccatagtattctaccgagctaaacaagcaagcagcttcaggacatatagcaatttgcagtccatagactgccaaaggtaagggtatgtttagatatagatagacaaccaaaaatatatacacaatcagttagaacccacaaaagaaacgggtttgaacttgcctgtgggataagactcttaagatgaacctcccagatttcttctccctctgcagtccatgctgctacattgccatggacatcagcagtgaccatctcgattttcccatcatcattgatatctgctgcaatgactggtgcatgaatctccgccatctcaagtgggaacttgttcctaaccttacctagattgataaaatcaacagcacttatggtgagaatatattgtatttgtgaggattttcagtgaacatgtcctaattatccaaacgaagcaaagagaagcatgctgaaacatattgatgaaagcaacagaactgaaagtgagattttattgtatttgtgaggattttcagtgaacatgtccttattgtccaaacaaagcaaagaaaagcatgctgaaacatactgttacttctacactaacatattctgttgttctagaaaaaaaaaactttatgctacgggagctagatatacacagcatagaaaacaataagtcagcttaaagctgtttatggattcagaattgatattatgaggttaagaatttaccacgatgatcgataacataaaacaagccaaaggaagttccaacaagaatatccaaatttccatcaccatccaaatcaaccacggtcggcgaagaatatgcatgggcagtaaaatttccactatctgtactcaaatcaagttctgcagtccatttgacttgtcttgtgtcaaggttaaaaacaactatactgcttgcaatatatttgccaatgtcaatccctcctaactcctttagatgttctggtttatcataatacctgtcagtaaaagacaagttactagtgactgtctgaaacaccaacacaacaacacaggaattaggcaagaaatcattaagtcatattatggtcacaagttttgcattgagagagtatttcaatcataaccaatagacagaagggaaattacaagcaaacaccttaggtcggcatattttgattcattgttggaacctaactgagaagtgaaaactgtcataaagcaccaccacataccaaccgacccaaaatcagggagaataaaaggattctggttttaaaaaagtaacctaaactacataacaacaaatgtcatcacatgataacataaataaccagtatattttgttatgttatcaaaatgcacttgtagcagagaaagcagccttactcgtggtcaaagaagtaagatacagaaatcaccatttcttgtatgccatctctgtcaatatctgcaatcacctgtagtggaaaataattcatgaatatttatagaatgaacaagcagaaatagccaaaacgaaacagaaggtacactcactggggtggacaagatgtgagcatctatgctcacataatcttctgccttttcatgttgttgttctttccagtcctcgtctccccacatggtttcatcaacgtagtcatcataatcgtaattgtactcatcaggcagatcttctacatcccgaaacaaattaaatgatgcatcagcatcagcctctagaggctcgctattttcaacagtagctgcttttgctgttccggtatcacttgcatcagtttctgagcttcctgcttgattacttttctcatctgtttgaagcaaccttctctgaacatgtgatgcattctctgttgtagtacttaaactagagttgttcccagcatctgtgctgtttagattgtttaacacatccatattctcctgtcctcgggtagaattaggtttactttcaactggctcttccttagacgcatgtttcatggaatcaactcctcgtgttgttgagtcatttgtgctccctacagtgataaacaaataaaactataatgcatctcttgtaaatgatcttatagactacacacggagtgtggattctctgttactaaaatcagagtactggagtagcataatcgttactacgtgcatgcaccactctctttagagcattttccatcctctggttggtaacatcacataatctagttataatatccaggctccactgtattatctatatatctaaggacagcctacaaatatgttcaacaaacatcaatattgaactaatgatcctaaagtaccatttaacctaaacagcgcgcagagccacagactttcaaggtagagcatgtaaaatactagtgactagagaataagcattgcagccaaactactaaagcaacagatgaaaagaagggattcttatgattgaccagtgaatagtgtgattatagcttataagataacttacgtgactgggattccttagaagattcattcacaactggcttgtcctgaatatttgggtgagattcttcagaagcagctttctttgcaattgagctgtcatgaacatctggatgggagcggtcaacgggatctgtattcagcccaacataccagtctttgtgtaccttcctacgaggtacttctagcttgtccatcatcatataacctgataccctacataacaaacaaataaattaccatgtcaaacaaactcaacaaataattttacatgttcagtgaaaacataagaagatatgcaccaagttccttacctgaagaaattcactacaccattgtaagttgccaaaactatttcccgtgtcccgtccttgtcaatatcatatagaagtggacttgaatgaacatttgactggtgaaatgcaggccatcctggaatcaatttcacaacaatatatattaataaataaacaacattaaaccaattcttttgttaattatagcacaaactttcaggacctttaaaatgtggtagaacatcttagacctattcattcaattgatggttttccagaatttatagcaaagagctaatgatgaccactataacatgctaatcggtaatgtgaaaccacacacctggcaatttgtccccatcagagccttcaagaacttccaggtaatgaacaaatgatggcaccactacttccaactttccatcgctaatacaccaaaagattatcattaaagtgtgcccagagcagactaaagaagaaattaagacaataactagaaaaaagtcatccacgtttaaaaatccaaagcaaacatgcatatgatatttcacagtgtccatagtttgaagcacaaaatcatacagaggaaaaaaaattcagtttatggcaatgatgtacttatttgattttgaacataatctatagtaactaacagaaggtttattcagaagtggatgctgttccagagcatagaacaatagatttatctttatacaagcaaataatgatggaaacatgaagtcaaatagaagaagataatgagaaggatatctgacaaagattaacatgtcctaaagccaaaaaaaagccaaatcatttcccaggatattttacctgttgatatcagcgatcaacggagttgcataaatgctggaactaacttcagtctgccatctcagctctacatgttttggacacttggtcttcaataaagcatcttcatcactgcggagaatatatagttattacatcgatgaatgcatctatccgtacagatgatcaacattatttgtctaggtaactttcaaagatgtagtgtccacaatagtaaaatctttcatatgtccccctgaacaaattgaaaacacggggatcatggtagctaactgaattaataaacttgctccataagttgtggcattttgcaggtgctcagttgaaattagtggtatggataaatgcattatgctttaggctgtgatttttctctgagaaactacaatactacagtataacaatttgatgatccacatgttgtaacagccaatcttactcttaatctcttaatcctttttgcagatgaaaacatcaataagaatttatatttaacaggaatgcttttttgccccctgtatggctgactaatatatcatatatatttgtgcagatattttaagaattagcacgccaatgaaattcaggttgacagtgaaatggtatcaaagattcaagtaatgattgatcatatacctgcttttagattgaaattgaggatttacccttcagtctacatgtcagtgaccttagatgaccctatatgtcagtggcacaggaggtttaatactctttttttttatctaaagagaggatatatgatcaaatctatttcaaaggacactaagattaactctgaagggaacacatctgaagagctgtttgcgcttttacagcactcgcaaaaacaacagaactacaataactgatctagaaacctcaagcgatgtacagattttacatccatttttacctacagaaccaattataaatgtagattttattgtatgtgggtggtggaggggatcagtgagtactaattcttttaagatacaagagaatataataataatttcacactacaaagaatcaactgaatgaacaaatctgccaggcatagtatggttggtcacaaatacgctaatcccaataaggcctattacttaatgcagggtatcaatcaccacatgtatcatatgtgcccattaaatggaacaaaaattaagcgatccaagttttttaaaaagaagagtaaatcttcacactctagaaattgcatatattcttcttttttgtgacattagcctgcatgacagttgaaacaaatccagattatgaaacacaagcctgcataacagttgaaacaaatccagattatgaaacactagattgggtgacctaaatgaaaagaaggacgaaatcaccatttccatattcaaattaactattccataaaatgagttaattgctttgtgtaatccctgatacatcaatgctcgaatgaagtagaagtattttccaatgcaaaaaaaaaagtgtagaggttttaacagattctgcacatcgtgtcattctgagcataaattgaacactcctacagaaataataaggtgattaaggtcgttaactactaagaaattacgaggagccacagaaaacaaccaaccatctaagatcgcttccagtcccaaggatctagcagcagttcagttccaaatcgaaagcgacaggagaacccatgtgaaggagagaggcaagcggtgactcacaggtgggggtatccaagcatgtcgtcggtggcctcgcgctgccggaacttgttcgccttctcctcctccgcggccgccggcgctgcggcagccacgagaagggcgcataccgccgcgaaggcgaggaggggacgcatctgagtacaaaaccctagaccccgagggcctcgccgcgccgcggcggtcgccggcggtggagagggaaggagatctcggcgtggaggcgccggtgtgggaagtggtcggagactcgtcgggtggggaatccgaaatggcgaaagagacgaggggttttctgtgaaactgcgggtcagatcgtctcagcgctcgctgacgagtgggttcaggatgggatggatggcgtgcttgcttacatgtggggcccgcatgtcggatcgaacgccagcggggcaggcagacgagggtgacgtggactctctgtagcatcaatgggactcatcttttcgtctagacgtttatgtttatcaactaaatttaaatttttaactttagatttgaagttgattttgaggtttttttttcagagtttattttttagtgttttcttttagatcattaaaaacacgtatataaaaattttatttataaattatttttcacttgcaaatatgccgtttcgcacggtggctccgaaaatcatcaacgatttagatagctcgttgtgattttcaaacttgtatttttcagattaaaacaactgcaaagatctcataatatggaacaacaaatcgttgcagcagtaatgccagatttttcttttctttctggaatcagggtagttcgggacccgggatcgtgcacagtctcggcatcgcgtgggtgttgtgccgggcaacgccgcgatagtctgattccaaaaacaaaagatcggtacgtgtcctatctacttgtcctcttttcttctactccaagttgaattcgaaaaatcgaaaactatatttgtgctcaatatataaattctgcctcaccgaaggacgagtgccgtctcaacctcgatcctcgctcttgctctgccaactcgtccctcaggagccttcgtctacgcctcccagtgatctaccgtatccaggattttacgtacgtatacgtatcttgattcctaatttctttttccggattatgatgtttttcccgtacagaggttgatatataattaatcaatctaagaaagacatatataatcaatcaaccaagctgagtttattcaattctaatttttgtcgttctactaatcaggttggtctagctatagctgttgcacatatataactgatgcctcgagtaggggatcagcacgcatactctggagatagagtcggaaccgagctggtatatctttcctgcgtcatcggaggatgctatcttcatcgagtgagacgatcatgggggcttcttacttatggagcggcgattggacagtacgcaatagtgttctattgttatcagattagcttttatcaattagtacttgatacaatcaattcgcctaatgcacggcctgaccggagggatcctgataggatccccctagaatttttatttaaaatacccgtgcgttgcaacgggtgaagttattttaatcctattattgttatatggtttagttatggtgaaattcactgtcttaaattcgcttggatatataccttgttagaaaatcatgagatgtaattaggagtccgatcatctcaaattaacatgcgagttttttttaaagagatttcttatacgactccttctgtatttgcaaaagcaaacgaacttaaaaaccgactcaaacactgatctatattttcaaaagcaaatgaacttaaaaaccgacttaaatatggaggacgtaccaaaataccggtaaaaacatctttaatttttataatagtagagatggtaaatatcaaatactattgtttctctccgattctttttgttgttgttcgtggctctcatcttcttattattctattggatctactactcgttggtgctgccatctgattggcatggatgacgatccagagatgtgctgtttgtgacgctccaatcgcaagaggcgagaccgcgagagcaacaagtacaccatgcgccggcgctcttctcttctcatcctgtgttactccagcccagatgtgagcatgtggcccgtgcagaaaaagaaaaacagatgaaaggccacgctagggccgtgccggtgaaggaaaggagagatgggctgagccagctggttcgctagggccgaaaaaggagagaggaaaagcgggccgtcgaagaaagagatgattcagcacatcatttgtattttctactagtgtgctttttttttttggaaaatatctgaacgtatttggatttgaattcaaaaaattagttggaactaaggaaagattttaacgaaaatatcaggaaatctatttttgtactttaacccctctctccatctatttcttctcctcctatggcgttaggtgttgctactcgccattgtctcatcacgctccgccttatctatggggccttcctcgctggtacggtgctctatctgccggtgcccatcatcaccatactgggtgaaaacctacattcattcgcatctggctggtctgcatgtttcgcagagcaaatggtctcgattagtacattacaacaagtgcttttcacggttggaaaggtcaaaagaggttaagctatccacttgcccagaccaagcaggcgtctggtagatgaatgcattgatcacatgctcagccgcataatccgggctaccataacactaaagaaaagaaagtcataccacattatcacagctcgtaacataaaacttcggttgactcgcactttgatcatggagacatatgatcaaacttacagtgtagcctacatatttactgcagtagtttgcatcaaggaaaccgaagcaatgccccttgctaacacactattccattcgtcccataaaaaatcaacctagtaaagtggcacattctagtacaacaaaaagacatacgtctgtttagatttgttatactggaatatgtcacatctagtcctagattctttttttttaagaacggagggagtacactactactcctatgctgatgtgtgttggtactagaatgctggttttaaagtggagattagtggctcattagcatcgtttgaatggtggttgtttagccgagggaattggtggtgaggttaaatagtattgagcctgagcttcccagctcactgccttgtctgcatctggctgacctccatgtttgcgcagagcatctgtctcccattttgttcgggtgtttggcttggcctcccctcctcttaaattcacacacgccccacctcgtcactcgtctcgtctcgcacagtcgcagctgctgcggctgtttgcccatcaatcaagaaatggcgaacaaggctgtcaccattggcgatctgatccaccgcgtcgccacctcctgcctctccaaccgcctccccggcagctacgcggtcagcgactccggcgacaccgacttcgacgacgacgacgacgacgaccccttcgctgacgccatctcgggggccggtggcgagcggcggcgcactccctcttcttccgaggaggcggaggcggaggcggaggctgatgatgagggggaggatggtggtgagggtggggaggaggaggatgaggagaatctgaagatctgggaggagaagaggaaggtgaaggcggcggcggcggtggcggcgagtggggctgagcgggcgagggaggcggagacgctcatggcggaggtgttcgacgcggtctccggcgtgcgccgcgcgtactctgacctccagggggcacactgcccctgggaccccgacaagatgcggagcgccgacgccgccgtcgtcgccaagctccgccacctcgcgcggctccgcgaccgcttccgccgctccgtcgccacgggggggcacatccccggccccatccccaccgcgccgccgctccgcgaggccgtcgcgccgtacgaggccgcgctcgacgacctccgccgccagctccaagccaagcaggccgaggtcgatggcctcaaggagaagctcgccgtcgcgagcaaccgccgcaactcacgccaccacccctccaagcacaatgcctccggcggcggcggcggcgccccgaccgcggagctgttcgccgcctgcgccgagcaggcccgcgccgcgatccgggcgttcgcggggcacctcctccagctgatgcgcgcggcggggcttgacctcgcggcggcgacccggtccctcaccaagatcccggtgtcctcgccgcagctggccaagcacgcgctcgaggcgcacgtcacccgcgtcctcctcgtcggcttcgagcacgaatccttctacctcgacggctccctctcctcgctgctcgaccccgccgcgttccggcgggagcggtacacgcagttccgcgacatgcggggcatggagcccgccgagctcctgggcctcctcccgacctgccccttcggccgctacgccgcgagcaagttcgcggcgctcctcccgccgcgcgtggagcaggccgtcctcggcgacggcgagcaccggagggcggtggagggcggcgcgcacccgcggacgccattctacggggagttcctgcgcgccgcgaaggcggtgtggatgctgcacctgctggcgttcgcgctcgagacgccgcccagccacttcgaggccggccgcggcgccgagttccacccggattacatggagagcgtcgccggcgggcgcggcggcggcgccgccggcatggtcgtcgggttcgccgtggcgcccggcttccggctgggcaatggcgccgtggtgcgagcccgggtctacctcgtgccgcgcggtggccgaccgtgacaggatacgcaatgcacggatcgcctcttccttagctggagtagttgattggtggaagcaagtgttgtagtagtagctgcttaattacatgtgtaatagacttggattactccagaaatgaaggatgaaccatttagtctacttactgttctatttagcattttagcaacctcttatctgaagtaatccatgggtaagagaattgggtgtatgatcatgttgtactattactattatttagtcaaagtaggggttggtactggagtattagctgggtcatgtgtactatcagtatgatcatcgcaagatgtgggcttgagtatgatggataattaagaaggcactctatcattcagaagatgtggtagtagttgtcacatgacatcaaagaagtactatccttaattggcatttatgatgtgttgctattagtctgttaattgaagaagttgaaggctactagatcattcttgctgggcagaggacaggctagatctgtttagatagattttctgcaatttaaaaacattaggcatggtacacaaggaaagaacagtatgttgctcaatgtatattcatcaaaagaatgaatttgtatcttgttcagatcaaggtattgtgccttttaaaagcatgaaaacatgttgcatgatagagctgttcaggtgaagaaatgcacagtttgtctttcgcaaacagatctccagaaactacagtaaaagaaaaggggaagaagcagatccctttgttctcagaagcttttgcctaaacaatttaataaaagatgaattgggtctttctccaaagtgatctcgtagctaaggaatcaacaaagaaagaagcaaagtggaacacgaagatagcctaatacacatggtgaagtgacactggggatctaaatgctcataagaacaaaacccttgtgcaaagaattgttcttcttttattgaatttattgataaatgtaggtacgaaccaaaattttgaaatgaatagcctatgcatctaaaaataccaacctaaaaagtttgaaccttgttttctacatgactttccttgtccgacaaatctagccctcatgtggtcatgtaactcctgtaaaacattataaatattctttcatcagaaatggaaacgtcaaaacccggtcgcctagtatgaaatactatacttgttagtgaaaagaaaacttacaggtcagttcttgaggtagcccgtatgctaacagttttgtcacggtagttactcaaagttaaatggattcaatcttagctatttcctccaggccccagctgtattgatcaaagctaatgatccgcaagacttctgctcagacaagaaacacaaacttatggaaggaggatataaacccataaaatcagaaacaacctctcctgcggctatagtgtgggggagctaaacagttatcaaaatattctttttgaatggctgttaagaaaaaaggcaaaatattatgccaagaagcaatgtcctatatgatggaaattggagatgtcctaacattttctagagcagtaaatttatgtattgttagtatcgtaactaaacttgatttacttagattgggttgcatgaataattgcagcacaataatagaacataagttctatcctataacctggggactctggagtctgtcacagaaatgataaaatcacatactgtgcatgtaaatcatttctttctcagcccattcgtacatgaaacatatgaaaatctaacttgtatgctaacttcctgcttgctatagaagtactactagtacttcctaagttattgctttcctgaccacctgatgcaaccagaatggcagacgcttaggcatgctcattactcaggagccatgattcttggaaagtattagttcataatgctattgctaggaaaaccagaattcattgggtcagtgatcatactttttttcaccatcaagtatcaactgcctcaatttgatcaaaatctagatccacaaagctctccttcccaaaaagtgtcaactgaagagtggcctgtgggaggtacatatataacatgttcttagataatcaagcaatattggaagaataggtaatggaaaattaccatacaattaattcactgatttttgcgatgttcttagatggaattatcatcagcctaaccttcttatttttgcgattcacttccaggagtgaaccagtgaagccttcaaaaggcccagatagaacatgaacactagcaccaggcgtaaaagcattgtggttgctgccaccttttgagattggtttcttaaactgtctcttgatcttattcattagcatgagttcagaatcttcaacgggtttgttgaaagactcgacaattcctccattttccatttcttcaaactctctgtcaactctctcttgctcctccttttcttccctaataatcgattcaacttcttcaactggaataggtttaggctttttaatctgccttttgctgcattacaaaaatatagcgtgaaggtaggcacaaatgaaaagatgatattagaaagaaggaaatggataatgtactttgctatattctgatcttagactttccatcttctataatttgcacttttacaactacagtcagttattgcctttgaacgaagattgctactttcactctgatgaaatccagataataactaaccaagtagcttatggttttgaggaaacatggtgtgatgcatgtcagtcaccttgtggggttaaaggatgactctcaacttatagatggcaagtaatatttgctttgacatatctgcaacctaaaatttcaactttcaagttaacctaaagaaatccaggatgagatattgaggtagtttttccaaaaaaaaaaaaaacagccataaaatcaaagctaatttcaacaagaataggaacatctaaaaaaatataaatgctaattcagaagctatcaaatgaagaatacccacatagagccaactgtagctccaataaaaccataacaaccttcagtgtccctaatgaagtcatgaacttccttgttcaaggtgcaatacagaaagaccaacccgggatgcaaaggctttgatttggtactgattgaaccatttttcagtctcttcttgacttggatggatggattataaatctgcaaatattttgtcagacatatagtactgaaagcaaggcatgcaaataaatccattcagtagcacaacactgcacattgggggtactaagttaccgaactaaccacagctacagttttacattaacaggaaccggaaaaggttaaatggatataacaaacgactaattttcactaccaacagattaagtttatcatatgcatttcagcaggcatcttatgaccaatcacctacaacacatgatagtgtaacgataagatttttcatgttaaatctaacatttctaacaatgccagtaatttgcgtcctaatgttgctcataatctaatataattggcacatctgacatctaacaacatattgcacagaccaacaagcagatataattcgaatgtacaatgttcagcggaatgcttccgctgcacagaagcaaataatttgttaacttctgagaggagaagaggatagacgagagaccttgaacgagagctccgggtaccgtcgtgagatcgccttggtgaggaggtcgacgtagtcggtgccgggcgccatggagacgcgcacgagccaccactgcgggccgtgctcggcgaggaagtcgaggttgaggttctccctccacgtcctcttgggtggcttcttccgccgccgcgccggctcgtggatgagccgctcctgcacctcctccttccagtcccgcgcccgcagctcccgcctctccccccgctgcttccgcctctccctccccgtcagctccccctcacccccatccacggacatagacaccgatatagtaggcccaggcgacgccctcggcggcgccggcaccgccgccgccgccagcgagcagcggcatgggaggcggaggagcggataagccaagctcatggcctcctccgcgacgagacgagagagaagagtttggattttttttttttttttgacacgagaagagtttggatttctgaaaaaaacttaaaaaacattacccggtgctcacaggtgggcccaagttgtcggtgagtatcattcgggccgtgaggcccatgaggatgcggcccataaaaacgtggctgttttggttcctccgcttgagaacaaaaccctagaattgggggaagggttcatcaggtcttcttctcttctggaggcgcgctgctcttcgcggcatctcaattcccaccgccgcatcgcgagatctccggccttttctccttccgggtaagcttccctcctcttctccttcctcgagcggttcgtttgcctgcaatttgggggtatgggttccttaggtttcctgctttgcagttgaggagcaaagagcagcaattatggcggcgaaacccgagccgacccagttggagaaggagcaggtgtgtgtgcgtccatctttcctctgcattttgtttttcttttttttttgtcgatataaagttcgtggtgcgattgaagtcgtggttctgtggctgggcagatgttcgggatgatggagaaggagatggagtaccgggtcgatcttttcaaccggtgagtgatacactccttgtatgctttgctaattgctactatctgggacttctgatatcacgaatctttcaagaagtaaagcattaaacaaacttagtttctgtcaatctaattacagtgagagtgagatatctttattttttttaagaactagagtgagatattattatctggccaacgatgttaacactgggctattagttttcatccttgtactggcagcgtaatatagaacttccgtggtttatatatcgcatatctgtagttactggcaagttgtacttcctatactatctgttagcacccaatattttcggtgataaatagaagtgatcaattaggttggcattagcaatgttaagtttctgcgggcaggtagttaatatatttttaggcccaggtatattttagcaacgttctcccttgtttgtactgagatgctttgtgcgattctagtatttaagtatcttattgagtggtaattttgattggcccagtagcccacatcactcctggtcatctttttggcactaatttgacgcctttgtgtccttttcctttatgcagacttacacagacttgttttgacaagtgcattgagaaaaggtacatatcgtctggttaagtttcacatagctgagttatccgtttcatgctgttattttctcatccttctgtttggtttcaattagcattctcatacatggttgtgggatgatagactaaaatattgctggtaaagaatatatctatatcaatatatttcaactaaggtgaccaatattgggcatttctattcatcatgtgtcttgttctctagtaactatcatctgttgaattaactgtgcattttcccctgggatttgttctatttcaacaggtataaagaagctgagctcaatatgggtgagaacagttgcattgatcgatgtgtttcgaagtactggcaggcaagttaactgataattatatatttgctgtcatgcttgatgctgattcagatgtctggagtttttatagcaatagttagcttggtggtaacatgctgaatatgtatcatgactgtctttcctactttgtgttgtgaagaaagtcatctttttagtgcatctgatctccatccagagaatttagatcatcttactaaatcatagggttcatccttgaacaaatgtcattgaatatgagttccatagatcttcacgccttgtatagttggacatataggcagtggttgaaatccatgcagagcacatgtttttctatttcgagttttcccctcgtctgaacactgaatactattttcccgattcatttgaaatgactgttgggttaattttgctctatttgtatcaatttatttctatttgtatcaatttatttccatttgtaccaaattaccaacgccactaagtctaactttgggttaaaatctttttcaggtaactaatatggtaggtcagatgctcggtaaccggcctcagatgtgaggcgagaagcagtagaagcattaggccagaccattgtcgctatgtttctccacattggttttagaatgttaccgattgccagaagtacacagcacgagtgagtgtgaccgactaatggattgcccgaaaagaaattgcaatgttcctttccaatggtgtaccttctccctgaatcatgaacaggccacatgcctataataatttggtacagctagacgacgatttttgctgcgaaatgatgctctcttttgttatacttgcctgtctgaatatctgtccgttgagacaatttattctggactgttctaaccttttgctttgtttaagtcatgtttaaagcgaactggaggacccagtgttagtctttgcaatccaaatgcagccatgtgtggttttctggaaaaatcgcaagaaaattttcttacaaacagataaataatcctatatatactaagtgtagttaatgttaattcactctacttatgaagccacatcatcttaattgtttttagcctttgaatgattcatctagaatgtaaattgcatctctttctccaaaagacactatacagcctaatcattaacctttgggtaattgataacagtataaaaatatataaacacatgaaaaaaatagtaattgataaaggtataaaaatatattaacacatggaaaaaatagtatagtaggtaagaaagaaaattgtagaacttgtatctactatctactatactataacataattcttctgtatcaacgcctgggtaaccatctagtttaatactgtttgaactcctgttttaaagaaaattggtaccatatatgactcccctacttttctcagccattaattggctaaaataatgatagcattaagccatagaatgattatttaccggtgctatagcatcaagaatacgttatacgtgttctactaatcagaaaaagaacatcgggtatttgcacagttgcactggaacacgcatgaaaaatggctgattactcacaacagtctttaactcttgacgcctcagaaaagtctgcaagttgtgtatatacatgaattgtgacgaaataacattaaagctttacaatctcacatccacggtttgctatttgaatgctagttgcccattttttgtacttatgaatatattggaggtgtcataacagccaacctaggagttgtaaaaccactggaaataccaatacaagttagggaagaccaaaaaacagccctattggtggcaaagcactggaggacacccaaaatgcaggcgatctaggtacagaagagaggaggcatcacatcatgtttgagggctatacagttcatctctatctagcattcctttcagcttccaaagcggcgccttgcttgagttcttcatgcccttcaggctccattcccatggcgagatatgccatcccttgaaggtagtgtgcagtaggccactcaggagatatgtctgctgctttctttgcatccgcaaggccttcttgcagcttgccgagcaccatgtatacgaaacttcgtcgtgccagcatagtcggagacaccattacaccagtgtcaatgaactgcaaaatgtttaaaaacacagcttagcaacctgaaaatcaatcaggaacacagtttttttaaccataatcttaatttgaggaaaagtaattgttaatgtacaagcagcgaggctatcgaaaacagagtatagatacaggaaagtgaattagattcatggacaacatttgatactctaatacatacccttgagtagcactcaactgcagtcgcaaaatccttggattgaaaagcactgtctccatgtttcttgacaagaatactatcagatacttgttggccagtccaggaatggaaagatacctgttatatacaccaaatttttaaggtatgggtcagatatgaacgggagcagtgcgaaaacatggaaaaccttcacgttaaaaaaacttggaccagccaacatggtgagaagttaagttttgtatgggatatattacaggtcaactgatggatgtataatatatcttcaaaagatacataaatgttctattgtactttcagacctatagagcaataaaaataagcatggtcaaactagttaaaagtttagcctcgagctcaaaagaatggcacttaaaacatgagctaaccattaggtttcattggtcgaagagcatgggcatcaacatagaccatctactttcttcctatcctatgccacaaaatgtgtgggctttcaacatattttgtttcatctacacaattgaaatattccaagatgacaataatgtagtaataagttccggcagtttattcctttttagggaaatggcagcaatgagttagggaaggatctatggtaccaacaagaatatttcattatgataagcttaactgacaaaaagttaatacctcgaatgttgctctttcatcctcacaatatccatcattctccagcatctcatgaacctcatcaaggtctgctctggcataaactttcgctatagcagataacgaaattcgctctgtattttccttatcatgttgtatgcctagtaaagcatgtgaaggagcctgcacagacaattaaacatcgagtaagaaatattaagctggcaggcgcgacacattaataaggagaaagatgagttggcgcatacttcaaaaaaccatttatgctaacataatatcaaatgaaaagcaaaggtagcacgttgacagaagacaaaatagttatcaaacgattgtgtggagtttttttcctgcagctttttcaatattacacaatactgttactagtctagaaagtagcaagaaaaagaaacattacagaagcatctttctggaggtttccaagagcagacaccaccgatttcaggtttggccggtcacgaccttcatactgcaagcaacgggatgctaatcgtatcaactcagttccatcagagctggagacatggccttctaagcaagagtccatcaacaccaggtaattttttcctcttataaggtcaagcgcctacagcaaaaccaagcaaagtgaatacttatcttgggtaagcagaaaagcaggaaggatagataacttacatggcttggtgggatatgttttccacttaggagatcaagcaagatagtaccaaaactgtacaccacactctctggaattactctgcctgcagaaaatgtagtggttagtaaagaaatagagactgtgtctttgatggacaaagtcataagaaaacgaggtagattttgcaacacagaattctgttgcttcactatgagagaggtcgaatgctaaatactatcccttcatgaaaaacaagtccgtgcagcttacgttgttgcctaatgtctgtggttcataaccatggtaccatagctaaaaataaacaaggtgtgaatagctaaaaataaacaatggaaacccagcaataacatttgcatagaatgatttaccccactggggaaaataactagcaaagaacatggacatactcaacaagtgtctaagagttagctcatattacgctcatattacaagtccttacttcatgatcaaacattaacaaataaaattcatgaaatgcataactcacagaaaaaaacttgcttgtatgcacaacacataccagtcttaaggtactcaggaggcgtgaaagccaaattggtactatagctcttcccatccctgctgttcttcatcagaccgaagcacgacagtctggggttaccatcctatgatttatcatcaaaacattacatgccttattactggaagcccaagctaagaagttactaagtagcacaggtactgactcaccacatcaaagagaaccctgtatgcatgcagatcatggtagagagctctccctttgctactgcagtactccaatgcctgagccacatagaatgcagctcgtaccctcattgcccagctcaatggctttgtctcccctgccaaggataaccaccatgagcgcaaaatgtagataatccaaatgcaaagtgtctactcctactgaaaacgttaaatgcaacaggaggcaaaagctctccaatttaccataacccatactaagaaccttagatgcaattgagttggatatatattctagaaaggcaataaataatgaaaacatcttgatgccaactactagtgtagtactccaaacagaacactaataacaagcatttatagaagaataaatgcattaatttctagttaacccagaagaacaaatgtaggaccagacaaaagaaacagcaaaaagagtttgttgaaggaattacttcaaccgtctccaactgaaagcaacaattcaacattagattcaggtgacaaaaacacatccatccttaaataaggggcccaatcttatcatctttgatgcctacatttgtactaccaaatcggaaacaacatttgccaaagcccaatatgtagctgcagctagtatagaacaagaagaaaaaaaaggtgagcaccaaacacatacagtggaagagatgctttgccaaggtctcgtgcggcatgaactccgcgacgagcagccgctcgccattctcgcagcagcagccgatcaggttggccagccggacactccgcagctgcccgacagccctcgcctcctcctgcacacacacacacgcaagaacggagccattcaatcgaagcggcgaaggcaaggcaagcactgatgcagatggagcaaagctgcacgaaccaagaactggcgggagtcgggccaggcagagcggccgaagcgcttgatggccacggtgcggccggtgctgaagagggtgccgcggtagacgacgttgggcgccttctcgccgtgctccgacacgatgcgctcgggagagaacccgtcggtcgccacccgtagctcgtcgaggctgtactcggcgaacaccggcacgccgctgccgtcgtccgcggcggcgccattctctgcacgtcaacaaaaccacacagatagctcggatcagcaccaaaaaagcacgacgcgcgcgtcggaatcaaccacggattctcgcgaagaggtcgcaatgctctcgacgccaagagattaccccactgaatcaaacgcaaccaactccaaacactcgcaagagcaaccgaattcgtcaacccaaccgacaaaaaaaaacaaacaaaaaaaaacatcaaatcagcaacaggttgctagagcgagagagagagtgaaaaaaaaaatgggatcgttgatgagcgttcacacaaaaaccacccactggatcagacccatttcacagcgaattccagcaggatcaacagctccacgaccgcaaaccaaagcaggagaattagagacgcaaaccgagttccccccccccccaaaaaaaaaaaaaagatccccagaaaaaacgcagcaaaaccaggcccaaatgcagggcgccaccgcaacaaccccactccatcatcaacacgcgcacatccgaaaccagcaaccaaatccctcccccccccccccaaacccaacccaatgcgagagcgagagcaccataccaagcagcggcgacttgaagtgcggcggccaccagcacacggagagcttggagcagcgagctcccatggacgcctccctcctagatctcgccctcacctcacagcagcagcaacggctctctctccccggcgtactactactaccaccaccaccacctcctccaccgccaccgtctcggctgcttagctagctactggtaggactcgaatagactaatactactactactactacgcgaggaggggtgggagagaggaggagggggaggggggtggagtggcgtgtgtggggtggggggtgggggtgtttgggttgtggatccaaggaaggtggtgggctttccgctccctgctttctgctgttcttcctcctctccctttctccacctcctcccctttatatattgctcctgttttttaaatccttcctcttgatctaatagcctttagctgtgggttttttcttctccttttattaatgcttttgaatttgacttaaacatggtaaaatgataaaaaaagtctgtaagaaatcatataaaatgcatgtcttgtaaaccagtataatggtgggtccggtatattagagttaaactatgaatgtgcacggtatgttttagtttgaaaccgtttttgttatatgtgcatcatatttttttttagtagagtatttatagttcatttatagctctagaactgctacggtgctacccgtgtttcaatttttatctacacacgactgtttacgttgtcacactttgattgtgtttttttaaccgtgcgtaatgcttttgaataacgtggtttctagttactggtttgccataaccatacaatggtttctcaaattttgctttacatgtgtagaagacgaccaagtaatatgataatcaaattgctgaggataatccctagcccaaatttagatacaaaagtaatactagcttataatatattatcttgacagacgataattctgattaaaaacaactagtatttgtttaggataaatgaggatgattcttggcccaatgtataaattgtttgctttacatagcagaggtaactgcaacttatctatttgaaaaaaaaaaagcagtccaatgatatctgtatatcaatgattactccaaaacaaaacaaacagttagttaggtaactaaattattgataggataacaaatactccagctcatagtcacttcagtcactactcactaaccttttccagtttttcagctagtaacgctaattttctgtttcagatagagtactttcagaaagaattcagaatagctcgtatctgctgaagcaacggcaggatgctacgtagcccaagcgtgataaccttgtataccactgacatgtggccccgctcgtttgacgtggccccacgtgcctttggtgtcaagatgcttcagctcatgttggttgtttttgcagaaaatatttgcgttattagttttgccaggtaattaatttactaataatttataatagtcattgacagtgggaccacctaacttacaattgtcactggttcgtgggaccaccagcagtttggagccagtcttgaacgggaccaccatttactaatatcaaatttaacactaattaaattggttagttgttcatactactaactaaatttcataattgttttaaaaaaaatcgaattggttgtcaaaaattgtccttgttgcaagcggtcatatcatcaaagtggagatagctgaataggctccatctttccccatcacaatttggacatgttcatgtcaacagtttatatacactgttctgtgagtattatgtgagcaggtaatctatccactgtttttgtagtagtagtttttttttttgggtaaggtgagaaacggcggcgagttgggcacatgctgcacagataaagatgcattacgaggaaggtcgctgttaaacaaaagttctcgtccttaattaacagataaacatcacatgctgccctgttaagcaacgatcgatttgaccaggagtaccaagcaaagactttagggaccaacgactcttgcattcacagcgcacagaagaaaatggttccagttttttcaaatgcatgtgttactgaacaacggagtacataaaaacatcatgaacagtgaatattagagaatgtgttattctatggcattatcgccctaggctacaaattattttttaaggaaattaggctacaaaggttaccttaggtagtggacggacaggcttaaagcaggaaagtagatgcataaatgttgactaaacaaacaatgattaaagctcttccaaagggaatccatcctccatcgatctaattgtgatcatataagaaaatatagtaaatattaaacagactgaaaatagtatttattactacctccgttccaaaatgtaagctaaaaatgcttacattttggaacggaggtaataagttacaagcatgtgcttacattttgggacggagataataagttacaagcatgtgcttatattttgggacggaggtaataggttacaagcatgcacctactagttaattcaaatgtaaagccggtaaagagaaagttcctctgaaacgcatggttttaaaaacacataaatagaaaaaatgaactatataggatgtctcaccttgtgaattcatacgggaatgtcgcaaaatagtcatttaattgaatgaaatgcgctcgtagcgcagtggcagggtcgctggcacgcaccccattggcccgggttcgatccttgtcgagcgcccttaccaggggaaatatttacctcttcgttcttaaaaccattgacaccaagtcctttcttggtgtccaacctttttcttttgtcatttaattgaataatgtgcatgaaaaaaataagcataaaaaatcatgaggtaaagacctcggatttgttttcctaccaactccctttagaatggcccattttataagattttcaaaggaaatataaagcattaatctttcgttcctaatctccataggaattttttcgtaaggattcagggtcattttggttgatgccgaaatatgccatactaaattactgtcactttaagtagtacattggctagcatttggtttgctagcaaaggataccaataacacataaattgaaaaaaaaaacattggtgctaccaaaagttaagttttgacattattaaaattttagcacggtaacaaaccaaacaagcccacaaatcctcctaacatcctctttttttttaagggagccatgtccagggtttacgattccgagatggccttccatttcgggctttggcggaatgacggctttcgtgaaatctggtgaaaagccggtagattccgaacaaattttataaaccaaaatttgaatacaaattctctgagtttaccgataagtttgcgaaaaccggtcggttttgacaaaattccgagtgaaatcatcgaaatttcaatcggtaactagaaaaagaggtaattaaattgaaagtgtttttctttttttttcattcgttattcttttcttttctactgtaaatttcagtaaatacacggaatacatcttttttttcgaaattttatgtcctaataggttctatgaatatcatattgtttataagattttattttatttttttgttttttatcaattcaaatttgatcatcgaaatctcaaacggcttctagtttcgagccttgtcaaaacctcgaaaattcgcagaattcgaccgatttccattggaattgtgaaccctggccctgtcacagcttggccctagttgggagaaaaccgggcatttagcttgcttgcctgtagaggggtaaatagcatgagtaaatatataggccaatttaactacatgatatgtatggtagatatctaaaaagctatcacgactgaaagacactataaaagcctgataatttgttggatgccactttcggctcaattggagagaaattttaaaaagacgagaatgcttatagggtcaaaagctttttagctgaagctacaatgaagatgaaaacatgctgtatactaacgatgtatttaggctgatgataaatttagagttgtatgatttctaaatctattatattattaaagtaatagaaaaaggagcctccacgttcgctctcatggcctagaaattctcacattaatcggagaaaaagaaaaggcagagtccatatagaaatacaatttagaaatagccgaaattcggaattaaaaaataaggaatattagaagaggatactagagtccatatagaaatacaattagaaaataactgaaattcagaattaaaaataaggaatattagaagtatagtatagagtccatatagaaatacaattaggaaataatagaaatttagaattaaaaataaggaatattagaagtagagtccatatagaaatacaattaagaaaaaaatagaaattcggaattaaaaaataaggaatattagaagtagagtatagagtccatataggaatttaaaactaactaaaatttggaataaacataataaaattaaaagtagattttttagagtccgtataaaaatacaatttacaaataactaaaattcgaaattaagaaaaacatggaaataagaatttaaagtcaatataggaatacaatttagaagtaactgaaattcgaaattaaaaattaaagaatattgaaagatgagtttagagtccacatagaaatacaattagaaataataaaaattcagaataaaaataaataatattggaagaagagcatagagtctatatagaaatacaatttacagaaaattcggaattaaaaaaaagaaatattaaaagacgagtctagagtccatatatgaatatatataatttacaaataactaaaatttgatattaaaaataattaataactaacacgtatataaaatacaatatgaatattacacattagtagttttgtaaagttattgcaaaatttaaaattatgatgtcattgtaatatatttaaataatataatgagaaaacatatatgctattatatgagagaaaatataatgatgctagccgcgcaatctgcgcgggcaccatgctagtttttataataatattatgtttgaagcatgtggtataaagggcgttctcgttttttttaagaatttatcgttctaattgagacaaaaatatccttcaacaaatcaccaattttttaactatcttttggttgtaacactttctcacgatgtctcaaattgtatagattttgggtgacccgcaacaaaatttgtcaaatataggagtatattgtgaagagcttcgtcttgcttgcacttgcagagagtttcaggcgtacgtacagtctgcaggtctgcattgcctccggcagcaacagaagccgaggaagcgaaagcagccatgggctgtcgcgtcgaggagccctacaaacaaaccgtgcgcccgcggcggcaggcggcggcagcggcagaggcccggccaacacgagcacgggccaccagccacagcaccagtacgtactactagtacaccaccaccaccctacccacccctgcacgaacggcgacacgcaccgcacggccgcacgcacgcaccgcgcgcggcggacaagcaaagcacaagcggcagcacagggccggccagcctcgtgagccctagccagtactagtactcctccagtagccagtagtagtatcatgtccgcccatgcacctccgcatctctgatcacctcgatctcaccatttgctcgagtgagccaggcagcagcgtcgcaccgcacactggacgtcggcacgctctgcaccacaagcagcaccagcagacagatcacacagatgggaaggccgacgtgcagattgtgttgtgtgagagagagctctttcttctccgtgcatgtgcctgaggagaaatcttttgcttgtcactgctgctgtgccacggccacgggagacgggaccgacgcgtatccggcttcaattccatcacgcactggtacgtgtggatggagtcgtcaatcaatatcaaatcaatcagttcgtgcgtgcgtgcttccatacatctcgtccgtcctgcctcacaggacaaacacactgcaatacggagtattcagctcacgaaaaaactgtggtttgctgctgtatgaagaacaaaattaaatacgcccacgtgtgtgtgaaatccgccgctgcagtagtgcagtactcccggccgcaccgcgtacagtacgtactacaggtacgctgcgtgtgtaagtatccatgaatatccgccattggatcctggcgctcgtacccaacgtaccagatgacacgtccctgtgctgctgcgaacatgtgattatgaagcaattccatttccacagtgattatgaaaataatcccattagaaacggaggagaagtccacatggcactgtggatttacgtctacggagtacttcagctagaggtgaggtgaggcggaaaaggagattcaccgaacgaaatgaatcaaccgaggaataacccggcttacgtgcgagcgttccttgcatgcgtgcactggattcggggattcggccgatccgcgagcacggcacgacttgtttcgtcgcgcgcgaggctggcggattcgcgggtcgattcgccggcgcgcacaggagtggagtggagagtaatgtgtcgatcgagtggcctcggaagttggggctacagatagaagagaggggtagcttgcagaaaaccaggacggatttatgcatgcagagcctccgtcacgtcgtcgatcggcaatgcaccattgatgcgaggtgaaggtcgggttggtggcaatcatggccctgtagcaatgggcgccgcagagatcagatggtcggagttgagtgacagatattctttctccgtcgatctctatccatgctgctgctgctgcctgcacgcatgcatacagtgttcgttcctactctcagctctcgtctcctcctgctcatgcatgatgcgcggctatatggctggagtagagtacctaggtatagcacggtgcacagctctagctttagctagcgacatgttggatcgaatctggcctgtttggtttgcagggacttactctctaagtctctttcatatcgaatgtttagaaactaatttaaagtattaaacatacactaattataaaacctatttcataaccttggactaatccgcgagatgaatcttttgagtctaattatgctatgattttgacaatgggatgctacattaaacttttgataattatagattaattaggcttaaaaaattcgtcttgcggattaactctcatttatggaattagtttttttattagtatatatttaatacttcaaattagcatccaaacatctgatgtgacatgggctaaaaagttttagccccatctaaacaccctagctcagctctgacatggaagatcttcccaacagttatcaacgccaacaacagatcgtattctgcgttgcgttgcgtgtgcatgctactcgatgggagtactatatactcctatattaaggctgtgttcagaggcaacatatcctatacacaccggccctcacgtgtacacacgtgcacatcaactaaaaaatgtcaccaaaaaatctagaaaaaatcatacacatactttcaattgtattacacctagggttaaaatcttaacgtcaaattcattatattttagccgtaacaaaaaaacaaaaaatctgacagttttaaggttgcaattttgtcagaattttatcttttttgttattctctatgtagaatgaatttgaagatgcgactttgcacgtagatgtaatactattgaaagtacatgtatgaattttcttagaattttttgtaataatttttagttggtgtacacgacgcgagggcctgtgtgcataggatacgctcccgtgtttagattagaggtgtaaagttttaatgtgttatagcagatatacgaacgcatatttgaaatattaaatatagactaataacaaaacaaattacagaatccgtctgtaaactgcgagatgaatttattaagcctagttaatccgtcattagcaaatatttactgtatcaccacattatcatatcatggagcaattaggcttaaaagattcggctcgcaatttacatgcagtctgtataattaattattatttttatttatatttaatactctatacatatgtctaaacattcgatgcgacagtgtaaaaattttaccaggagatctacacagggcctaaccccagctactgatctgatcagctaaacgaagttgatctccaggctgcttagattagactgttttgtgtttgtatccctctaaagtgcggaggaagtgattccattccgtggatagctaggccttgcgcgcaagcgacgcgaagccgcgaacgaactgaagccaacctggattaagttgagggcagctagaaagcgtcaaggcctgcagcccatcggagaggccagcatacagatgcttatcagattacgccgcctttgtttatgttatgcagatgtgctaatcaattgctccccaaaacaacgaaagcgaaagggagcgagcgagatgagatgctgcatgctcatgcttaattatatactcctactcctaacaagagagggaccatgtaggtacgtacgtacagctgacagttgtttgtacctgctggttgctggattcctttgaggcttaatcaaccagcagggggtgattaaaaataatctgaagtgtccaaagagaaaggaaagaaacaaacatcagtagctgcatagtagcatgtatagcaaggggtagtagaaaggaggagagggagaggcagaaaggagagggaggcaggggaaagcgcggtgtccccgtggcgtcgcgggcgcggggggcacggcggcagcagaacgtgtgcagcgtcgtccccacggccacatgctgtcgtgtcgtgtcgcctcgcatatcgccttcggtcgttcgttcgtcccccacacctccacttttcgatcgacctgcggctggcgcaggatgcagtacgaagcagtccagtccttcctatcctacctcggcgttctactagtgtcgatcaagcatcgaaatggtatactaatactactgcacatgcccatgggccatggcttgatggctagatgatgacatttttatctgcgttgctctcatccacctcagttttttggcgtttttggtgatataataagggcgaaaagcaccttggtatgtataatcggtaatcccagacacctgtgtgtttctttgaactcgacttgtcaattactatgtatctggctcacacctagtggattaacaggtgatgagtgagtggtacatcaaatgatactgcgagacatgtgctgatctagaaaaatcgaaaaaaacggaaggaagaaattaagaagcgagctagacatgacggctcggtgatgatcagggccaaatagcgagcaagaaagtgaaccggaggcataatgggccggcgggcacttagcctgctcggttgcaggccagtagtaacgggcccccgcggtacacgagaagaggcccaataaccatggtttgaccgtcatgggttgccttgcagagtaagttggtgatgaactgttgatcgccgctctctctctctatctcaaagaaaaggagaaagggttggtagaatggtagtggtcgctgatcgagtagttcgtactgtgcactgcatcggcatcgcctgctaccatttttgtcgtcgcgtgactggaaatagaagctggagggcaaaggctgcgcaaccgcgccgcgcggtgagaaagaacacctgtttggcaactgcgcggtgaaaaagaagaaaaagaagaagaagaagcccacatgtttctgttttgttttcttttacgtttgaacgacgctgcgtgtatgtgactggtgtgtgggctccaccacgtacgagctgttgctcgtcagtgggatgaccagccaatgcaacgcaaaagtagagagaggggtttgcgctgctacgacgtcgatctcgtgtatatcatgcaacgctcccctcctcttcttcgtgcaaggacgcaatagctagagccacttctccagagaacgagagagagagagagaaggcttaggttagaatggctcccgttctcctggtggtggtcggctcgtcggcggcggcgtgggccgacgtgcccgccggcagccgggtgcaggtcgtgcaggtagcctgcggcgcgaggcgtccggcgacgacgtcgatggcggtccgctgcgtcggccgcggtggcggcaagacgggtccggtccttggcaagccttccgacgacgacgacgacgacgtacgtgcatgtatggatctcctcctttcccctcctccttctttacaggttttcgcctgcacaaagacggtctatgaagtagtcgaagcgtgttcttttcgtgtcttttcttgtgttctgcttgtgctgttgtgcatgtcggctgtcgcgcgtttcctgcgtcagatcgaaccaagtatttgtttcttgggttcaggcgttaagcaggtgcgtttcttggggttctttcttgtttctccctgtgcatgacgcgttcctgagccagatcgaaccaagtatgtgtttcttgggttcaggcgttgagcaggtgcgtttcttggggttctttcttgtttctccctgtgcatgatgcgtttgctgcgtcagatcggaccaagtgtgtgtttcttgggctcaggcgttaagcaggtgcgattcttggggttctttctcgtttctgcttgtgcgtgttgcgttcttgcatcagaacgtacatcagacgtaccgtgcgcatgacattgttttgtttgcccctgtttgcgttcttgcacgagatcgtgctttgctatgctcttgtttctcgtttctgcttgctcgtgttgcgttcttgcaccaaatcgtgcatgtacgacgtacgcacgttgtttgcttcgctcctctattcctcttctcttgcctatcacgcaggaatctttgatcagttgatttcttgcacgtacacgtacttaccaccggtcagactcagatctgctcgtttaattttgacctgtttatcgacgatccatcacctccgtccttatttttccttgcaagttttgcctgtgcaaagtcggtctgaaaagcagaagcaggtgtgttcttttggagtatttctattttcagctttgctcgtccgcgtagcgtccctgcacgcaccagattcaaggaggtgtgtttcttggggatctttctttttgtttctgcaagtgtatggttcttgcaccaagtcgtgcatgtatgttgttttctttgctcctgttcatcgatatttgggcctttcgtttgctgcgaagcttgcagatttccttctctttttaccgaagctgtggttccttttttttttcagagaagaaattagaaatacaacggattccagttgttcttgtgagatattttttaggattttgtttgtgacgtcctattcgatcttctgatgcaccaaatctcttattaatttccaagctactgcttttgttactgttgaagcttcagtttttttccctttctgaaacggaagcttcagttttctggttgctttgaaactagtaataatagttttgatggctaatttggtctctgtttgcggcaaattgcagacgaagctggtcaagatcgccttcaggatggccgtggtgacggccgttttcttgaggagagttcaggcgaattccaactgcgccgacatgtctctgcaggtgtcgagcctgcaagaggagtgcgcccgtttcctggattcgttcgtggccggggaggagatcgcgggccacgacgcggtccgcatgctcgtcggctgccatgacaagctgaccgtggttctctccgcctacggcggcgccggccgggacgacgtcgacgagggacaggcgccgccggtcgtcgtcccgcccggaggacagatcgacacccacctcctcgacttgttcctcattgggacctccgagctaccaaccaactggtctgacagagtaaggacactgatcgatgatcgatctgttgtagtagtagcttttgttgttggttgagcattactacattacatgtatggattaacttactgaccgactgtctgtgtgcattgatcgatcgcttttgcttgtgaattgtgatagaccctcgttgcccagctgacgtgctctctgtaccgggcaattgaagcagtcaccaagttcatcgccaccacggagaagggggttcctctcgagcaagcagatgcagaggggaggtctcctccacctcctgaagaggaaggagggaaagcgtagatgttactcagtcagcagaaaggaggaaggagtactttttgggaggtcattagaactcagtcagcagtagtaatcatcctaagtacggagaagtagcatttagttcttctgatgttttggaaccttaccatgctgtttagtattcctaattaagtcctactgctactatcatgtagtaacgtgctatccgccgatggttatcaaataacatcatgtgaactttgcaacagctgcttctttttagtaagtaatagttcattcccttttgttaaatcttgatcttctttctctgtggctttgcttaaatttgctcgatttcgtttagaagaaatcagcccaactgattcttttcctaaatacgagagacagatgatcttatctctaagctattttcctggagacgaatcgaagcgaatcctagatcccacgatgatagttagggcacggcaacgatggtatttatagatagggcacgcacgaaacggaggagaccaaaccaaaccaaaccaaaccaaaccaaaccgaggtgaaattgaaccggcgctccctcgtcttccgtcgccatcgccgtcgcgtcgcacccaaggtatctgcttcaattcagccctgcttgctagctaccgcttcacgatctacacagatcgaactgaaacttgatgagatttgttcaatgttcatggctgacaggtgacgggtaatgggggcgtgctactactaccaacccctccggccgccgccgtgcccttccgttccttgcggccaaaaggcacagcggcaacctctctttcgcagcagccatcagagtctgcatgttgcatctaaggcggccgggctgaccagcagcagcagtagatcaaaagatgtgaagttgagggctatcttacatgaggacagtgttactggtgttagaccatggtttagcctgttcggaatgtccttttctgatctttatgatcacttccctgaatctgtctgggacatctgtgaggattcccctgccgaagcttttgagaagaaggtaatagaatttgttttctcctttacaaacttaagtgttcttaaccatcttcttgattcttgagtgcaaatttcattttcattatattgttactgtcagttttcttgtcaataactcaatactcatgtttcaagctaaagcaaagacttcccttttttttttaaaaaaaaagattaattgatcatgattgacaacaacacgggagatctctactgtatacaggtttaatttgtttttggccatatatagggtaattagggtacatttttctacttgcgcatctttactaattctaattctgaggatcaggagcataaggggtggatgcaatttcggagtgaaatgaacagcagatacaacaaagccgtggacataagttttgacgataggtttgctgattccattgtgtttgacaaaacactctacaagtatgcaattttgggttgcaaggtcaatgcggatgggattatgaatcaggtattctcagcatgtgcaatcactcatacttctcccttccgaaaatatactgtttagtcacccattaaatttatttacaccagatgccactgtcttcatgcctaatgatttagtattgaccaacgatttatgataatttgccaaaattgcttcctggatgtgctagtttagggcccgttgctataaatttctctcaagagcaaacaaaacacaagtttcttcgttaagaagaagagaaatgacataccatggtggtgaacaaaccaagcacttaaataacgatgttttttttttgaaaccctaaataacgatgttttgacaaccgcgtagataaaataatgcccctcaaccatggaagatcaatatattagtatacctctatatagtctcgtcaataggccttttatatatgagatatcttacgaaaacatctgttgttgtagggtgttatatctgccagtgaaagaaataaaattatccatgctcttgaaaggatagaaggtgacattgagattggaaagttcaagtggagagatggcgctgatattcatacaagcattgtggaagcacttgctgatatgattggggacaaagcgaaggatcttgcagtggaaagtaaatatgatagttgcctcatgatactggaaacatggtccaaaaactccattgatcatattatgactcaattgaaacaacttcaggtttgttttcttttatctttttagtttcatggtatactctaaaacgttgtttgggaagatatatatgcacttgattgtttaattatgaccctttttcctttgttcactcgctatattagattcatgttagttttagcatacattcgtagtatgtggttcaattaaagctgtatgatgattttctgttgcaggttgctctagttctgttagcaataaaaaatgatggggttatccttggtgagagagagattgagggcaccacatgcctggagagtcttcttctgcgcattgtcaaagtggtaattttccaacatggactcaagtatccttggcagcatagaaccttttcttttctcaaacacgcaagagaattgcgtatcatttcatcaaagaagcttaaaactgtctggtacgtagatgaacataataacaatacttacttatttgggagtcttgggactgcaccaaaaccatagagatgggaatgtgcaaccgaatgtacttcttaacataacaggccatatcacaatgaatctgtgtttgctgctcacataaatatttcattacctatttattgcccatttcgccttgtattgtatctaaaccagttttctgcccttttcattatatagctagactatgatgcttccaaacttcgttcctatcatggaagcatttcttgctcaaatgatggtgtcatgcttctgaggaccaggtttttgctgctactagtttatcatttttacgcccccaatttacatctccagctctcccaccctcttcaatattttgttcacttgcttctattaattatttatgtgaacaggggcatagttctgtatttttaatatgtacttctatactcttttgattgagccaattttatcttccatatatgtgtctctaaacaaagaaatgatatcataggcttgattaattattgcactttttgatgggagattaatctatctattaatttactaaagtaatagaaaaataagcctccacgttagctctcgcgacctagaaattctcatattaatcggagaaaaagaaaaacgtaatacatatacaaatactcctacaatttaaaatagctaaaaattcaaaactaaaaatataaggaatattggaagaggagactagagtcaataccaacatacagtttggaactaatgaaaattagaaattaaaaataagaaaaattaaaagtacaggttagagtatataggagtacaatttagaaataactaaaatccgatattaaaaataattaataactatcatgtatatacgaaatatgaatactacatattggtagtttggtaaagttagtacaaaatttaaaattatgttgtcattttaatatattttaattaaaaaatatatactattttatgatagaaaatatatggatgcttgccacgcaatctgcatgcaggctaccatgctagttattattatactaatggtagtaatcgtccttttttttggtgttgcgttctccacttttaatccgatgttacttcataggaactttgactattctaggggtttttgaaacgcaactatttctaggtgttataaatatttaactatgttgtgcttgttatgcttcataaacttgcccgccaagtgcaatctaagaagttacgcacttctaaattttaatatatagcaagtcatcatgactaatttctaaaaagagggaaaatgtcacattgtttggttcgtaatgtttgctttaaaatttttaaaaaggaaaacctatttttttaaatacttctaataccccatgagccctataatttttttgctcatcttttaccatctaaactatgcagctatccagaaaatcagatgttttccaagctttcttccatggcctcgtttgcagaatcaatcaacaattgcatccccaaccatctaaggcaactgcttgagaaggttttgtccaggaggaatatactgttactcacaccaaatggtgaaacaacgatatatgacacagtcctatccaagtttggttccattgaacagacaaggcatcatggagatgttgctatctcaaaatgtctaaatattggatttcgaaatgtacgtgaatcacctcagacatgtgaaatcgaggtaaaaatgatcttaaatttttgccgggtaaaaatgatcttaaattagcatattcgtaaagcgtgtcatcctacatcatggtatagattggttctaacaaagtgtgttttcttgggataggacgctaagcactatttattttctagcactaaatctgtggtcgaaattctcgatctatccatacaacttgttctaaggatcttgtttggcatggaaaaggcccaaaattccctcccaagaggatatcatgatgttatgaggtttacacatttcctgacaacgaaggtgagagttttgcttttttttttataggtaactccggtatttcattttatttttgccgtatgccttaattagctcgagttcatttgaatcaggcttatcattctttctcacaaaagaaagctaaacatgagtactccattatgatttggaggaataataacgtattagtctcagcctttccatgctctagcaaatggttaatatgttaatggtatttgcaatgagcagggaatcgatttgggcacagcttatgccttggtccatctgtgcttggataaaaagctccaaccttcggagctcattctagacaaacacgagctaaagcagatcgattttcactgtgagcgtgctcattacctcctggaatacaaagggagcatctttggtgattccaccgatctggatgcctgcaagaagatgctgaaatggtgttgcaaacttcgcattgatcctgctgcgaccatctcttcttgattcccacgattcaatgcactcaatagagaattagggatattgtgctatctcgaactcatgtttaattagcaacgaatttggtagtcatcacgtttaattagcaaatgtattctcatatatcaagattgagttagggtcctattatagtctaatggacttgaaagtgcatgaacctgtattcgttgttatggcattagattatgaatgtgcaagttgccagtcacatgataatcttgatccctgtgaagatcatccaatacagcaataattaagtgcacaaaagtaacttaaaatctctgcgccccatcatttcgcttattcgtggaatttaaaaataatctgtgaaaaacttttatatacatattcttagcgatctaaaagcaaaggctaaaaaataaacttcgatgaaaaaaaacccaaaatcaactacaaatttaaggttgaaaaattcaaattttagctgataagcataaacaaaaagatgaggttgctacaacatgtactatttttaaaaagctgaaacacaaccaaatcacctcgtgaaacatttttctataacgtatgaaacaacagttttaaaaaaaaatgggcgtcatttcaccctatataaaaacaatgtttcaacaaatagtgaacgaatgttttaattcactgcaacatttgatccatacatagtaaaacatcacgagtatactttactaaaacattgttggtggaacaaaaaaaataaaacggatttccttaatagaaatgttttcgcaatatacgggtgctttgttgcaacgacgcgtgtggtggggcgcgtggaaggggggggggggacaacgtgggaggcggcgggcacccgacttttttgccgctgattgggcacccgatcgcttgcattttccaaataatatagcttgatcagtttttagagagataacagagaaaatagctacaaattgcaaaaattgaaattaactataaaatcacagcttgattaaaaacctataaaggcagaggttacaacgggcggcacggcccaggcccggccgtgcctgggccgagggtagtcgggccggcacagcccgacctacacaccgggccgtgccgtgccagcccacgggccatacacacggcccaggcacggcccaagatggctcgggccgtgccgggccggcccaaaggcacgacggcccatcgtgcttttccacagaataaatctaatttttctccctcctcttgggctgtgacatatatatagctaaaaaaaagtctattcccccctcttctttgagctgacatataaattgctgaataagtctatttttaggccctatattttggaccgtgacattaatatgtctatttttagtccctatactttgtgtaccgggcctggcctgccggcccatcgtgccgagtcagcccagcgtaccggtggggaggtccaggcacgggcccaacccaagtcgggccgtaccgtgcttgggccgggccgtggtccgggcctcgggccttatggccatccatacctccgtgaaacaaattgaagaggaagctcatcaagatagtaatcaggcttagatgacggcccgtctgctggagagagttcatgcgaggccgctcgggtgcaccgacagcgacaagctggagatgtctctgcagctgacgagcgtgcgcgagcagtgcgcccgtctcctggaggcggtggaggcaggggagatcgccggccacgccgccgcggcccgcctcttcggcagctaccactccaagctgcgcgtgcttctcgccgtccacggcggcggccacctcgacgccgccgccgctcgccgtcccgccgcccggtggacagatcgatcgccgcctcctcgccaagttcggcatctacgccttcgagctgccaaccaactgggttgacaaggtgatgatccattaattaacttttgcttggtggtggagcaaattttctttatgaattctttttttttgaaacgaacttttttctttatgaattcactaattaccttactaacaagtgcgcaaatttgctttgattgtgatgatagtccctcattgcgtccatgatgcgcaccctggagtacgcgatggatgaagcaaaggatttcatgagcgtcacagatgagcaggatgaggcagaggaaggggacgatggtgatgatggaaaggcgtagctgtcagcaagttcttaaccaactggaaggcaattagggctcagtcaagagtagtactagttcttttaagtgtttttggcgcgcattacacctaatctagcttaagatgcttctgctgctgctactactactactatgttatctatctagtactagtactacctgctactactaccatgtaacgcctatgggctatcttgtgaactttgcagcagctatcttgtcttaactatggcttgatctttttcacctgtcttgcttattaaacctgctcaatttcgtctagaaatcagccggttgattttgttcctaaataagttatgatctccccctgtctcgcgtaaattcgctcaaatttgtttagaaatcagcccgactgattttgttcccaagtaaacgagagacggatatatatgatcatgatcttatctaccccttgctattttcctggagatgaatcgatgcgaatcctaggttggttggtcacggcagtatttatagatactgcacgaaacggaggagaccaccaaccaaaccgaaccgaaatagaagcggtttaggtgaattggaagcggccgcgccggcgatctctcgtcttccgccgccgccgccgcggcgtggtaccaaaggtagtatcttctttaattccgccatgcttgctagtagctactagatctacatacatactgagattgaagtgaaacctgagattgttcttgaattgcaactcgagattgttcaattttgatgacctgtttgttgacagttcgaccgtaatgagggcgtgctgctactatcaacctctccggccaccgtgcccttccattcctcttggccataagccccagcagcatcatctctttctcagcagcagatcaaaagatgtcaagttgaggtctatcttagatgaggacaggcttactggtgctagaccatggtatagcctgttcggaatgttcttgagtacggattaattatcttgtcattatattgctaatcatgtttcaaggtacagtaatgacttcttctttgattgatcttgactgacaacagtacggtagatctgtcctgtatataggtttagggcttgttcactttaatgttattttcaaccttaccaagttttggtgaagttgccaaaaaattggctacatttagtttgttgccaaattttagtaactatataagaaattctgctaaaattttggcaagttatcaaaattttggcaactatgtcaaaatttaatttggtaaggtttattttggcatcaaagtgaacatgcccttaattgtttttgcccatataaagggaaattaggatacttttttctagttatatatatgcactaataattctagctctaaagatcaggagcataaggggtggatgcaacttcggaacgcaatgaacaacagatacatcagagccttggacacaaattttgacgagagctttgttgattccattgtgtttgacaaaacactatacaagtatgcaattttgggttgcaaggtcaatgcagatggaattatgaacgaggtattctcaccatgttcaatcactcatacttcctttcgagaatatcctgttcagtcaaccattacatatcttaacaccagttgcctttgaatccagcatcttcataccttatccttcaagctaatattttagtattcatcaaggatttatgacaatttgccaaaactgcgtcctgtatgttctagtttagggttatttactacattttctctaaagagcaaacaaaagcacttccgttaagaagagagaaatactataacatggcggcgaacaaaccaggaacctagataaaaacatctcgacatcccctcagataaaactaaatgaaatcaactgcaactaatgccgttatatgaaatttttctatatgaaaccagacttctagataaaaaaatctctatatgaaatttcttataaaaaacatccaatggtgtagggtattatatcttccagtgaaagaaataaaattatccatgctcttgaaaggatagaagatgacattgagattggaaagttcaagtggagagatggtgcagatgttcatacaagtattgtggaagcacttgctgatatgattggggaccaagcaaagggtcttgccgtagaaagcaaatgtgacagttgcctcatgatactggaaacatggtccaagaactccattgatcatattatgactcaattgaaacaacttcaggttccttttctgctttttttttgtaagttctcaagatatattcttactattcagcattttttatagttttgatggtatattgtgttgttcgggaagatatatactcaagcatttcattgtttaattatgacccttttcctttgttcactctttaacatcggattattgttaattctagcatacattaattcgtagtatgtggttcagttaaagttgcatgaaaattctctgttgcaggctgctctcgttttgttagcaataaaaaatgatgggtttgttcttcctggtgagaaagaaattgagggcaccagtcttcttatgcgcattgtcaaagcggtaattttctatattctaccactgaaccaaaacatacttatgaacatagccagccatatcacaataaatctgtatttgcttaatggtttactatccatataatattacattacccattgccttgtgctgtatctaataccagttttctgtccttttaattatacagctagacagtgatgcttcaaaacttcgtaactgtcttggaggcatttgctctaccgatggtgtcatatttatgaggctcaggtttttgctgatacttgtccactatttttagtttttttttcaccctcaatctcctgatcatctagccctccatgtctccaccctcttctgtatttttctcttggcttattgactatttgtgtaaaacggaatgtgtttttgtattttgaatatgtacttgtatacgcttttgattgagccaattttatcttgcataatattgtgtgtataaacaaagaaatgatacccaagctttgtttaattgttatactagctagtcacagaatacttgttatagtcctttttctggtgttaaattctccatacttttaattcaacattttattgctaagtgaaagctaagaagttacacctaaatcctacttcctccgtttcacagtgtaagactttctatcattgcccatattcatttagatgttaatgaatctagacatagtatgtgtttaaattcattaacatctatatgtatataagcaatgctagaaagtcttacaatatgaaacagagggaatatcttactataaagttatccccactaactccttaagcttaacatgcaaagatgtcacatcattatccactaacaagatgccacatcatcatccattaattaacaagatgtcacatcattatccactaacaatcatcacatttaaacatcatgcaaacatgctatatctttatagtttttatgatttaagagcttttcaaatacaaacatgttaaattatcattcaacataattcacataatgtttcaatgtatatcttcatgcaaagatgccacatcatcatccactaattaacaagataccacatcatcatccactaacaatcatcacatttaaacatcatgcaaacatgctatatctttatagtttttataatttaagagcttttcaaacataaacatgttaaattatcatccaacataattcacataatgtttcaatgtatatcttcatactaaattcccgcagcaatgggcggggtttcacctagtttaacaaatagcaagtcatcatgactatttttcagaaagtggcagaatggtccatttttcggttagcagttttgctttaaaatttttgggaaggataacctgaaatacttcaatatatcttgccccgtaagtctgataaatgctaagtttttttccccatctaaatgatgcagttctcctgaagattacacactttccaagctttcttacattgcctggtttgcaaattcaatcaattatcgtattcccaaccttctaaggcaactgcttgagaaggttttgtccctgagaaacgctgaaacagccatatatgagacaaccctaggaaagttgagttctatcgaacagatgaggcgtcatggagatgttgctatctcaaaatgtctaaatcttagatttggaaaagcatgcggatcagtgcagacttgtgaaatcgaggtaaaaatggtcctatattctttcttacagtgcgtcatggtatagtttttggttctaacaaagtgcgttttccttgataggatgctaagcaccatttattttctagcactaaatcagtggttgaaattctcgacctatctatacaacttgttaaaagcatctcgtttgatatggaaaaggcccaaaattgcctccccagaggctatgatgatattatgaggtttgcgcatttcctgacaacaaaggtgagtaactcctgtatttcgttaaatcaggttttgtcgttctttcccctcttgaaaaagaaaaatcttttctcaatgaaagaaagatcacgctcttatcattcaaaaagaaaattcttttctcaatgaaagaaagatcacgctcttatcagtcaacaagtataggataaaaaggtgtttatatgatcactccagaatgatttggataatctcagctttttcatgctttggcaaatggttaatatgttaatggtatttgcaataagcagggaatcgattcggtaacagcttatgccttggtccatctgtgcttggataaacagctccaaccttcggagctcactctagaaaaacgcgagctaaagcagatcgattttcactgtgagcgtgctcattatctcctggaatacaaagggggcatctttggtgattccactgatctggatgcctgcaagcagatgctgaaatggtgtagcaaacttcggattgatcctgctgcaaccatctgttcttgattcccatgattcaatgcactcatagagaattagggatattgtgctatcttgaactgccaaaacaactactacgtaggaatttggtagtcatgtttacattagcaacttggtagtcatgtttaaattagcaactaggaattctcttatgacttgaagtgcatcagcctgtgtattctttgttatggcgttagattctgtaacatgcaatttgccagtcacatgatagccttgaacttaatttctagttgtacggtttgttctggcgatcaagcagcccacagtatgtcaagcatccaagcacatgataacctttgatcccttcgtaagttatcgtctgctgcagcaataattaagcaaatgaaagcaacttgtagcttaatttcctctgtttcacaatgtaagactttctagcattgtccatatttatttagatgttaataaatctagatatatgtatgtgtttagattcattaacaactatatgtatgtggacgatgctagaaagtcttgcattgtgaaatgtatgtggacaatgctagaaagttttgcattgtgaaattgagggagtactactctaaattacagggacagcatgtgagtgaccattttgacgatggccgtctccgacgagccggccttgccggtgcactccgccgccgccttcttcagctcgcgcgcccgcgccctcatctcgccgccgtcgctctccgccatgagccgccggatggcctcctccaccgcccccctctcgagctcgccgccgaccacctcgaacccggccttccacacgtgctccacgtacctcgcgttccccatctggtcgccgaagcttggccggcacagcatcggcaccccctcggcgaggctctccgtcgtcgagttccacccgttgtgagtccagaacccgcccacggcgcggtggcgcagcacctcctcctgcggcgcccacgccaccaccaccccgcgccgccgcgtcgccgcctcgaacccctccggcagcagccgcgttggctcgcccggcgccgcgcgccggccgcggacgaggcctggccggaccacccagaggaatggcacgccgctgccggcgatcccccacgccgtctcgacgagctcccgcgcgcccatgctcgccaggctaccgaagctcacgtacagcaccgactccgccgtctgcgcgtccagccacgcgaggcagctccggtcctgatgcagcaagctgccatcggcggcgggggagaacctgtggagcggcccgatgtcgaacaccggcacggcgaggtctcgccggagcttggccagctcgtgcgcctcgagcgcgtcgaacgtgttgagtatgagccccgacgagagcttcaccgccgccacggcgcgggccagcagctcgcacatcagctcgtggccgtcccttccgatgtgcatcaggtcgcgcacgcggtacggcggcagctcgctcaccggcatgtcgagctgcgactctgcaaccaaaccatgtcggattaatcgatcgatgagaagcaaatcagttgatagatcgattggattatggcatgccttgcaccgggaggtagcctctgtcgcagaggagtgggtaggcgaggaagctggcaaagcaggcggcgctgccggtgcggagcacgagggtgggcacggcgagccgcctggccacctcgaccatgcgcaggaggtgcgcgtcggcgacgaggcacgcgacagcgtccctggaatactcggccaggacggcggcgaggcggtcccggaacgcggcctcgcacgcggcgttgagcgcgcggatgtgcttgacgacgtcgccgacggagacgggcggcgggcggccggacatgccgtcggggacggcgacgaagcggtgctccgggtggcgcgcggcgtccggggcgttgaagtgggtgtggaagacggtgacggcgaagccgcgggcgcggaggacgccggcgagccggagcatggggttgatgtggccctggtacgggagcgggaacaggaggacgtggcgccggcgtccgccatggccggccgcggccgcgccgccctccactgctggcgaaggtggtggcgtcatggtttggctgggtgcaacttgcaagcaaatgcaaggacgtttcagtgatctaagggacctctgtgccgttgtgcgtatggacgtgccgggttttgtacccatctcttctttgctagtactaattacttctatttttttggctttttctttcatagatgatatcatatatcaatagaaagacatcgagattatgccaacaagttctgaaattcacttcagtcacctacaacaacactaaaccaacagccgttaaatatgcaaatgaggtcattttaggtctatgagtattcgatgaaaagctcttatagttatctttccaaattttctgacctcatatccatatttcatccgagtcaacggaaatcgtacaaataaggtgccacatcgtctagaatggtttttcaggcttgtaactaggtggagcacaaccctagacatccttaggctgtcctcccacctccgtaaatagctaggtatatattctttcagagatttgggggttttgttagatcgaaagttagctaatgctacttcgattgtaattccatgtattggctagaccgcctaattacttgtcttcaaaaccccacctttgtgactaattcatattgtttgtttatatttttgttagttatctgttgcttacgggaacaaatgccttatggttggtcgcacttcgtcaggattatgactcacgagcaaccttgaaattagtgtaacgattgctgaggcacatcgtccctggacagttatagtcgggtggccaacttcttccccatgcatgcaattgacttatcccctcttattgaaagatcgaaatacctgagaacacatcaaatcgtttcacctatagttgattatgggacgcaacatttattagcaactaaaaataatttatgagtaaaactgttacatgtgttaaggaaaacattgaatcgtttgacctatagctgattaagggacgcaacatttattagtaactaaaaacattttagttatggatagattcttttatgtattcttaacaactttagtcaatgctgaaaaataaactaaagaaaacccatcaaaatctattcattaaatttaattcttagttttgagggttataggacggatcgcaggctcgcagcacctggtacacctctaacatgcaaccgttgtttttggatatttttgagtttcatttatggattttgccttgtactgggatatcttggagaatggaaacttattttttttaattaatagctgcccatttaattgatgccttgaaaagatatcttcttcaacagtttccctttagaaaatgttggtatattcccagattgttgtagaaagatttaaaataatttaaattttaatttggtaagcattggtgaaggctacaagaatcaagttgcctctagccctctacacgtgaagaaataataatcaaaaattaaatttaagacaaaaataaaaaataattatttacattcatttttttaaaaaataaagtagtataaaaaagcaccgggtccttgatgaacaggggaattaccgaattagggaggggtgataagacgaagcaaatgatcatgggcccatttgtcatgggccgagccgctggttggcccaccaagcaagcggcgctgctgcctctctcttccatcagaagcccacctcccatggagcccgtggcttcccgtctcatcagagaagactactcgtctgctccggcatcccggcgacgagagagagagagaggggagaaggctgcgcggcggagatggcggtggcggacgtggcgttcaaggcgctgacggcggggctcggggtggcgacgctctacctcgccggaaccttctccgtcaacgtctaccgcggcctctcgtggcactcggagcaatccgtaagcaaaaccctcgcccgcctcgaccaccaaacccttgacttctccccgccgctcgctggggagccgctgattcggggtccttctccgacgatctggtgctactcgctgcatctcccatgtcgaatctccccccttcctttgggcctaggacgagggtttgggtggatatccttcgacctttgttctgttgttttttttttgcatcgacccatgcctgccaaattggaacatgtttggccctttgacttgatgcgagcacatatatttttgcgtgatgctgctgtactgtgcaggagctatcggtgatttcgtgttgctatctaactgctgctgcttatttcactttgattaagttatcattggctaattagctttgtagacgccaagctagtgttgatgtgaattatagtagtgtaatgcagccacttcttgttttgttgtgttgtgcttggaaaggtagtcatggttttaggttacaaacctgttggatgctcaaatacaacaaaacgagtgatatagcattttcgtggtagttctgaattttgacatgtttaaatagaaatggttcataaaactattcatcggcttcaatgtggctgatgaggtactgcgtgcaaaaatgatggtaaaggttaatcattccatcagttttgtgaaaggattgttggcttttggtgaatctaagtcaaacgaaaaatggatcctacaacttttggcatgaatattgcatcccagaacaaccaaatcagttttcctcatcaagaaacttagtgcataagtccatttttatttcagtaaatcatccagtcaactgttgtctgataggaaatcgttgtgatgttaaacccaatggatgctagacttaatctgctgatgttaattcagataacatggaatctggttaatgatttcagataacgaggtaagcatggaatctgggtaatgattttgtggtttatatcactgcttcaattaatcatggtgtgtggttgaaatatgttttgaaatgaactatatggtatcagcttcttgttatctacagtttgaggcggtttccctctttatcttgcaatacgttgttgtggagcttctgagtcgcatgctgacatgttcatttgtgattttcagaagttagaaaaggagaaacgtgaagactgaaaagcatcagaagctagtctagaatgtcagacacaacaaaagaaaacctaaagataaacactcaccttgtgagatgagttgtctttagactagttatgtttcctgggattgtttttgcagacctttcaagatctccagaatgctattttgatttgatgtaagatgcaaagatctcatgattattattcctctttatgcttacgaaaatatttcgaccaacatatgggtgtcattgatgccattttatatgccacagtttccatttaaggttgtgtaggaaattttgtcattgttccttttctctcttgtttgtgtctcgccgttttatttaccgatctgatgaactccagcaggaatgatcatccgcccaaatcaactttccaggggtaacacgtccaaacaaatgcctgatatcctggtgatctcactgaaatcaaataaatcttgcttagttcgtgtacgagtcagaccatgagagtctcgttcatcaaaccatactcattcagatattaaactgggccaagtctcttcttcttcaatgaaaacagttgctcccagtcctctttgaggtttacctaaaaaaagtgtagaacacaagcaaccgtacccaaagctttctctgcagttcatatatagatggtacaattgtgttcttgcccttgctcatgaaagtgtacttacacaccaaatacactgtacgagaacccactggcaagtcagaaaatcagtaattcacgcaactcaaaactgtagatataacaaattgaagttcctctatcacgagttgtgtctgatacagttaagcgcctagcggttttttccctatgtagtgagcagcagataaacaaggcctttcagatactcaactatctcagatccaccaagttttgaagttccaaaaaccctatcgacaaaagttattggaacctgaaaaatataaatcacaattttcagcattcaaagaagcagcatgccaacaatactaccatatagccaggtacaaaaaaaaaacaatacaatcatacaaagagaaatgggaatacataatctacctcttcaatgtgataacctttcctggtagccctaacaatcatttccatttggaaaacatatcccttgctgacacacgaggagattaaatcttctaggacattccgtttatatagcctaggaaatcaggtcgcaatgttgcatcaatttaatagtagttatgtggagcttactctattgtaggaaaaggagacacacctgaatgatccagtcaaatcagaagctccaggctgtagtaatgtttgtgctagaacatttgctcccctgctagtcaacttgcgcatgagattccaaccatggacaccaccgttctgaacataacgggtgccagttacaacatcagcaccagtttccttttgcttcctggtgatgcaaagaggacaattaacccaaagggcaaaggttcttctaagttacttcttatcagtgtagtagccttggtaagagtccaactgtaatggactttgctctaaagtttcagatatttctaacatctgacacaaacaatctttcagcaacactaaagtatttaatacctatacggctataccaattccatttagagttgacaaaagcatattgatgaggaaaatgagctatagcagactatttttgcaaagaaaattctggattgaatacatcttcaaagataagatgcttacctaatgaagcttggcaagtacttcggctgttcagagtaggaaaaaaggcgtcaaccaaaaaggaagaaaacaccagcttaagcatgccaaatatcagatagaagaaaaactgaggaattacatacatggtgagataggtcagcatccatgataacaacgaagtccccagaggcatgctttagtccatgtaaatatgcagtacctgcaccatttccagttgttagttaactcaaatgtgaagactaaattcaccttagacttgaatggaggataggagctcaccaagtcctagcttcctcggtctagctcgcagcagctggtctcatgtcagatcaaacacatatcaggaagccatgataccaagacaaatcatatatatataaagacctagacaaaagggagcactatacaaaaatacttacaacacggttttcaccatatatttgctgcaactgctttacaatgtcttgagttccatcagggcttccatcatccacaactatgatttcaaagttgacatccctgatgaggaaatctaaagtttgagatactataactcgaaagagttcacaaaataaataaaactgccttgtcataaagagacacagggacagggctgcagaacacacgggcataatgagttgaatactgatggaacgctagcagtataaatcgatgatgaaatatatactgtagactgaacataagcatgctgtctggtggcattcttaaataatcactcaattcaaagagttggatggatttctatctgcccatttgacacaagcaacatgcaaagtaacattcttcgcagcattctattagcacaattgagcaagttagctgcactcaggagcaccgatgaagggtgtctaggagagcatagctaaaatctgaaagtgatcaaatcatcacatcgtctcaattgcactggatcaataagtaatcgtcttctatactttccatatgttcttgtgaaatcacaagaggcgcgaattgaatctaaaagaatggctaatccggatctgacaacaaccttctccgatccactgaagagcaacagatcaacagtagatggggggatagagatgggagagatggggggagttacggcaggtgcttgaagatgaggtagacgatgagggcgacgttgaggcgctcgttgtaggtgggcacgatgatgctgtactcgcgcctgccgccgcccgcgtcgtccgccatcgccggcgccccgactcgacctcgcaccagatctctccgccccccgctctctcccgcacgcgatccgacgcgggcgctcggtgacggtgaggccacttagctggggatgaggatgacgcgcgcgcgccgcagatgccgccggcgacgacgagcagggcggccggcgtgaagtctcgtcgaggagttgcttcgccaccgcaaggtccattgagatgtatagggccgcagcgtgggccgtatccagaccatggacgtgtttccatgggccgtgtctagcccatgacaagcaaacgctttgtatgcgcctgtagaagagaaacggtatggtttggcaaagaccaaccatgcaatccaatggagaatggacaggccaatcacaggaagcaccgcatttcgtgccaactccagtctagaccgtttcagtttacataagcaagcattcccattcaaacggtcatcatcgtcatctatatctatactaatataaaaagcacgagttcatcaaatacctatctttactgacctttaaatatattcatccaacgatttatatcaaaagttagatcaacctctgcaattagccatccccacgttcgattagcagcggttatagcgatatagcgatcgatcacgagaaagaagcagaaaagaaaaaaaaaacttctctcccgtgcgctagcccgtcgccgcctcccggagccgctcgctgcctccttgcacgcgcccgccggaccgccgggcgccgccgccaactccgagcgcgcacccgccgcagccgcgccccctaccccgccacctcctcgcgcgtgcccgacgctcgccctaccccgccgctgccgcctcctcgcggccgccggtgagtcaggttcgccgtcggctggcgccttctccaccaccgccgccgcctcctcgcgcgtggcctctggagttttgggatcgccgtcggccggctcctcctcgcgtgcgcccgccggggagctgtggtgggttacggcactacgcagtacagactccaggttaaggtgatgtcctctcttcctaaatcctcaaacaataaagattttgtgcttttattattttggggtcataaaattgtttacctagggtttgggcagggttgcttatgatacggggccccaaatgtttagtcagttggttctctcgtctcgctatgttatttgctcttgtttaggagataattttacttgctatgaattctgcttgctaagcatctcacaagtatcatatcagtcatgcttcctcaggaaatgtctaaaaacatggtggactgccgatcacacaaattaattctacaaagcaattatcagttaattacctaaggacttggctgactgccgattaccgattatagtgtaaacggtaagcatcagttgtggcagtgcacataattgaataaacaaaatgcccaatacccctaattaatctgaaagcaatccatcaatttaataaattaagttgtgggatgcagattgcaattagtgtttggccgtcaggcatctggcattaattagcattcggccatcaggcgtcttgcattctggttgcttgctttgcctatttgattgggttggatcaggtgtccaatgtgatttggtccgggggtcccacactaaaattatacatagcctataggttccacaatgttgttaaccaaagcactcgcccttcccatattcaagtggatccccattgatctaggttggcaaatcttactacactatttcgttacctcgtaagtattaagttcttttatggaacatatttttagatttaattccaatgataggcttgaagatattttgcacttttttacttattggagttgatgtgatggagctaacatcagctggaagtcaccttgaaaatggcacattttgtgtcttgcccattaactgtcaagtatggcacaattattagtgtgttttcccctttctgcggtgcagggagacgcatattacatatgtatccctcttctctggatcaaagagtgcagaggtccttcaattgcattctaaggggatagggttcataattgaattgtttagtgatgtttgcaatctcacaaactcaaatgtcgttagcctctcttgaagacaagaaccattagtctcataaattatcaggtttggattttagcagttttaggttagattataattccagattaaagtgaaaatgatgaaagttatacattaaagattttgagtgaaaacattaccagattttttttctccaatggaatgttaattgttaagtgcaatatatattcttaattaaagttgtgtgcatagatgacctgccaacaatactatcccgtattgttcagtctattgatgattgaactggatgtcaactccatgtcctcattgtcttgccaggcacagggaggcaacaatccaatacaggagagatgggatgggatcctagctcaagggagccctagcggcagctacggtcgggaggacctaagccctacaggcaagttctataatcaacccccttttgcttaccggcgataagtcaaccaacttccagtgatgcaggtactgatcctctcctccctccctctccctccctctttatcatgacattagctgattgatcaccagctttttattccgattgctccagtgaactttgttcacaaaatagtgtttttttcattttctgatgcttgtgcctatcgtgtgactcctccaccgacatgtacattgatatctgcccaactgattgatgaaatgatcgtttacatttttttttgttcaatcaatagtttctgatcagcttggagtggtccgtgccatgttgctgtgataatgctacaggttaatcctcctggctctctgtactgaaacaatttctccggatctctttcccttttgttttggaccttatacaacctgctgttggctaataatgacattcatgaataatagatcatgttaaagctgtttgcatggtctgctgttgtcaaatagttttatgcagtcacaactcttattaaatgatcaggttgacttcaagcattgggctaaaaactaagattatgtaagttaaataacatatatgccgtcatcttcaatttaagtgatattgtgtcaatcttctgatcaactgtttacatcttcggattatatagattcatgtcacatgtgtatgtcttcggaattatctatgtttatgttactgtgtatgtcttcagatttatatatatttaggttacctgtgtatatcttgagatatttcgtaattgcatattattacagatggcaaagatgtttaattctatttttttattggatatccctcagcgatatgccctgcccggccttgtcagctaatatgcaatatcagttttatgcccttgacatggcatacattcctccaggctgcactcacttacgcttttactgtagattgataggttaatgttccattgtcaaggtgaaccaatcagctaatgatggttcatatagttataatttgagtgcaactatgtatccactatgatgtagaattgtgggtatttatagatgcaatttaaaaggtatgccacttaggaatcgacactcaggcacatgcacctaggcttgatgggtaagtctggccaatttacatatggggaacacaaattaatttaatcagttattccaatttattcttctttgtttctatgcactgcaatgccaatttgagtgcgtatcttgtcatgctattcagcataatgtcttggcaggctatgcatatgttcatgcttatatatgcagcattcatataagtaaggattaattggattgcttgctttgtctaatgcagcctcaccatttaatttgtggcgagcaccttaattccatcttgccattatcgagggagtatatcatatgcacctaattctgtatatagagtatttattgactagggtcttggaaatttttgaattgctgtcagatgtaagttcctcagattgatgatttgattactttcacagctaataccattgatcacagctaaacaccacttatagaagtttaatggatttttatctaaaaaagggaaaaaaggaaattaataactgaaactgcatagtagtactatgatctctgaacaaagaaatttgctgagtttcctagcagctgctgggtgcattttcctcttgttatgtgtgcctaaccttgcatccattaaatttcaaaagtgcaaatagagaactattgcatgcattccttttatatcaaagattgggatgaaatttccagcttaatcctgacagccgcaatgtgtcttgagcaaaaggaagcaaggctgcaactgaaacacggtgaatagtaaataaaaatctcgcttttaggaaaaaaaaggtgagtcgtgcacaagtgctgtaatctggttttggcaaatttttatcaagatatacaactccgttgctttgtttacacaataaacctgaactctaggtgtagcagcttgaagcattaaaaaagaagatggcagcaaacagatgtttgctttattggatttaatacttggatattccactgtgcttcccaaattgagctgaataaatagcttgacgaattgttctcttaacatgtctcagttgtcctttgtatcaaatgagcagcataatccattcatggattgttcttttccactggtgatacagatagttacttctaatgtttcatggaaaagttcgagctacaaaaatttcttaagcaagcttacggattgtttctgatgagtttagcaactctatggaaacaagcataagtgcttctcatctgaccagttccaagagagaagtagccaagtaggtagaacaatcccaaaactgcaaacttcttttactgtatatatatatatactttcctttttagcattttctgtaaagtcccagttctgtattgcaattggcatggttgtgttcatcagaatattgaatgtcaaatcgaaaggaggcgccaacctatagctatcaacgacatggacaccatggttcagattcataaatttggggatcatggatgtctaggttcagaaatttttggattttaggcaacaaattttgtagaatttccaatttagaaaaacacattttgcattttgttataatgtaataaaataccaatttacgtttatttgatgaattatcaaagcaacgcttacaatacttttatttttatcggtgcatgtgagctacaatgtatttatatatatcgctgtgcatcaacaatggatgtgtcgttctccagtatacttcgcttagtatatatatcgatgtgccttgcacatgcacgctcactagttaagggtaaagattgacatgagtgtgggagaaaacaatcaaactgctggaagcaaaattttggcagaccatggtggggctgcgaagtttgtgtaaagttcaaagaaacctattagccttttgacaagctagtccggatcaccatgttgttcttcccacgacgatcacgcttaattatcctttggttttgttcagaccatgctgcaaaaacttggaacgatattgctccacaagcgatttatccacacctccttccccagccggctctttctttgtctttggagcctttcctctcctttgctccgaatgactatcttttctgttcttcctcttcgtcggggtgcctgcctgattatgtttacttgacagagtttgctgcaaaagaaaaggtcagtgttaaacaactactttgcttcatcgaaatcaataattttgtagtgccaaaaaaaccaaaagtccaatattacttacattcccatcagcagttggtggtgttgcatcttgtctatctccatccgacgtcttgtttggcttccgtgctctttttgcaggcctttgagcctttcttttatcttcaaccatactctccataatgccactgccaccatctccagctgccgaaagatcctctgcagaccctttaccagagttcgataacttagatgatctatcatgtgtttttctcttgtgccctttgttgaaagcccttgtgttattcgcctgagggccatcagttgcagaatgatctcctagaggtcttgccttatcttgtgcaccttcttgcaacttatcacgacgctccttccaaattttctggagtctcactttctcatattctcaagtgcaaatccacaattgacgacgttctgcacca

SEQ ID NO: 8772 - DNA, 96239 bp, Oryza sativa
  unsure (1)..(96239): unsure at all n locations
tactaaccgggaataaaaatcaaaacacactatataatccatagtaccgatcctcttttcccgtccacacaacaaactcctccctctatctctttttttcctctctaacttcttatctctttccttatctctaactcccctcctctccttccttttttccttcaccacagtgcaggcggtcggcgcggaggcggcgacgcgggggacggcgcggaggcggcctgcgcggcggccggtgcggcagcgcagggggccgcgcggcggcggcggtgggcggccggcgcggcggcgcaggaggccgcgcggcggtgccgggggccgcgcggaggcggcggctgcagtgggcggccgctcggcggcgaccgacgcggcgctggccggccggcgcggatgggaggaggggaggcggcagtggccgccggccggattttttttcttttttttttgagatgtgaatctgtgatgtatttttgtgtgagatgtgaatctgtgatgaatttttagaaccctgtgatgtaatttttttaagagtttgtgatgtatttggagatgatttgtttgaggatttggagatgttctgtaatatgtgatgatttggatatgagaggggatggtgtgaaatcaatattcaatattaaaagcagaaaaaaaaagaaaaaatatctttagtcccggttggtgttatcaaccggaactaaagattctcccatctttagtcccggttggtaacatcaaccgggactaaagattgatttttagtcccggttatttgaaccgggactaaagatagtcccggattcgtagtcccggttggaaaaccgggactaaaaagcatttctccactagtgtatggatgcattcaagaacaagaggaggtgaaacgtgaaatgcattatatccccatcagctcctggctcatttggatatctaccactaaccggcaagaattgccatgaaaatcaccgggactccaggagactgcagcctcgaggttccgacagttatagcttctgtaagaatctttagagaagtcagattaaaaagttctaaaaaaagtcagataaaaaaataatcttaactgaagtcaaacagtttagaattttatctaagaatatatagttatagaattaaaaaagtgggagccctattggttgccctaataaaccaaagtaaaagctaaaatttttattttaaaaaataattttgatgttgattttaatatatgttcaacgtagttttctatattaatttttgagtgaagtacatgggcggtccctaaacttgtgccagtgtgtcatctagatctctgaactcctaaaatgcatttttagatccctgaacttgctatgtgtgttatataggtccaaacaggttctaacccactcgatgtgctgacgtggcaatgccacggtgacgcctacgtgtcagtggaatccacatgtcaagcatatataaaaaataaaattaaaaaccatattttctcctattaggtagacagaaaaaaagataaaaattttaaggtagagagaggagaaaatatatttttctaattatattttttttctatgtgactgatacgtgggtccaactaacacgtatgaactatcgtggcatgccacatcagcgcatggaaggggttggagctcgtttggacttgtatgacaccccaaaacaagttcaaggatccgaaaatgcattttgagagtttagggacctagatgacacacccacacaagtttagagaccgctcgtgcacttcactcttgatttttaaatcactaagaacatatatataaaagttttacctataaattaatttttatactcttttactagtaataagttaatgtgggcaaaggacatgaaatagaatagtccgtagatattgacgggtgacacgggcttatttattacagcgttcttgctccatctctgtgtctacgtttgggtacgtgtagccactagccatggacgatcgatatatcacttggacagtgaggcatggcactgtttgcacacgctgcgcacgtgccagcgtactcgactgccggtggtcggcgtctacgaaacgacgcaaacaggacacccaagtggtcctcgccgtagacgaaacccagcaaacgtttttttttcctttcctccgtacctgagttaatttttctcttctttttactttttaatttttataactagtactagtttattgcccactgtttgcttgcagctctgtactctatccgtcctgaaatgaacctggacattcattcgtccagattcaaaccctagaaattatctgtttttttcgatggagggggtaggtgacaactagctaggataggttgaggataggcctggcttagagcaaatttaatagtatagccaactactagctctaattcatctatagccaatctaatagctcatatatacaatagttacatattacactattaatacctggtcccacctgtcatacacacaatgcgtcttggagtccgtgctacagctggctacaaatctgtagctcgctgctcttctctctcattatttatctccttaaaatatgtttgtagctggcttatagcctgctattgtacctgctcttagggcgtttacaatgcatctttggaatttttttagtttctaatttttttttccaaaaatgtcacatgtaaaatctttgacacatgcatggcgtattaaatatagataaaaataaaaactaattgcacaatttgcatgaaaatcgcgagacgaatcttttgagcataattagtccatgattagccataaaatgctacaggaactcacatgtgctaatggcggcttaattagacacaaaagattcgtctcgcgattttcaagcgagttatgaaattaattttttcattcgagtccgaaaaccctttccgatatccggtcaaatatccgatgtgacacccaaaaaatttctttttgtgaaagacccttatgctctctcattttttgcaagcacatttttaaattgataaatgatgttctcttctaaagataagataattactttataaaatcatattaatatatttatttagttttttaagctaatatttaattaatcatacactaatctgttgctttgtttcacatggtaggaagaaggttctcaacagtcaaccccttttaaaaaaacacacccaagtactccagcacatacacttcacattctaaaaaatatatctaatacgatattgaaatttatagtactcctattaagatgtattatactcgctctatctcataagggcttttgcctggatgtgaacaatgaatctggacggtttttctgtccaactgtctagattcattgtattatctattcagattcattgtactagaatgtgtcacattcaatccaaaatcattatatttagagatagaggaagtactacctctatcccaaaatatactccctccgtttcaggttataagtcgtttgactttggttaaagttgaactattttaagttcgaccaaatttatacacaaatatagtaatatttacattactaaattagttttattaaattgataattaaatatatttttataataaaattatcttgggtcgaaaatattactattttttctataaatttggtcaaactgaagcagtttgactttgaccaaagtcaaaacgacttataacctgaaacgaagagagtagctatttctagcacaacatcttatcccaaaatgaaactatttcttcatctacctcctctcaaccaatcacaaccattctctttcacctaatttatcttttcaatcaatcacacaatttcttcaatcattcttacttacttccttaatacccgtgccaaccttaaaattatttatattttggatggaggaaatattctcttcgtcccattttaagtgcaactataagtttttgtgcccaactttaatcaactatcttatttaaaaattttctataattagtatttttattgttgtgagatgataaaatatggacagtactttactactttatatgtgacttatgtcttttaaatttttcaaaaaaatttcaaataaaactgacggtcaaaattgtacacgaaaaatcatggctgcaattaaaataagggagtatcttatattagatttgtctatttgaaaacaaaaaagatcacgaatagtatgcgaagccccgatcgatctcaattggctgtccttgttctgtctgcttctcatttctgaagggaaggaaaagaaaaaacaagtggaaaaggggcccagagtgtgcacgcactccctgcaggctctagcacaagcttagctagcaacgtgaaatctttgtaggcagttgaagcttatatgtgctgagctcctaccctccaatgccgtccatctccatgtccctctcgccgacgtcgccgtgcacctcgcatcgtcgccgtcaccgtcgccgacgaccagaccagcaacagtgccagcgacggcggctgctgcccaactccaacaactaaactgttcaactccttcagctactacttcacttgggttaatttgtacattgctctctgccatggcggcgccggcagccgttcttgccgtgctccggtggcggcagcggcggtggctggttgagctggtcgctctcctgcttcttcttgctcgaggtggcgctgccgcggttgaccaattcttgtttcccggcttctccggcgacggcgtggccaccagcggcgcggccgccgtcacctccaccggtctactgcagctcaccaacgagacgaaggaggtgttcggccatggcttctaccccaagccggtcagcttgagaaacgcctccaccggcgcggcggcctccttctccaccaccttcgtgttcgccatcgtgcccaagtatcccgacgcgcatggccacggcctcgccttcgcgctggcgccgtcggtggccgtccccggcgccgtcgccggcaagtacctggggctcttcaacacgtccgacagcacgggccagatcaagaacaagatcgtcgccgtcgagctcgacacggcgcgggacgacgagttcgccgacatcgacgacaaccacgtcggcatcgacgacaacagcctgaaatccgtgaactccagcccggcggggtaccacgacgccgccaccggcggcaagctcgccagcgtcaacctgatcggcggcgagcccctgcaggtgtggatcgagtacgacggcgacagcgcgtggctcgaggtgacggtgtcgccggccggcatgctcaggccggccgccccgctggtgtcttgcaccgtcaacctgtcgtccgccgtggccggcgacacgtacgtcgggttctcggcggcgaacggcgccgccgcgagctcgcactacgtcctcggctggagcttccgcctcggcggcggcggccgcgcgcaggacctcgacctcgccaagctcccgcggctcccgtcgccgagcaaacccaagaagacgttgccgccgctgatcatcttgacaattctcctcctctccgtcgtgatcctgctcctggcggcggcggccgtggcggcgctcgtggtgcgaagccggcggtacgccgaggaagaggaggaatgggagatcgagtacgggccacacaggatcagctacaaggacctccacggcgcgaccaaggggttccgcgacgtcatcggcgccggcggcttcggcagcgtgtaccacggcgtgctgccgaggtccggcgtggaggtcgccgtgaagaaggtgtcgcacgactcgcggcaggggctgcgggagttcgtgtcggagatcgccagcatgagccggctgcgccaccgcaacctggtgcagctgctcggctactgccggcgccgcggcgagctggtgctcgtctacgactacatggcgaacggcagcctcgacaagcacctgttcgccggcggcgagcggccggcgctgagctgggagaagcgcggcaagatcgtccgggacgtcgccgccgggctgctgtacctgcacgaggggtgggagcaggtggtggtgcaccgtgacatcaaggccagcaacgtgctcctcgacgccgacatgaacggcaagctcagcgacttcggcctcgcccggctctacgaccacggcgctaacccgcagacgacgcgcatcgtcggcacgctcggctacctcgcgccggagctgagcaagaccggcaaggccaccacgagcaccgacgtcttcgccttcggcgccttcttgctcgaggtggcgtgcggccggaggcccatggagttcaccgtcgacgacgactcgccggggctcgtcgagctcgtcctcgagcactggaaggccggcgagatcacggcggcgagggaccccaggatcggcgactgtgacgaggacgatctcgaggtcgtcctcaagctcgggcttctctgctcgcaccctgacccgcgccgccggccgagcatgaggcaggtggtgcagatcttggaaggcgccgcgccggcgccggagacgttgccggaggacctagaatgcggcgtggggcagttctacgacgagtcattcgacgagttcgtcaccggcttcccgtccacgtcggagatcaccacgtcgacgacgcagtccaccgacgagcagcagcggctggttggctgtgttcagttgagcactgccgattttctgaagacaacttaaaatgtaaaaatgtcagtgagcaaatacttgcagcattaggtgattgtttgggctttggatcttctggagttagtaacatagggatactgtcaatcattttcagatatgatcatatagaggttttgatcaaagattagtacagcattcagcttagaagttaccttgttgcagtttcagaagaatgtacacctgcaagaaggcaagaaccgtgtaagaaattttgcaagggaagaaaaaaaaatatggatcccctttttttttttgtagctgcatctttcttggggcagtttgctgttgagccagatcagaatattagccaatagactgatcactgatgtcgattctgtcatgcagaaaacatgcgatatataatatgacatattggcaccttgctcaaaaggaaccaaagatattgcagcctgcttctcatcatgggaaaaagacaatgaaaacctaaaaaaatgctgtcctaatgttctgcttttacaacaaaagatgaacatgacaaatattagcaaggtatcaaacaaaaagatgacaacaaatggagacagttcaggccatggttctagggattcttctgattcatacgagaactgaacgggctttcttgtgttccaaacagaggacattagattggttgccgaggaaaaaagaactacttgcaaaatgttgacaactgacaagcaatgccagattgtgtccatggctccatgcaacattagtttacatcctatccaagctaaaactagcatccctactacccaatcgtaatgactccacctataagcacaggtgacggctctcttcctcagagttattcatcatcctcctgagttccccgagaagcaccttggatcattttgtcatcaactcctgcgattaagttcagagcttttaatatcaaatttcaacattaacataagataaactggaagcaaggtaatgtataaggatttaccttcaatgaaggactcgaattcatcatcatcacttggacccattgatgtgatattgttgactggttggttaatctccgtccagtttgactgctctgcctggccagatataagtgcagatctatccacaacccaatcgtcgactatgtcaatgttgtcgactgagacaggatcaaatgctttggtcttgtgttgttgcctatgacagttattaatcagatcgctcaccatcatcaatcatttactagctaatgaaactcggtatatttaacataaggatttgattacctgtgttgtagccttagattgtactgaacaaatgtgagatgatgcattcgctggcgttcaaaaagattcattctttggtcatgaatttgttcgaaagaaatgtgtctccggtcacatcctttagcactgcaggtttgactgagaatgcgaactgctaaacgcgtcaaatttgggcaagctcctccatacgtataccaccattcagctgcaaaatagaatctataaggctcaccaaacaatttccgtaatcatatctaagtgtctaacaataacctatatctgggggaaattaattatgtctatcaaacgaaatagtaacacagctctagttttgtgaaaggtcggtgctgaaaatgcatttcatgtttttaggacaacataatttgtcaattgagtaagctagttcacaacggaaattgtatagtactaaccaggaggtaaagtgtgcctggctcggatagccatttgcctacgaaaatccccagctgcctcactccggtatacattgagctccttttggattttatcttggattttcacatcagaaaccaacctttctacgcagtctagcatacctgagaatatctcacttgatgttccacctcgaacaccatcgaaaaataatgggttcaggaaaaaaccagctaaatgaagtggtcgtggtgcatccttgttccatctccagtcaataatatcccagtaagccatgtagtcgttcttcctcaccagctctttcttgattgctgctttggcctgatacaatccagcgtaaacataccccatagatggcctcttattgctaccgactaacttaagaagatgcacaagtggttcggtgatgcgaaccactgcagcacacgaagaccaaaactgcaaattgccaataagattggtcacttcaaccccaccaggtttctttggcagcaagtagtgaatccattcatctgagctaatcatggcttccaaagaatcctttagattgtacatgttcttcagtgtgacaaagttcatagcagcacgagtttctgcaggaactagcagatctttcccatgaagatgccttttcatcaagttaaatgcaaatgcgctgttatagataaatcccgtaatgacctttgcattacatatgatctcattgattgcccccaccttactgaaatcttcaagcatcccatcgatgcactggaaagagcattgagaccagaacaatgtaggaaaagtttcgcatagcctctttcctgccaccgcatgaatctcagaattgtttgtgattacttggacaacatttttctcaccaacttcctcaaccacattcttcagcaactcatacagcggatctgacgacacgacaatgtcagttgcatcgactgacttcagaaacatagtaccttccgggcaatacacagagaagtttattaatgttctgcctctgtcagtagtccactcatcggccaacaatgtgcaccctgtccgggtccatgatcccttgtagaactccaactgagcagtcacttcatccagcgacttcttcaatatggaaccacggaagtcgtgatacgagaacgcctcaggcttccctcctgctgaggcaacagcttcaagcataggctgaaagtaaacggaatttactgcctccagtgacacaccagcgtcatacaagaacctcccaattgccatataaacctgctccttgttcgagccgggctggtcaaaatgcatcagttgcgatgcagccgaatcaaacgccacgaccatctgatgaaaaggctgggtcagaccagcaggagtagactgaagaggctgctgattctgatgagcaaggggcgccgtggaggcttgcctcgcagccaatttctttctcttcttgctaatactccccttcatctccctggtctccggtggtgtctcctcgagtggaacggagcccaagtcgagcacctcgttgagcgggatcatgtggatggggctctccatctcggcggcatcggccggagccggcggagaggcggaggcggcggcggcgggagccgagtgggtgattcgcctgatgccctcggccagcgattgcttccgtttcttcttcgccgcgacggcgtcgaggctgtggagcatcgtctcctgcacctcgcggggcaccttggggcagcagcacgcgttgccggggcggttcgcgaggtgctccttgaagcggtggatgccgccgccgaggaagtgcttgtggcagtagacgcacttgagcctcacgcgccccgccgacctcaccatctggcagtgcttccacgccgggtcgtgcttctgcgcgccgatcggcagcaccacctccggccccgccgccacctccgcctccgcctccgacgccatctccgccgcgagcaaccaccctctcctgcatcgcaatacccatcaccacacccacactgttactaccatttccccgccattgccgcaaaaattcctaccatatgagcccaaccaactgcgaattcacacggattttacaccaacaaacttccattgaaacggcacagcccactccgaatcaaaacctcaaaccatttccagagacagagccacataatctcgtatcagaaggtgattttcctctcgagcaataccccccaaaacccacaaacccaaaggaagatggggacacgacaccctctcgcgtcaaatcaaatccctagtaatccccgattagccgacgacgccatcgcagaaaataaaccgaccaaaaccaagcaaaccagggcgaaccagatatgaaggggagagagagtgagattggggagaggcgagactcacccggcttttttttcgtgaaggcgaagcggccgccaccaaatcggaggggaccggagacggagccggaggcgaagcggatgaggaggagaaaaaaccaggaggcgacgcgagagaaaccagaggagagagagagagtgtgtgtggtggttagcctgtgagtgggagtggagccggtccggtcggtccggtggcccgttatacgtggatcccgggggttggggaaccggcccagccggttttggcgcgggtttggtccgggttagggtgaggctctgggctcagacactggaatcgggagttgtgggccgtgaacactttctgggcccgaacgggaatgcaacttacgtgcagcccatatagcagcataattacacaagcactgcatattaattcattcatgtaagattcatcatcgaaatgtcaaaattaaacccattttggccgcacgaaatgacaacatacactgtgtaacaggatatcatcttttactcccaaaaatttcacaagtgcagaacacacccaagacaccacaaacatcttataaagaggctggatgccctgaacttgtgagctgtatcacctaaactaacaatatctgagctaccatcaccttctgaagacaagaatgggtacatcaaatacctgcacacagacaaccaagcaggttgcgatggctataggtatcatgcatccaagaacatttgagtataagaaataacttcgtaagaacaccaagtcagttgcagatggctatagacctatagttgcagcagtatgatatgctatgctatcggtatcaaatggctcagctgagcccaagttccttcttcagcttctccaaagcagcctctatctcagatacgctatcatcaaagctacttgtcgatgtattaacatcttgcttgtttttgcctccagactgtgtgtacggatcatttgcattgtcttccgcatcacttgagtcatcgatcttgagttcgttctccagaaactcaacaaattcttcaccaatggcctgattgaccagaatgtaatagaattaatgggagattaccaccaatgaccataggcatgattagaagttgcagtatttatgtactattgattagtgttcactcccaacagtagatgtttacaataatacagtggaaaagacaggtaaagaacttactgccaactcttcccacaagcttttaggtttctgttctgaattcagaccggcttcccagttctgaaattctgcttgaagatctctaaggaaatcccctgcagatccatgaccacagtataatgtcaaataatggaacatttttagttcaactatctagtaactacacaccctagagttccatttatctactgaagtttcaaaatacaaggattatgatgtgatctaatctaccagttgtttcttagcagaaaggatctctcttgaaacttcattttactcatcactagcacgaaattcctaaccacagaaaccataatatagctcactaatgcagaagagaaggtattccagtaccaaagccatagaatggctcttcttcatcagctgaagtagtgctgctcttcccgtatgtcctggacgaataatatgtgttgctgctagtgctcgcgtacttggaccggctctctgaattcatgagcgtgttgtacgcatgcttgatccgcagaaatttctcttgcgcgttgggctacgttgacacaacatcaaacacaaataatcagtgaaacgcaaggaggtgacaaggtttgggggcggctgtggcacgcacctccttgttgacgtccgggtggaacttgagagcaagccgccggtacgcgcgcttgatctcttcgggcggcgccgacggaggcacgccgagcacgtcgtacggggactccccccggccgcctctgcccgcgccggcgcgggccctcacgctcgcacgccgccggcggcgaggcggcgcgggcgcaggagaggagaggcgcgtggaggggccatcgcgggaggaagctacggcgcggagaacgagaggcgacggcggagcagcgaagcggcggcgtgaggagcggagaggaagagggggatgcggagtggcggcctgaagctgcagcgccatggcgcaacgcaaccggagtccggaggtggatggggttgaaagaaaaaattgcttttgaatggctcgcagcgagccttcaactggagcagacagcatcaccaccgttcagatcacgcggccctggtggagcagtgaggatcggacggccatccttagctcacaataaataggcaaagccatgtgagaactgattaatccccagtcagccagtctacagattaccgacacatattatacaaagattgaattcacagagactcaaaatcaaatcgtggaagagataagtatctttcatcttcgtattttaatagcatcacagattacagatatccaaaaacctcaatacatccaagagctcaggacaggattaaaatgcagagaatttcagcagattgcaaatatgtaggatctttttaaggttaagtctagagaattgcataagcgaaaaactaagcaatcccaacaagtctaggaagacggtccagggcctagcagcaatggtggatccttcttggcgctctcagactctgaatcttctttgggaggtggccttgatgctgcccaagcgcgaagcggcggctcaaacatgctgccaacgacatccggtggtggctgttgaggtgcatcctctccaggaagcacaacaagacccttctccctgagagacgacggctcgttgtaacactccttccagagggagtccacaagctgtcgctcctcacgatgtgcggagagatcgtcggcatccattgtgctgatgccttcgattcggctcttaaggacatctttcagcttgtcttggtcaggtagcacgtttccagcaccggatgtattgtcccgcgccagctcgagaagaccacctaaggcagcctcccggactccagaatcatcactcgatgccaggtgcatcatcagctttggaagaccaagctctgtagcaacactcctatcagccttgttgtcgtgcagtaggtactgtaggagatggagagctttcctggaattaataaagcagaaatgttatgaaaattgcaggtttgcattgcattgtttaactgcagcaaaaaataagtcatgtgaatgagatcaaaaaaaaaatcagtactacaggtaggcgcagccaaatagttacttcacttattggaaaaatgttgtgggctaagtttagaagtaaatatgtgctaggctatgctatcatatatggctaagctatcaaggccacgcatagtcctattgttcaacaagtataaataccatgaagaaagaacatagtgcaatgttagtgtcctactagctcccctgattatcatacaacatacctctgaagtctagcatcatcagaaccaagagcgtctctcagtgcagagtagccatttcccaggcggaatgcagcaactcctggctggttatgacgaattagagctgcaagacagtagtagaaacctctagttagcatatgtaattgaagcaattatgttctaggtcatggcaaagcaccaggtttattacagaagcaaatgacttacatgatattgctccaagagcttttgtgcgtgaattcgtgcttgcatcggaactgaagtttgtcaacagtggctccaggccattagattccatgacaagttgctggctcttggggttattttgcacaatcgtgctcacaacctctgcagcctttgctctgatgccagcatgtgaatttttcaagtaaccaagtaggggatctaatccaccaatagagtgcagatctggtggggtaatgcaatcatgttaaaattctttgcagtcaagagaataacatctacaaatgcagaagtacagtaaccatgattcttaccatttgccatgtcaatggattcaacatgctcctgtaactcatccaacatatctgaaaacaaagtaataattcattgatcagtgaaactgagaaaatctatcaatcccattctagggagggttttatatgttaatgttgaactgttaaggataatatgaaatgaaaagtgaaaactgtaggaaataggcaaaacaaaaacggaattcataattgcattgtccctaaaggaaccttacgtgtgagaatcagccactacaaatttacgttactagttatgtgtacgccagcccccacaataagcatatctaatgcacaataatagaaatatgattacttgcagatgctaccaaaaaaaatacttaacaaaaattactagccatgattttgtaaactttcttcagctagtgtttccgcactcctacaatcccaaaaattctacaagttgtataaatatgaaggaaatgctacaaggtggccaataaataatgaagagtgctgagcgtatatgaaattcattgttcacgtctacaacaagcaggtaattttagaaaatgaaaacactcaaaatgataccttcgatgttctctggagtcacaccttgagactgtagtacatcatctggagttttcatcacttgggtgatctccttcatcctcttaacaacatccattgtattagcttgcattgcctccataaaccatttcttgtcctcctcactgcaacccaaacaaatcatgataacagtgaacaatatgaacatgttttggcatgccacagatcgattgcacattccaaccactgcacataggtatcatttgcgcaaatttctgacatgacagctaacatgtcagtgttaataaaggagtaatttagcaggaaatatgagatgattcatcataatttaacgagcgaatttgcacatgaattagcagtctacaagtgatattgtgctagcgcatgtatacctgcagactacagtagaacaaacaccctatctcaaacctaaactaaactaaacacgcctaattccagagtacctagaagcacatcgatctagcgccccccgccagaacaaccccacagcttaacgcagccccttactcgaactgaaaggagatctcgctcgagcgggagcagcatacctgagcgagcgcggcttggcggtgccgtcgccatgggcgaggctccacttgagcaggccgttccagtcgggccctcctccgtccttggccatctcctcctctaccaactccggcgagggttcacggcgagacagttggttcaggcgtcggtgcgcggcggcgggaaaagacgaagcagcacaagcctcctcctcttcctcgccctcgtcctcccccttttatgggagggagaggtctcctcctctcgtcagtcgaggcgtcgtcgagagagacgggggacgcggcggcggaggagtccggagtgttcctgaacctacgcttcgcctcctcaggtggaaaaggcgtcttgggccgggccgtcttttggttccccacgtcgtcattgggcccacctagtcagatcctttctttggtgggcccggattacgaaaaggaaataagttcatcaaaggtcccttagcttatcaacgaatcatatttttgtccttcaaccgaaaactagatacaacaagtcccttaattgtcaaaaccggtggtcccatggcggtttgaacaacgatttaagctgacgtgacgtctacatggcaaatttgattcggtcttcatttaatgtggcggtcacgtgacactggaagcaaaaatatgataaataattttattttacaattgtggggcccacatgtcggtaagacaaatgataaaaattagtgatccccgttctcctctctatctccagcgacacctcattccccttctcccccttttcactggccgcttcgtcctcgactacttctttctagctgtggcaccggctgctacgagaaggcggcggtgtggaggcttcaacgaccagtcggaagccatgatggcctcgaggtcggtggccatggtgcgctcggccctgaggatggggtcggcagcagggatgaaaattagttggaaaaagtacaccgaaggtcccttaacttgtcatcgagttacaaaatcgtccctcgaccacaaaaccagataccggacgttccctcaactaacaaaaccgttcactttagatcctcctatgattttgacccgttcacttcagatcctcctgtgattttgaccctggttttgtcctacatgacggcttagtcagcgttgaacccaggtgggccccatatgtcagcattaccacatcagccttctctctcttttcttctcttctctcccatcctcatctctctctctctccgttctctgcggcaatgcgaggcgggagaggaggaggccgtcggcgaccggcgacctgcagccggagaccggcgacgcagcgacgggcgacgcggcggcgggggaaggggcggcgcgcgggcggccgggagaggcgcggcgcgcgggtggcaggggaaggagcggcacgcgggctcccccgccggccaccacccatgaggcccacgaggcggcggcgggggacgagctgcgggcgggcggcgggagaggaggagcacgaggcaacctcctcgtgaaatacatactctccatcacgcgtgacatacgtactctgcatctgattctgtacatgatggggtagcaaaataactagctctgaaaattttgttcagaacatgtagtggtgcttgtggtcgatcttggtgttgcttctccggcggtggtgggaagagctagagatagaagaagcagtagggtcggggaagccgatgtcgtggacggcgccaacggtgttgaagaagaggcgcttgttgagctcctccaccagcgtcctgtgcagcagctggctccgcatgtccaccatcgacctgttccgactcatcctcccccgccgctgctcctcctctccgccaccctctcgctgccgcggccgtccggcgtgccctcctcctccgtcttcagatgcagaggctggccctctctcgccggccgcgcgccgccccttcccgccgcccgcccgcagctcgtcccccgccgccgcctcgtgggccgcggccggcgggggagcccgcgcgccgccccttccctcgccgccacgtctcccgtcgccggccgtcggtcggcgacgccctcctcctctcccgtctcgcattgctgtagagaacggagagagagagatgaggatgggagagaagagaggaaaagagagaaggttgatgtggcaaatgctgacatgtgggtcccacgttgacttagccgccatgtaagataaaaccagggtcaaaaccaccggacaaccgaacaacctaaagtgaacggttttagttgagggatgtccggtatttttgcggttgggggacgattttgtaactcgatgacaagttgagggaccttcggtgtgattttttcaagttagtttcggcgtaaagttaagggttctcaaatgaaccaattccttacgaaaacaataggcccattattgagttagtacattgaggcccaaatttgtagtgaacatctttatgggctgatcaatcgattgttcgcgaccttttggagtcttttggagttttgggcaaggacgcgcgctgggcgctgctggctgtggcacctgggacgttcgtgaaacctgcacgaaagcagctcgccgctcaacgcttttgatgcgatttcgacacgaaaacaacgaagcgtcgggagaaatcggcacgtcccatagtttaagcagatgaactagcgaaccatagaatcgaagatgccgcactttgcagttccgtttcatacaacatcacatagcagaaggtagtgttagcacaagtcacatttcagaagttcaggaacatttttttcccattttctgaacttggaataacatgtacatagatacatagggtttttttccccctgctaaattaacaggatttcacacgcagggcggtagatagatacagctacttcccatcacaaaagcagaacagcaaatgcacatccatcttgctccacaaaaaaaaccaccaaacaagatgcaactgcagagttagcagcaatccctacacaaaaggctaaagctgtactagtaacactactataatgtaggagtagcagcaaccaacacactgtgcgtgctgctgcacggagactgggcgcagcagcactacgcgcagctggacgcctgcctccgcggcggcgcgagcacgaagagcgactcgaggtccggcggctggaagtacccgcccttgggcggctcccgccgctccttccccagctccggcagcgccaccggcctcttcctcggcggcgccgggcactgcggcggcaccaccgggatgcggcactcctccctcctcggcgtctcccacccctgcagctcctcctcctccatcgccgccgccacctcctctccgtgccccatctccacctccattgcctctctcgatcgctactcctaagcaaagatttgaaatggcgaagctatgcaagcaaagcaagcaaccacgcttaagctaatatagaagtgagtgccaccgcggtgggtggtgatgtgcagcaacgaagcgacgaggagagtggagtggagtccagcggcgttgcgggtggcgggaagggacgcgccccgcggaatctactcgtttaccgaatgactagtgggaccaggtcatgtagggacccacttgtcagtgggaaaggtgtgaggtcgctggtggtgggaggggggttgggagagttacgtggcaccgactcgcgaatgcgcgggaaccgcgtcggtcgaaagtggcggaatggtctagagctccgccgcggattctctgtgccaaacccgcacgaacgccgcaggttgagcttgagctttcaggtcactgcacttgggagcctctctttgaagcccaacagttctcaattcctatatactccaacagtagtacggtttaattcaaaaaacaaaaactcggtagctgaaagtactcttgacacaatgctgccgactgtcttttagcttaaagtaactatatgttgctttaaaaaattggctatggcatttattaaaaaaaaagaacaaaaaaactgttagtttagcggcgatcattgcacatctgggacctgcaagtccaactgcctggccctcgaacgctcctacgctacgctcctaccctaccaatggggcaaccacagttttgcatgtccaatatcgtggttgcagtggatccagctttagctcagtagttcaaactcagcctcaaacattgattactcaggacgaaccatggataggctagaaaaatggtctgcaatggaaatatggaatggtagtggagcatatctcttcggaaagtgggctccatctctcctctcgccggagtacgaccaagctgtgggcggcggcgtgacacgtggagcccgtcccgtacgtcgccgggccatgagaaagtggatgccagcgtggcgcgaccgagaagccgcggcctgcaccggcggagcacacgccatgcatgaccggatgatgattaaactgggccacaagcccacgagtactagataagttcactgttttttcagatggaatagttcaatgtgatctggaaaaagattcgaacttttcaaagggggtcctaattcatttgcatttccttcacacagaacaaagctaaaagcaaaactttactttgatgcctaaatcaactaatataggttgctcactttgatgtctaaatcaacattaccaaattttggtagtaacaaattttggcattaccaatgtttgataaggataagggtgtgtttatagttctttggatgtaaaaactttgaaatatgcgaacacacatttgaagtattaaacatagactaataacaaaacaaattacagattcccgcctgtaaactgcgagacgaatttattgcctaattaattcatcattagcaaatgtttactgtagcatcacattgtcaaatgtaatcagacacaaaagaattgtctcgcaatttacatgcaaattgtacaattgttttttttccaacatttaatgctccatgcatgtgtccaaacattagatgtggcatttttggccaaaatttttttggaatctgataaggccaaagaagagtaagttgtgcgaaaagattctagaattatgaaaatttggtaatggaggcaacttttggcattgtttagattgttaccttgccaaaacttggtaaggttagtttcggcaacaaagggaacactgcatcaatgattgttcatgaacgggcttcatgcttttctatttagcaaatggcctttcttgaaaagattaccggaaaagtatacactgcttgcctgataccaaggcctgaaagtgtggcgacaggggtgcacaagaaaaattgctaatcaaatcagttcaacaaagattcaaatgtgtcagcactgcttcttcattctattatttctaccgtaaaccttcacagaccatgaaaatctccctcgaactagatcttgtcgccttgggtctcaataaggacactttcttgaacttctctttgcaaaatttgccaaaacctacaaagttaacagtttaatgaataataagttatacttggtgtcttgttaggatttttttaaaaaagaatagctagcatatagaagatgattgctggtcataacctggtatatcctcattctcaagaaacttaattacaaggctgcctccacgacggagaatgccatcttcatcaggatctggctcagtggagctctgaaacttctctaaaattgcaatgcaatctgaatcttttgctttcatcttaccaactgccaatgaaagagcacgcatgcccagctcgcaagatatagccgcatctttggttgtaattccagaaactactgggcacatgtctgacaatattacagagaatcctcgttcctgtaaaataagggaatcaaataaccaatggcgattacagggcaatacaattggtaatccttgcttcagcctttctaaccataggaaataagatattcagatgaagcgagcttggtagtgggaagattgatgaaaccatgtttcgtagtctatcagcgtgcgtactaaagtaaactcagcttttctcaagttacaaccttatgtggtagtgttcccagttgacaaattgatatttggaggcaaaactgaataaatacacgtttacctccacaactggtggcatcatattttatttagctagtagcagaaccactttatcaggttccatcgtgcctaccgacaaatagggtacataccttttatctttgaaagaaaggaatttcatgggaatttttggtacctagctcttcccaaggaatgaaaaggaggcatgcattttctggtaaaacattagtagcatctgtcatttgtacaaactaatactccctctatcccagaatataaggattgaatggtgaagggttgtgattggtttgataagagaatattggtgaagaagttattatattttgggacaaatctagagaactgaaagttgtaatattttgggacgaggggagtagttcacttgtcgcaagtaccactagtcaccaataatcctcggtgcgaaccttccaagactgttttcctttgcaaagatcatgagtctcaatcgaatacatatggagttcagttagtactaagatttcacaaattagaataaaccaaactagattgcagcctcggatcaaacgaaactaatttgtataacttcgtaccattccttccacgaactaagccagggaaatcggtagtaaaagctgaatcatatcatgatcattagcaagctatcgaacctgtggcgacattgcccgagcttgctgcttcatcagagccatcacatcggcgcaaacggtcctgaccctcgagtcacagtgcgcagatggaaccttcaccttctgctctgcaacaaccgagcatcgaatcaggccaaccattccgtcggcaaaatcagcctcactaacgaacggcaactcgatcgccactgaccttgacatcgacgccgacgatcaccccgcccttctcgagcggacccaggttctggcacgccacctacacaatgcaacaccgagctaaatcgaaatcgcgctgatgagaggagaggaggggatccaacgtcacctggagccacgcgccgggggcgcagccgaggtcgaggacggcggcgccgggggcgatgagcttgtgctgcttctgtatctggatcagctgcgacgggcagagcaagcggctcctcgcgtgagacgggagcagttggcaaaccgtacgagcgagaggggtgaggaggaaggcgctgaccttgaacgcggagcgggcgacgtagccgaggcgctgcgcctcgcggtagaagaagtcggcggtgccgcccgcgccgctcatggcttcctctccggccggcggcggcggcggtgacggtggcgaaggtgaagacgacggaggcggaggggattgctagggttttagcccgtcttcgcggcccaacacacaagtgaaacccaagcagcttgtttgctgggccggacgaggcgagcaaagcgtgacgtggccaccttccccgccgcgcgcactcttggcatgcgcgagcgcgacccctccccctcgaaccgccgcgaccttctcgatgcttcccaaatcctcctcctcgtgaactcgtcgccttcgtcttcgtctcgatctccatggcggactcgagcgcggcccgccccaccgtcctcgtcaccggcgccggcggccgcacaggtgggtactcctccgtcctccctgtggcctccgactgcgatatgaatcccagtagcgcgctctccagtacttctttttttttttgggggggggggggggggggtattggagcaaactgatgacagcggaatttggaatttgcctgttgtgcaaggttcgtgcgatctacagtacatgcttgttatatgatggggaattttggatccagtagagcgttctgaaaaggaattttggtcggaatgggattcatgtaatgtgttgcagtatcttgatcttctctaggataagagactttgtatcgcatggctgctagtcatatgatgagttgaatttgcaaggtttgtaaaattcacctagggcttaggcacgagtggggcttcttgggtactgattaacccattctagtttagctcaatgaactgaatatactatttggacttggaaaactgaaatttagtcgattaattgaagtgggtcaatgggtatccacagagcaacccacgccaaacccggaattcacccaatatgagtgcatgtgcctaagattttttgcaactatatggatgtatactgactgctcgacactatgtagtctgtactaatcctcaagggttactccttgtaacttgtcaggaaacattgtctacaacaagctcaaggaaaggtctgaccagtttgttgtgagaggtttagtgagaacagaggaaagcaaacaaaagattggtggaggcaatgatgtttacattgccgacataagggacagagatcatcttgtgcctgctgttcaaggtgtcgatgcgctcataatcctcacgagtgctgtgccaaagatgaaacctggttttgaccctagcaaaggtgggaggcctgagttttactatgaagatggaatgtatcctgagcaggttggctgattgaaacccctctagttaatatatagaatgtgattgtaaacttctgagctcatgctaatacttgctgtggtctgttaggtggattggattggccaaaagaatcagattgacactggtaaggttgttgcttattcttcttcatcattcatgtatcagtttgtaaatgtttgttaagtgaacattgcttgttttaacagccaaagctgctggagtgaagcatatcgtgcttgtgggatccatgggaggaacaaatcctaaccatccactgaacagcctaggcaatggcaatatactggtaagctgatggagtttgctagttctttttctataataagtcatacagcaaactttttggttcaagctttcaatagaactggtagattgtttccctctatcttaataacatttggatgacctccttcggtcatcccggcaaatagagtggtagattggtagaaaatgatctggccaccttaaatggttagcaagggaaaaccaaaaatacgagtgccaaactgtatgatattatcttacaaatgaactttccacattgctgatatcaccttattggatattccttgatatggccttatttatttgttataggtttggaagcgcaagtcagaacagtatttggcagacagtggagtcccttatacaataataaggtaccacctgcataagacaagaagccatacgtaatagcctgactaattggtccggttggcttaattcgctttgttcttgaaacttaggaaatgtttgattttccaccacaataggcctgatttgctacttcattgtcaatgatactaagccaattcgtatatgtgaaaaatataatatgttgtgtgtatcttccatcacttccatgtaggcctggtggtctgcaagacaaagacgggggagtgagggagttgattgttggcaatgacgatgaacttctccagacagacacgaagtcaattccaagagctgatgttgctgaagtttgtgttcaggtatgatctttgtggtcaatacagtgatagtttatctttgagtttacttagctaagttttccggcgatgaagcattgatgcatcggccatacgtttctactttctgtcaacaagcaccgtgaaaaaatatggatagtcacatggtgaacttaccattctgattgcaaacttttccccttataataggccctgcagtatgaagagacaaagttcaaggcatttgatttggcttcaaagcctgaaggcacaggcacaccaacaaaagacttcaaatcgttgttctcccaggttacagcccgattttgagccatcttgaggagcaatctcatctcggtttccttgtgtattggatatttggatgtatatcttcgtggttagtgaggtgtgaagttgtagtttgctgtaattcgtcatcgtttcctgaaaactcctattgaaatcagtgaattgttcagacaagacacaaattgatattattcaaggacatgatgtctttttaaaatgaaatccttgcgctgttataaacttctggcatggactgtggagtcagcctgcaaagggggcggatcgggccgacccatcccctataccctctgaccctatctatcttggtgcctgagttcgccccgtctctggtggaagtggagccggcccgttaggttcgtggccgacccaccgtagccgcgggccggatgcactaagcgtctgagccaccgtgtccagtgaatggttgactggctgtgttaatgtgttatcagtgaaccattaaagcaagtagctatacgtcaattcaattatacaagattcaaaaataatatgaacaatcattttatattaaactgatatcatttttgtactatactaattttatataagtcagatatcaagtgaaataaggaaacaaaaacacatacactagcatgatatctgaacacatactaacatactagaaatttcggttgtgcgaagcaaatcaacagcactacagcaaaataaataaataatcaaaaaccataccagaacacactgtatacccaatgcaaacattccgaaatgacttaatcttttgcattcaaaagtacaaacatcaatcactgggtactggcacccagttcaattaaaactaagtacatgcatgtactcatatcattcacaaaaatcgatttgaacaacccaaatatccggttcattatattgagatcaaacaaaatgcagccttccaagatcaaagtgggcatcatttggcattccctagcttgcactgttcgttgaatcacccaggtccagattctgcaggttaacatgatggagagatcgaatgatcatggtataataacaggaagaaaatatacaataattgttttaaaaaggtaataacctgcaatatctctcagaaaaagaaatggtgcatttatgttttatgggcaacaactgaatcaaagacatgagcatatgcagacagacagaggaatcaacgcagtaggtgttctaagcatttgagtatttgacatataaaacatgcttgaaaaacagaagtaatctgcagtcactcaatagtattcacaatcagagattaaggaatacaagaatcatctaacaagtgctacacaaattttgcagattttactaattttcttcatttatctagcagtagtgcagtacagtctatttttaggctatcgttttatttcagaaagcagagcattgcaataccagaaatgaggtttattccttttgtacatctagagcttctcatatgttgtacaagagttgaactagctcagattataaatagtataatacaagttcatgatagattactaaccatcaatatccagatcctttgtttgggcattcacaagcttccaccatcctgtccatccatggaatcctccaggtccaggttctatagataaagatgaatacatgatagagacattgaaacttcatattccaattttacagaaagctagcaagtaggacaacaaacccatataggcattgttcaatactggataaatagaaagagaaaagctggaagagatcttgcaagcaatcaagcaaatactgaataaatagacatctttctctttcagaaaattaaatagacagatgataagaagagcacaagcaatttactaaccacaaaattatcactgtagttgatttcatttactgagctcacatttatgttaggacctagcaatcaaaacataaaaataaattagttttagcaagataaatactagaagtaaatgaacgagggcagtcgtgtataccggcagaagctcgaaaccaatcttggaggcagataagcgcctcaactgaatccattgtaaggctacatctgaaatcgctgatcactctagatcctgtgctgaatgcggactcagatgcaactgttgaagcaggccatgctagcacatcctgtgctatgcaagcgagagttggatactttgagtgattggtcttccaccaatttagaatgtcaaatttgttcccaaattcctgaataggattctctttgaggtagatatccaattcagtatcaacttgctcacttcattgttcagagatgtgttgaacccaatcagccataggatcattttcagagatagccatcacatgttcagcttggcgcagtgggttagcattgctatccttgagtttatcagagtactccttaaacaacatgttcattctcttcttaactttgtcaatcctctctttagcattttcaccaaaggcttgcccaagccgaaattccacaaaattgaatttgaatcttgggtcaaaaatgacaggaatgcacagatatttgtaagacttaagccaatacttgtcaaatttgtccttcatcttttgaaccatacttgccacttcagtgtcattgttagagtgttccttgtccaagaccaatttgattttccacatctcatggaaataaaggtttgatgttggatataaagatccagacaccaccatagttgcatcataaagcaccttcaaaattccagagactatggttgatctttcccactgatcaggagagggtgcatatttgtaatttttgtcttgaacagccaatgaagcataagccctcatgaaagggaaggctgcattgagcattagatatgtggagttccaacgagtacatacatccacagtgggatgcaactcgcatgtgatcccttcttgggcaatgatctcctcaaacttttctttgcgagatagggaattatccctgtacttcacactttcacggatgttgcaaacaatagaatcaataaccttcaacccatctttggctatgagattgatgacatgtgttgcacatcggttgtgaagtagcttccctcctgctggtatagttttcttagctttcaaattgcactttaacaacttagccattgaatcattggctgaagcataatccaaagtaacactgaatattttgtctgcgatattccaatcttgaatgcagctgagcatagcattgaacatctgcactccagtatgaggtgtctttactccaaagaactttataatcctcttctgtactctccaatctgtgtcaatgaaatgacatgtcacacacatgtatcccattgtttggttcgaagtccacatatctgcagtcaatgagaacctacaatttgcacccttgaacatgtccttcattgctaacttttgctctttaaaagcagcgatgcaatcattccttatagttgttctcgaaataatcttgaagtaggggttaagactagcagcaaaacttctaaatccatcatactccacaaactggaagggcaactcatgtaatacaatcattcgcatgagctcttttctagaaacttcaggatcaaagctccaattctttaaccttacactattaggagacataagtgtagagtcaagatttcccacaatcttaagagcactaattcgcttcttgcatcttgtcaaatgcttcctcaatgaacttgttcccgctccacgctttgcacggatctctgtatcacagtgcttacattttcctgcaccaacttcattatcaatgagtatcggcacaaactctttccaagcctcagatctgaatttccttgttaaagcttgtattactggattcacatgctcatctacaggaccaacttgttcagagtcactatcaccatcacccatctcaatatcttcaccactgttagtgccaagtccaaaaaatgcgttgggtgtccgcatttcctcacttgaaacaaagcaacgaacaacacaaatgtatcatttgccatctaaaataattttctatcacataatgtatggaaaggaaattttggtgtaaaaatctgcacaacagcatgttgtcagaagcatgcaaaaatgctacttattcagtgtttcgttcagtatatcctgaatattgagaaaatccaggttatatagagacaaagtaaaagaccatctattttacacaaggcagtaggaaactttaaattagcagtaactgaaactttctcctgaatggcatgaaagcaaaatgaaactttttcctggcatacaaatctgggcctagcaaaatggcatgaaagcctagctataacagtcactgaaactttctcctgaatgagacactatatatacaaatcaaaccaaaaccgagcaagacagatgaacaagacagggttcatggaggaaatcatacttgtgctcacgagttagagaaacccagctggaagaaggtggcgatgtggccgggtgtcctccgaaaccctcgccgttgctgccggtggagtgtcctccggagcacctcgccggttggccaccaagcaggtagccgccgcccgccggtgcctccatccgccgccgaaagaaggaactgcatagaagaggaactaaagaatcaagaaccaaagaaaataaaaagaaaatcaagaaccaaagaatccgttgctagttgctatgatgtgaaccacagtaccagtcttggggggagttggagatgggaggaggactgaaggagcacgcccagccgccgccgcctcaacccgcggtggagcacaccgcgaagccgaagctgccgccgccgccacctcgatccgcggtggagctgcgccgacaccgctgccgcctccgctgggagccaccgccgccggctcgatccgccgtggagccgcaccgccgcaggccgggagccctaaagccgccgccgccatttgaacgcgagcaagtggagcgctcgaacaaggccgacccaaaaacccctagggtcaactgactcctggacccattatcacctaagaaaatatgggccggcccgaaaacctattggtgccacaaatttaggttcgggccacggacctaacgggtcgacccgccccacttgcaggctgtgtggagtggtcatgtgtgcattggacagaaatgaagtcggaatatgtcctgtttttcattgcaagtattgtactacagaaggaagaaaaatcattttggcatcgcctcgtgtagataggccttcacacagtcacgcagcccacagcccaaggcccgcacaacgccgggtcatcatgcccatgtcacaagtcaacagtcacgagctactcacattaaggatgaaaatgttttaagacgatatcatttctactgaaacgattcttgctcggtcaaaaaatttcatacatacgaattttgctattttaacagtgatgaaacttatatataactagaatctttgcgggtcaggaaatttttacgtcacagttttcatgtacccttggtggttcgatgcttggaagataggtcaagtgacgtttgctggttccggccggcgacgacgaccttagcgtttgtcccttgcccgaccgcttttcgtctcgatcggcaggggtaccaaccactcaaccagtcgtcactcgtcagaacgcaagccgcagatcgatcaaaaccttgctgcttgagctgcgtgctgtactgcactgcagctcatcgggtcaaagcaaactatctcgctgcggtcacggcggtgatctggcctgatcagatcatattgccgccgtgtccacgccggtcaattcctactccccatgagatgataagatgatgagatgagatgagatgagatgagatgagctaggccgcgcgcgctgcctgcgacgagatggcaacaagtgcgtcgcgccaaatgctcccgttcggctacctcctcctgatactaattactactactccagctagctgcaggcagcatatgtatcagtgacacgtacgccaacttgcaacccgccaggtagagtagaaccagtgacacagcttcgcctggaccaaacatcaaggcaaaatggtactgcttgcacattggagaatttggacacacctacctagtcccacacggattcatcctaaaacaaacaaactttcttcaattcagattcgtaatactgtaatatattgcatcttaaatttatatttcatataaaatttgtttattcaaatttatatttcatactaaatctgtttattttcaaacaaagagaaaacttactagtaatagcacgatagaagaagatagaggaagacaacagcctgcacttgatgacagtttgatcattcgcatataataacagtatcacacaatcgctcatgttacaccattagtcaagtcaacgcgcccccattttcaaaataagatggtgtttgaaactcatgtggataaagattaagtattttacataaaacggggtgctatattaattaaattgtaattattataaacttgaaaaatatgtttatgatattttgaagcagcttttatatagaagttttttacacgaaacgtaccgtttaacagtttaaaaaacatggcacgaatatctaaatttttatccaacttttattagagaaaagaacggggcctagacagttctctctttcacttgatccacaccctgttgccggttattttcccctgaactgcatgccctagtgtctgaacccatgaccctcaagtctcacggcatgcatgtgctctgctctgcatccaggcacaagaataatcatcagtcataagaagcaaacacaagctagctcagggcaaaacacctaacacgtactcccaatcctactactgcaggcgcgacttaaattgcagacaagcaaacaggtcaaccccttaccaatctgtccaggcacgcagcgtccggcggtgctaggctgctagctaattacagtcatcaaggaaccgtgacctaacacaatcttattagtggacacaaaattaagaggccagctgcatgctgcagcctctgcatacatcatcctgcaggagatagccatatggaaagtatcatgaattcatgagagctcgatgatgcgcagccaaagcagatccggcacatggcctgggctcaaggcttgctgcagtgtgcagtagtaaggtttcagagtttcaccgaaacaacaacgttagtcaatgctcgatcgataaacttgcagtctcttgcagagtgcagactcgatccatctctgctttgacgaccatcaacgccctatccgtcagttccagatatgctaacatactactactgatattaattttctaccggacatctcagtgtgatccaagcatcgcaatacaatactctctgtgtgcacggcacgcgacctatgttaatactatgtggaaacagctctgaattgttccgaattaatggtcaccattgacatgctcaatgaagaggtctgaccatcagggatagatcgatcgacgcagtgtgaaatgtatgaagaaatgagaaacacagatgcgtcggtgccaacgcatttgtcagtttcacaacaagttgaatcgaaatgaatgctacctgaacactaatgcattacagctttgatatactcctatagtgttgtactcgtactatatgagtacttgtactacttcctcaaaaggtcgcgtaaaagctatactagctgcgtcttcttcttcgcatttgcttgccgtgatcgggcgggaatttttttatcagtttccctttgttctcatcgtggatcggaaaagcgacggcatgatcgatccacaactactactgctgcgatagtacgtacatgagtcgggttccgaggcgagagaaaggcgaaagtagcacgtacgttctccgcttcttccttttgattggaacttcgcttgcccttctgtttggctttatctactccctctgtcaaaaaaatataaatcatgggtttttttgtccaacgtttgaccatccgtcttatttaaaaaaagtatgaaaaaaattaaaaagacaagtcacgcataaagtattaatcatgttttatcatctaacaataatgaaaatactaattataaaaatattttatataagacgaatagacaaacgttggacacgaagaacgaagaaccatagtttgttttttaggacggagggagtatatcttcgagtcatatcatctactactgcgtcttttatatgggaaatacttccccatctataaatatactctctcaatttcatattataaatcatttgattttttttctaattaaattttattaagtttaaccaaatttatagataaatttaacaacatctaaaaaattaaattaatttcattaaatttaatattaaatatattttgatggtatgtttattttgtgttaaaaatactactatattttttttataaatttaatcaaacttaaagaaatttaactaagaaaaagttaaacaacttataatatgaaacgagtggagtagtatgttcatcctaaaataattttactttttatttatcccatacatatcattacaatatgtgctataataccatttcctttaccaaattctaatgcatttatctcctactttatatatatgcttctaatgtatttatctcgtacttttaaaaactctaatacaacaattgcttggaattaagatgaacttaatttaggatggagggagtagcaatttaattaagatcggatagaatacatctcaatacttttaattaaatttatagtaatatgatgcgtcctacttttagattactgtatgttgggaaaggagtatgcacgtaatcctatagcaaacgagaacgactagtactcttctttcagctacgtcgtctacgtgatgtgatgaaatgaagaagatatgggatggttaggccgcaattcttgtagctagagtcgtcaacttgtcagacaactagtatgtccatatgcatgtttgctcggttacctagaggccaacccccaccttgatctgtccaacaaatagccgaaaagttcagagttagggtttgttcacatccatctactagctccttactgccgtctccttttactgtgctgccacaagtctacaacactacaatcgtcaggtcaaatcgttccaactttgccaaggaaaactccaaaagcaaggtacttaaggccatatttttttcagcttaagattattataatccagattattgagagtaagctgaaagaaacagacaacttattgaagtagcttattataatctggagcccagcttattattatttgataagctcatttaggtgagctttttccagattattaagtgaaaaattacccaccatgccaccccactccctttttagacttgcaaacccaataatctaggctctaataattcaggaaagaaacaactaaccacttattctactataaattataacaatctagcttatagtaatctgagtcaataatctagattataataatcctaaactgaaagaaacagtggcctaaatcctactactgatttggtcccattagccgcggcgaaggcggagttcatatatcaaaagtgaaagaagagttttgtgtgcagtgcagtggcttccgtttattcgaccaacagcacgagattgccatcacatggctagttgatctaccagaagaggagtcctagtagaagatatggcctactcctagtacaacaacaacaccttaacctttcacgaggctgcaaccaaccaccctgggtggctggtgctgtagtagcctagtagagctgaccaacggcggcagcaatgattgacgacgagtaaagtaaatcgccgtacaactctacgtactatgagctcagagttgacttgttttcttgccggtaaaacgcacccaaccctgcatcgcgttgcatctgatcgagtgggcatcaccagcgagctgaggctgcaaatgagatcaaccgaagcgtagatgcaaagcaaccacacatatatatcagactatcagtagtggtacatacatagactgtagtagtagatggagatgggcataataaactcggtggccggatgcgaccaaggaaacggttagagatggtgcgggttttgctcggtcaccagccacatgcgcccgcgtacgtggccgagacagcgcggcgggcgtacgctagctgcgttagtacgtgtgccccgcccccgcgcgtcgccatcgcattcacgcgccgatcgatcgagccacggggggttctcgcgctcgcgcacgtacagtctacttaccaaaccccagccaagacgccccgtcgcgttgcgcccatcgcgccgcgtcgggaggtgcgggcgcgcaccggccgcctgtctcgcgcgcgcgcgcacatcgcgacgtacgttacgttggtgcgatacgtacgtggcccgcggagggcgaccgcgacggctcacttgccgggctctcgctcgatcgggcgccgtcttgtgctggccttggcctgatagctactccagtcgcgacttggtaggtggatttgtacgtactactacttcgttcgtagtggtgtcgtcagcaaagtgcaaaatgcagctactgaaatttacagaggatgcacaaatgcaagggaaaaaaacgtgagcacttttcgtcgcggttgtgattaaaagagagggcgtgtcacgcactcacgtctcacggcacgcacccaccgcgagaggctagcggagaggaagacgtatcccgtttggggtgacccatgcgtacctacctaatccctccgtctaaaaaaactcaattcttaagttgccgtgtacaacatttaactatttatcttatatgaattttttctataattagtatttttattgttgttagatgataaaacatggataatattttttgtgtgacttatttttaatattttttaaaaataatacggacgttcaaacgctagacacgaaaatccaaaaattgagttttttttagagggaggatatgcgagacccatcgaccgtaccatttatatacgcaggcgtgcgtcacgcatacgcagtaaataggcatggaggctcactgctttgaagtgcgggtggaagagggaggagggaggctcgatggatggatgggtgtttgttcaggcgcgcggcgggaccgggcgcggcgcgggcgggcgtgccatgtgtgcggggagatcaattctggtgcggtttcgaggctcgaggtgggggcacaccggcgtggaagggtgggtgtgtacgggcaaagtcaccaaaccgaacaagggctccatcccgcgcacgcggaggaatccgagggcgccgtctgtgcctgtgcccctgcgcgtcctccactgtctacgatgtgcatggggcgcacctcatcgtgttgaaatgcaaggctgcattatccacggtttcaaccgtagcaatgagggtttacccttgtattggctcttccactttacatcccgtacgtgcatgcgctagtagcggtaggtagcaggaataggtggttgatcttataaaatctagatttcaaaaataactaactatgggctttggcatataaaacgatcctgacaaactagcacaatttgatgatcaatagtaggttcgactaatcgacatgtggtgttggattattgagatcaactgctgacgtctagtgagaatggatatggttgctttacattgctaccgtcgaacatgttcttggaatacgagtattttggtcatagttagtaatagaggttgtgtttacttcacactaaaattgaaagtttggtttaaattaaaaggatgtgatggaaaagttggaggtttgtgtgtaggaaagttttgatgtgatgaaaaagttagaagtttaaagaaaaactttagaactaaacacggcgagagttggacagaaatagtgttcaaaataaccttacaaacttcaaatagtattagagttcgctttaatttttttgggacatttaagaaaccttactaatctaatgaaaccatttttttcaaaataaataaataaatgaaacaagcatttttagtgtatggaaccaaaaaaacgggaagcttgtctgtagattacatgctacaggcaattcaggcctcttttagttcccaatttttatcacaaaaagatcacgtcgaaactttagacatatgcatagagcatcaaatatagataaaaataaaaactaattgcacagtttgtatgaaaatcgtgagacgaatcttttgagcctaattagtcaatgattagccataagtgctacaataacccacatgtgataatgacgacttaattaggctcaaaagattcgtctcgcggtttccagtcaagttataaaattagatttttcattcgtgtccaaaaactctttccgacatacagacaaacatctgatgtgacacataaatattttcttttcgcgaactaaacacaccttcagtccgatgctccatccgtgatactgcaaccatgacatcgatggatgagtggcaacccacatctacacagtgcaactgtttacggctgcctgcatgatcaaattagttcttttgccggagctattttgccaatttggcccaccctagatgtttttttatcgatttagagggtgtggtgccaactcacatgtttctatggagtcatagagtaacatctactcctacaaacagagcacgcatgtgctgcaattgaaacacagttctaatcatagttgatgtctatccttgtgcaacagtatatgtgtacatacagtacaattcggtaggtcgtatgtgttagagtaggatgtacgttctctgcttgtagaataaacgaaaactattcgctgattgctgtttacaatgccgtacgaaatgtaggaaatgaagtggatttcgagacaggtacggtgtagaacacaggcgtcggtgaaatgtccaaacgtgcagggacagagtttcctctgttccaagatgtcgcgtttcttctgtttcacctggtggttttcctgccgttttgaacttgaggttttttaaaagtttaaaactcaacaccactgcaaatccaggttgtacagtcggctagaatggattttcgcatatagtttgagtgatcacctataacaaaaggcctataaaaatagtttgattttccacataaatgtccggttcttcgagaggttcgtatgcgaaaaacaattttcacatatgacagtccaaacaacccctcttgtgcggatgtattttagcaaaaaaaaaaaagtaaatttagatccaatttaacttgcagaggatcacaaattccacaaagccctagccacaattgtctttgtagttgttgagtcgaaggcctcgcagcggccaccatgaagaattccattgtggatcgttgtggcattggtcgattgctgttcttttagggcggtttgatttgaagtaaaaacttaccctaccaagatattggcaaattaaacaatagtagcctggtaatatttggtttgctaccaatacttacttatatcacacagatgctaccaaaaatatttagggccaatttggtttgatgtcaaaatatgcactaccaaattgttggcattttgaatagtagtttggctagtgtttggtttgctaccaaaatgtgccaataagacacataagttgctaaagtatttggcattaccaaaatttgcctatgatttggtattgccaatattttgacatggtagcaaaccaaacaagcacttatatttgacaaaaggatgcccttgatttggtattgtcaacattttgctatggtagcaaatcaaaccatcccatagttacctcggcagaagagtgtccttgtggcctattatggcatccattagtcctgtaaagcttgcaccttatccattgtgtcatgtaaagcttgcatgcgtctttgaacttgaagagtgacagcatgatggtcggctggtcgccatagttgggtctaaccttacccagcacagctatgttcaacaaaagcatgctacattgctacttgcacagtgtggtactaccaagatcattcttgagcactcatcattcttttgagtcgcgggctgcatacagttcaatatcacaacatggatggcacaaatgcatgcatacatcgtgtttagttccaaaatttttcttcaaacttctaacttttccatcacatcaaaactttcatacaccacaaacttctaatttttccgtcacatagttacaatttcaactaaacttttaattttgatgtgaaaacacacccatacatacatacattcaagtggtcaaggaaggttcacgaggccgcggcggcagatggggggcttccctccatattttccggcgccttttgttcaaacatggcattggcatcgaaactttaaaccaccaccaccgtatcgtatcgtctagcctgctatgctacgtactcgtcctactaccccagcagagcagcagcagctgatcgatgcggtagaagaggtgaaaccgcgcgcaaagcaaaagcagtggccaaaacgaaaaggagaagccccacacaaacgcaggagaacgtcaagccgtcaacctgcacaggccaccggccatccagagccacagccgcggctggccggccggcagcgagagagaggtgcagtggatggaaatcggaatggcacaacttgcgatggaagcaaagcgaaaggcgagccaatcaacgccccagccgtttgctccgtgtccacgaacacgcgccagtggccgcgccgcttttggtctcccctttccctccgctgccgccgctccgtgtcatcgcggccgtccatttagaacgaaggggatgacacatctgccactggcgtgtggggtccccgctgtttacaccggctgcgcgaaaggctggagcgcgaatgatagggccaaaatctggccgtgccaatgccattggcgaattcgcgttacgtctacgaaaatgtggtgttgaacttcttttttttgttcgagatgacagttacgaattccaaacggatcgttggagattgtcgtgttggtgtttgatgggcaaagatttatgactcgtgggctcataccaggatcctgtacgatcttgcagccgattccgccgtgcatcatgcgatcggatcacaacttcacaagcaatgcaaggcaagaggtaattggccgtggaatccaatacgatccgagttactcaattccggatccactgccctggcttccaacagattaatcaccaccaatcggtgaaaagagaacaaacacttcgcatgcatgcatgcacgcaaagattaatctgctcatgcttttgctttagttcgaaccaagccaaaaaaaaaagaaagaaaaaggagaatgaatagttccaactgccccgcggtgcacgagatgacggccgcagcgaggaggcaaaatcacagctgtggcagtagtacttgtacgtacacacacagtagtagtagtgtactactgctattgctactactaccacgcagcgggtgacacacacacacacaaaaagtcacaaatctctacgttttttttcctcgcgaggcgtagggcgcgcatacgcgacgcgcgccattatttggtccgcctcgtgcctccataaataccgcctccgtcccgtccgcctcctcccccacactccactccactccactctcgccgctcgccgttgccactcgcactcacaatgtcgccggcgccgcgggtgttggtgttggtggtggccacagtggtggcgctgcaggtgtcgccggcggcggggcggatcccgggggcgtacgggggcggggagtggcagagcgcgcacgcaacgttctacgggggcagcgacgcgtcagggacgatgggcggggcgtgcgggtacgggaacctgtacagccaggggtacggggtgaacaacgcggcgctgagcacggcgctgttcaactccgggcagagctgcggcgcgtgcttcgagatcaagtgcgtgaaccagcccgggtgggagtggtgccacccggggagcccctccatcctcatcaccgccaccaacttctgcccgcccaactacgccctcccctccgacaacggcggctggtgcaaccctcctcgcccccacttcgacctcgccatgcccatgttcctccacatcgccgagtaccgcgccggcatcgtccccgtctcctaccgccggtaaatataatctctcaccaccattcttgctgctagtactgcatttcttggtgacgacattcgccttggttagaggagcaggaacagtagtacttctaggcttgttttcttggtccaatggaagcttttgttttgttttgttttcatttcatttcgcgtcttttgagacggcgtggggctgctgctgctgctgcttctgcttctgcagcgttttggactccagccacttctgcttccgcactgctttattactgtagtaaataaatttgatacggtatactccagcgcgtagtggctgcacggccaggtgagtaatattttccgagtgggatggaaatgtgcaccgacggcgcggctttaaaagcggaggagcgtgatagtagcggctagaaacgctgctcactgcccgtaaaaagttggcttggtacgtagctataaatggggtgtcccgtgttcgctttgcccttgtgcatgtactcgtgtaccggcgctacgcaccgtggctcgcattgagccgagcccaaactctgcttagcgcttaatcactgccaattttttttccatacatttgcttgtagtagatctcatgctagtggttacattcccatgctttaattaacagtacagtagaaaggaggagtagatttttgggagcattggcctgaataattgtaccactacaccataaagggacacaaaagatgtacagggaaaaaacagcactgttactgtgcaaatgtgtgtagtgtaagaccactgggcgcactggcagcagcgagaggcccagagaaacatccaacgcgagtcaagcgtgtagttgggaggagtagtagaattccgtagggccaaggcgcacaggcaaaacgcgcacacgcgcttttgacctttttcgctttccgctgtgttgtcctggcccggttgggtggttgggttggtgccgccccgtgatcccgctccgtacccgcgcctccctcgcttcgctctccgcaaccttggcgtggcgtctcgccgtctcccatgccctggcgggaaagacgacggtgtgaggtgatgaggtgaaatggcaggtctgcccctccgttccttctgtggctggtcccctactgcaggggccttcccgtcctttcgtcctgccggcacaacgttactacgcgtgaggaggctgtgtggccccatctctgcatgaacgactgcactctcttcctggtcatatgtccttgcctccttttggctccttgctacctatagttacagcgaaataatatttgctcctactactagtattgttctgttgatcttgattttaatgtgataataatgcgtggttaatgagtgatgaaaatgttggcgtgtgtgtggtttgcagggtgccgtgcaggaagaagggaggggttcggttcacgataaacgggttcaggtacttcaacctggtgctgatcacgaacgtggccggggccggggacatcgtgagggcgagcgtgaaggggacgagcaccgggtggatgcccatgtcgcggaactggggccagaactggcagtccaactccgtcctcgtcggccaggcgctctcgttccgcgtcaccggcagcgaccgccgcacctccacatcctggaacgccgcacccgccggatggcacttcggccagaccttcgagggcaagaacttccgggtctgaattgaatgaagcaaaactgcaatataccctcttatttactcatctagtaattactgtcattatagcgagcaggtgtgttttttaccttggttaagtttgggttcttcttcggttggtggccttgtcaaagtgaggggccgggggaaaacaggtggtaaagactagtactagtgtcaattagggttaaactggtaaattgctagtactgctgttactcatcatcatcatcgctagtggtcactgctagtagtagttgtgctagtgcatgtatggttatggatactgcatcatgttggttggtgatggattttgtccatgttttgccaaggggtttggtttggagttgggggtgatggggaggatttgtgctcaaagagtggctgaagtggctgcaaagctgcagctgaatttgggggtggtgagtgtagcccgcagccgcttgtgccgtgtcatttgtctctatggcacttgatgtttatcatggacttgatttatcattatggtgattggagcttgtaagaagattaattgcctctgttcctctcgctctgtgtgtgtgttttatgtgatgttctggttgagcatttcagctttgtagtgctggaatgatgattcttgccggcttctttccgtgaatgcattctctgtgttctccgtgagttgctcgatgggggagtgccgaaattacgtgaaagggataaaggtgaaagcaaaagtgcgatgcgagtagaccgctttgggaatgattttgcctgttccgttgcctcagttcagatgcaagaatggttcatgattgcgatggcgtgatcggccattccattcctaagcacggcttgcagcatcatgcattcatgctggccttgcaattgccatcggagggctacttcaggattgggagttatcagtctgcatcatcatgggatggaagaaccaaatgcgcaacctctcttccttaaagtcaacatgctggatagccatcatcaggtgtgttggggccgaaatcaatggctttgacagggaggttagcatttgacagtgtggctatagcccatagctatttgataaattgttatccatctcgccggagatttcggcccaaaccacttcagcatgacaccatcagaccactgaacacaacagtagacaccactcagtatgatccaatgatgtgttgatgacaatgtacctatggtgcatgctgatcgatgagctaccaggaaagcttgaacccattgagacagccacgccagatttgtaacatgagctctactttaatgccatgagtttcgacatacaacagcatctagttagctgaagttaagaagctcatgataatgcacaaaaaggacttgttgccaaaagactgatgacaacaaggaatatgcacaacatatttacaaactaccaaataccaactaatgacactcacattctgccttgctaatgggagcggaccaatgctgttggattcggaccaatcttttcccgagtttctcccaagcttttccgacgaggcttaccgctgttcttgctagcatttgcagtaggggcttttttgcctgtacctgtggtggattcttgacgcctctctgctgctggtttcctgtccacatggctggattcttgaagctcttcaagaatagtgaccacagcttccatagaaggcctcatcttagcttcgtacgacaggcactcaagagcaagggtggcaactgtttgtgctccaacgtgagagtattgaccttctagcctggtatccaggacacggaatatcttgcgcttatgtgtgaggtatggtcgggcccattccacaagattgtgttcaccctggggccggttcttgtcaatggcacgacgacctgacatcatctccagcagcaccaccccaaagctataaacatcactcttcgcagttaaatggcctgaaagtattgatacaataaaacaaagctcaaggcatattgtacatgcacttctggtacatcgttctaaaaataacacggtgatgtaaatcactaaatgcacataattgcaacaggtccacagtaaataaaagctcacaacgtatggcaaacaatgatttgtttcccaacatccttccatgtacattttgcaattgagattaaactaaacatcaagccatatatatcattccccaaggagtgcgcatgcagaaaaggtgtatatgaaattcatggaaagcaatacattggagtgttcatatgttcatgcttagatgagttagattctaagctagatcacattcccaaagtcaacaatgcaaagaatgtcataaaatgacatttccgatgtggaggatgcgtaaaaaacaattccacgttattaatatgcttatagctataacaattcatgtaatttactgtagacaactacctggcctgccaatgtatgaattttctaatccaagatcagaaaacatggagaaaactgaataccaaaaactacacttcacaggttacctgttgaaagatattctggagcagcataaccatatgttcccatcaccctcgtggatacatggctcttctcaccaacaggaccatcctttgccaatccaaaatcagatagctttgcagaatagtcctgaacagtaatataatacattcctttcagcagggatacatgcgcactgaagtgaagttggttatcaaagatttactttcacttactgtgtcaagcagaatattggaagtcttgaaatctcgataaataacttttgcctctgaactgtgaaggtaagctagtccttttgcagctccaagtgcaaccttcattcttaggttccatgaaagaggctggaaatgcgaacctcctgcaacatgattcagatagcaatttatgataaaaggaacacgtggcaatagtgtatgcaatatgaaaagaatgcccccagatgagcagtggaacaggtcttgttttaacttactcctaaacagatgattttccaagctcccacgtggcatgaactcatacactagcagtcgatgctcatcctctaagcaatacccaaatagcttcacaaggttgggatggcaaaactgacctaggtaattaacttctgcctacatattgaatatttatacatcaaagttagaaaatatccaagtaacctttcaaaaggataaaaaaaacaagtatatgattgacaaaagctgtatccaatggtatacttaaaacaagcatggatttgaaggcaacacaacatagaatagcagtcatactcaccaaccattctcggtgcccttgcaaactctcctggttgagtcttttcacagcaacagcaattccagtgccaggcttgcaagcagataatgtattctcatcaatccatcctttatagacagatccaaaccctccttcaccaagtacactgtcaggacggaagttccttgtggctatcctgagatcactaaaactgaagatcttcacattggctgactgcagtatctcacattcagttttcgcagttggaggcatggaagctgaagaggctcgactactgcagccactaagcctactcccatctttagcaccactccttgagaacatccctgcatacatttggtacagttataatgagtagaaagcacatgactgcatttagctgtaatctagaagttctctagaaaaaagtcccagtactaatctttcccaggtccatagtatgatagcacagtaataatgtatataatgttctgaatgttcaattctatttttaaaaggaagctttgcacattaattaggaatcaactaaatcaatcatcagttgatccttcgctaaaatttggtatgagtcctgacagatgaaggatttgctatcagccaattgccacgcgcctacatgtagcactactagatatactagatttgctatcagcttacgaatgatgatgtgctctggtttaaaataacaaaatgacgattttgcatagagtagtagccatgaatataatgggaacagggggagttcccacccaaccagaaactggaaacaatcatatgcgctagtaaccttattccatcagaagtacatccgctaccatgcggctctccagaaagctcatatttatctactctatctttagtaataatacatttcttaagtagccgttatgatatgaatcaactaagttcaaatcaaaatgaagcacctgacatagaagtgagctatagtctttgtaattacatagaactttaatgaggcatacacggtcattttcatatattcagattactgaatactaagcaaataatcgatcttgatacaaccaaaaagtgtatgttgtaactggaaaagagaaaaggtttgtgatgttatgtctaaccgcctcaagccatgtaaagtacataatcaattattgacagaacattgctaaatctgggcggcaaaccaaattaaatagacaggacgagtaaaaaacacacacgatccaatctcataccatagcatcaaattcaaactaaataagaatctaagatttttcctcattctatcaataatttatgaactaacaacacataaaaaaaatcaattgcaatagagaaacaactaatctaacagtattgtttttcttaacaagctgtcccataaattcttttgagacattttgcaacaagaacatataatatgtcaactgcaaatattcacaacagaatgccataaaaaggttactatacgcattactagcagacttgcttcaatcaaatgttacctttcgtcgtcaacacaatatattatagacatcgtcatgccaattacgagctgccatggttggaggaatccagtactgggtctatccagtagatggtagtacaacattactacacatggtactagttaacgatatcaagcaatgaatgaagcctggatatccccatcaatacacataagaatgtaccccctcacctaataatttaaggccttagctccaatggcacaaccacctacagagccttacaggcacagcacagccgaagcttgaactaaacttctctaaaaaaaaagtgattgtaaagtcttacgttggcacatagcttaacatattgaggatgccacggtgtagctaaagggttgaaatcatctagtcaaattaacaattggatcatcaggagtatgcctatctaacaagccaaatcatccaaacaagatcgaagtagcttattcacctgtactgtggaaatcaaaatttctagaagaaaataacccgaatgctaatgttcatacgattgcaacacaagctaaattctgcgcagcaacaaagactccacggcttcgaaactccaccggaatcaccataaactaatcgaacatgccatcacatctcgtggcataaacaatccgagtaaaatggaaacggactgaaggaatcatgcatctacgcgattgaagccggcaacccatcgaatcatgaaacaaaacagcaccataaccaggcaaagcaagcacgcacgcaggcagcaagagagagagagagaggaaggatcgcgaagcataccagaggctcccggttgcgggctcccatccttgatccgcgcgccccacccacagcaattccccatccccctccaacaagcgactcgcccgcggcgccgagcccagtcaggatcgaaccaaccctcccgccgtcccgacccggcggcgccgcatggggtgaggggggaggagagctccacctagggttttgggggacaccaagcgcgaggcggaggcggaggcggaggcgttggctatatagcgacgaggacgaggtgcgctcgctggcgagagatgtggcgtgcggcgcgtgaggtgaggcgagcgagtgaggagttaatggcgggggcaagggaagcggccaagcggagagggagagggagcgaggcggcccgcgcagccacgccgctgctgctggctgctgctgcttcccgcgtggcttcttccggggaaaagggtggttggtgacggggagcgtggggaggaggagaggcgtcgtggtgcttggtgtgtgacgctgccgcgcggggaccaccgggcctccgggtgcgacgattttttatctttttaccgcttcacctctccgagttactgcgcgactctgtgagtgaagttacagtgacgtgagactctgtgggctttggcccggtaggcccactaattttattatgggctcgacttattatgcgtgagcatggcccaaataaaattgtttacacgcctgggaacacctgtaacttgccctccaacttatcaaccgcggcaaaaattaaattttacaacttcattttagagtaaagtttgatgttttttgatcggtgtttattttttaagtatttgcttttaagttgttacaaacacatataaatgttttacgtataacttttttttgttgctaacaagtgttacgacatctaattagttgtaggtgaaatgtacagattattttttgatgttgtcgtaatagatttctgtcggcaaaacgtgcaaatatcaaaggaagttttatgtaagggtggagctaatgtatttccgccaaaaaattgccctatgaagtacctttggtgcaattttaataccaacaatacaacatataacgatctctttcatttggattgcgatattcctttttcctccaaattaaattcctctgttgtaaagtgggctttcatgcctagtgtagtgtatggaaatatcttgatttcttgagcacaaatataaaaagtacgtacatattgtatgtgacaaagtgtacagatcctttgaaacacaaaaatcgggatctcaaaacacatagtatggatttgcgcctttgaatggtctatccaattgttcagtgctacagaacatctatttagcgatgtattaggattcattccccttgaactctgtctttattaataaaagtttatgagttttttttaaaaaaagaatggtctatccaattgttcaaaaggaatttagggagaaaaatatcctaaaaattatgacagtttaatcttagaaaaactgatgtggcacattgtgattcaatcttgatttttataactatccactaattaaatctgacggttgagattcttttgtgtgtaagaatttagcgtatagcatcaaattcgtacatgttgatgggtgagagggtataactacataatatgcctcactattttgtgtggggatactgtaatcccaattgtaagatcggataccgtaataaactggtaaaactagacaaaaactatcaaatatggagtttttgttttaagttttttttaatctaatctgtttctgagctattaacgttaccaaaaccttgttagtacggtaaatcatgttgcacactctgaaccgatcttgcttgatcatgactaaatacgaatattaaaccttcgtgatacaatcatctcattttttaaattcgagtaatttggtatatgatgcatttgttctactccaagtaccttctaaccgatttgaaaatgcttaccttaaactccactactcaacaactactagcgtggttgtttctcttttgacaacccgttcaaacaaaaagagatgggaaaaaaaaaaccggcctacaacctttgggccgggcgtgttgaacccttcggacccaggcagatctccccatctccgggacgggacccggcgcgcacgcgacccgacgcgacgacgcaagcagcagtggtgggtaagggtggactcgactccggccgtcgcgatggcggccgccggctggccgctctcctcctccgtcgccgacctcctccccgcctccctctcgctcaccctcctcctcgcctccctcgtacaccctctccccccctctgcccccttcctcctccgcctcctcgcgctacttatcccttctccccgcccctcccgtgcgcaggtggtcgtcgtggtgctggccgccgccgccttcttcttcgagcacatccgcaagatcggatgcacgcactcgtaagcgattctgtgactccccccaatcctgtcgttgtttttgctcatggcgatctgcgtgcgtgcggttgtttgactggtgtgttgtttctggatctcggccgcctgcaggctggagaggactgaagtctcggccgctttcttcgaggaccccaactcgctcaacaaggtaagcgagggattctgtttacccacttcaaactgagtatccttttcccgctatttgtttccggttgctcggactgtgaatgttgtgcgcgttaggtgtttgttcatttgctcctgtaaactgtgctaggttcgttgcccttcaatttacgaccctgctgagaagtacatttcgttgatcatccccgcttataacgaggagcaccggcttcctgaggctctcacagaaacactcaagtaaggctctgatatgagcatttcctgttcctgttgctccgttgtttggagtatctttgaatgatacagtggctgtgttgttctggtcattgctctgttatgttaatctctgtgttcttttgtttctctggtagctacctgaaacaacgttcagctgtcgagaagtcatttacttacgaggtatgtcagggcagaacatgctaacagctttatttgacacagtaatacatcagggaagaaaacgttaggctgattttgcaagcaaaactaatcaagcgtaaatgagaaagtatgcatttcaccatcatgagatatgttagcgagctggttaatcacttcgccacaatggtgacaccgtggcagtccattagtcttgcaatagtaactgtttctatgtcatatattcactttttacctgagatatatcaatatcttgtttggaatgacatttgaatcactgaatttgttagctaggaaatgcacagtgtgggagccaaacactattgatccaataaagcatttacctaaactggtgtgtcaggttgctcggaccttaaagataggactttgtatctagggtagtgatgttttgttgataccgcttgctctttagatcaattgagaccataagctatgatgcctttgcaatgcttctgaacatatcagccatatctctcaattatatcatgctctttaaacacatattatgtataactcttattaacatttgcactattatatactgcataacaccataaccagatatttggcatattattattgcagaaccttttattcataaatcctgcttaaattagctaacattggaaatcggagaactgatttgcttttactgaatttcataaaggtcttgatcgttgatgatggaagtactgatcatacatcaaaagttgccttcgagtttgtaaggaaacataaaattgataatgttagagttcttctacttgggagaaaccatggtaaaggcgaagcagtcagaaaagtgagtaaatgtaccagtcgatcccccccccccccccaactcccctcactagttcaataaacacacccaccctcacccaaactagttcaatgaaataagcactgattaattctttcccatctgtggaaaaattgtacagggcatgctccattcacgtggtgaactgttactcatgcttgatgctgatggggcaactaaggttactgatttggaaaagcttgaagcccaggtctgtcataagttaaatcaaaacatgttttataaagttttgttatgcatactttgatcgtgattggtaacatcttggaatcatatcgtgctcctaggttcgcgcattggctaaaaaggctgagtccagcctagcaccatctagcagtccatctcagagactatctgatgctgaaattgctgtttttggttcacgtgctcatctggagaagcaggctcttgccacagtaagtgccccccaccccaaaacaaaaaaccttttcaatcgtgcgtttttgttctcttagattttcatgttgtgttgtatttgtgcttttcctggcgtactgcagaggaaatggtatcggaattttcttatgaaaggtttccacctggtagttttattgacagctggtcctgggatcagagacacacaggtatgctttgcaaacataagtcgtaccattaattcatgtggacagttttgctttggtattgtgctatgaactaaattccattttcttattgctaatttagtgtggtttcaagatgtttactcgagctgctgcaaggaaactttttacaaatatcagattgaagaggtacctttgttgttatgttctctaaatattgtcatgcttctgtttatcaaatcctgtcttatttttggcgtgtaaccaggtggtgttttgatgttgagcttgtatacctatgcaagcatctcaggatcccaatggctgaagtatctgtaaactggactgaaatacctggatccaaagtgcgtatgacaagcatcctgcatatggtatttgagctcctgctgatcaaagtaggttatggactgagcatatggaaaatctattcatagaccatatgcacggtacgctgacaatcaccatagcttatcatcactggactgtataccaagcttagtctcacatgtaaaatttttccaagattttcacctagagagaatccatttgtggcgctgagtattccatcatagatttcaacaaagatatagatcacgtgtattgttcctgctgatgaaattctttaatcatttttttagcattttacgaagttgggaagaatcgaaaatttgactacccttcatgtttgatgtttgatttgacggatcgttttgtttttaaaaaattggcttgaagtactatgccttttggatggtctgaatggtgaataatggtaccgatcatataatcactaagtataccatctatatagttaaatcattagctatgtaataaatgaacaatggtgtgcttcaccgtctcggagaagactgtcaagaggttttgttgtctgccatgtaaaggtttgctgagaattacagaatgtgctccagaagccattttgtgaaaggacttgagctgatgttataggctatcagttgtatggcgatgttggtacagattcgactgcctatatacttctgacatcaccaatgcggtttttttagttttcacttaggctgtgtttagatcagtacaaagtttggattttggttgaaattggagatgatgtgactgaaaagttgtgtgtgtatgacaggtacatgtgatggaaaaagttagaagttggatctaaacacagccttagctattcgctccattcctcttcaattcattagtatttgagttgcaataaattatagatgactgaacatttacactctacaggtctaccggactttctggtagattatactctctcagattcttcatattacagtacggtatcatgtatcagctgaatatctcagctggcaacaaaagcatctcttcttttatctctttaaaatatgtttatagctgccttatagtatgctatgtacctgctctaaatagcttaataccataccattatcattaagtataccatctaggaagttaaaacattaattaataaaataaatctattacagttaactaaaggtattatacaagtcggaaagattggagtactaagggtgtgttcagttcatgccaaaattggaagttccgttgaaattgaaacgatgtgacggaaaagttggaaatttatgtgtgtaggaaagttttgatgtgatggaaaagttggaagtttgaagaaaaattttggaactaaactcggtctaaataacagttgatgtaaaagcatactaatattttgcaaagaaggccccgttgttttcttattgagatgtacagtagattctaccttggtttctattatcatgtttttcaaaatattaaatagtatgtttcgtgcaaaaactttatatataagtttttctaaaatatctaataaatttattttcaagtttataataataaacatttaatcaattataccctaatggcatccgatacaggagtactatagtatccaagagacgagtgggctgatttgcgaaaacgtattctgaaagaccaaaaccgagccgccctgcctcggcgcgccatgtgttcgagcaaatgcctcctccagtctcctccccgtcggctccgcgcctctcgccgtccgcggcgcgcgcggccgagcagcattgcctccgcctcctcgcggcctcctcgacgcccacgtccctcctccagtcggtcgccttcctcctcaagtccggcctccacgccaactcgctcgtcctcacccggctcttcgccgcctccgcctccgccgcgcccgcgctgctcgatcccctcgtcaccgccctcctccgcccctccgtcccgctcgacgccttcctcgccaacaccctcatccgcgcccacgccacctccccgatccactccctccgcctccgcgccgccgccttcttccccctcatgctccgcggcgccgtcgttcccaacaagttcaccttccccttcctcctcaaggcgtgcgccgcgctcccgggatccccggacgtcggcctccaggcccacgccgccgctctcaagttcgggttcgcgacggatcagtacgtctccaatactctcatacacatgtactcctgctttggcggcgggttccttggcgacgcgcggaatgtgtttgatagaatgcccaaggagagtgccgttacctggagtgcgatgatcggcgggtatgtgcgtggggggctgtcgagtgatgctgtcgatctcttcagggagatgcaggccaatggggtacaggccgatgaggtgacagtgattggagtcctggcggcggccacagatttgggtgcacttgagctggctcgatgggtccgacgctttgtggagagagaggggatcgggaagtctgtgacactgtgcaatgcactgatcgacacgcttgctaagtgtggagatgtggatggggcggtggctgtgtttgaggggatgcagcagcggagtgttgtttcatggacatcggtgattgatgcgcttgcgatggagggtcgtgggaaggaggctgtgcgagtgtttgaagagatgaaggttgcaggtgttccacctgatgatgttgccttcattggggtgctcacagcttgcagccatgctggtatggtggatgaaggctgtggctactttgatgccatgaaagtggagtatggcattgagcctaagattgagcactatggttgcatggttgacatgtttggtcgggctggcatggttgagcgggcgatggaattcgtccgtacaatgcctatacaaccgaacccagtaatatggcgatcacttgtttctgcttgtcgtgcgcatggccgccttgagctaggtgaaagcatcacaaggagccttcttcatgagtacccggcccatgaggccaactatatcatgctctcgaatgtctttgcactaacacagagatggaaggagaagtcagagataaggagagagatgagcaagagaggaatcaagaaagtgccaggctgtagtatagttgagcttgatggagaggtccatgagttcatagccggagatgagtctcacccgcagtacaaggatatataccggatggttgaggaaatggcaagagagctaaggcgcgttgggcacattgcagctacctcagaggtcttacttgatcttgatgaggaagataaggagggtgcacttcagtggcacagtgagaagctggcaattgcatttgcactactgagaactcctcctggaacacaggtccgagtggttaagaacctacgtgtgtgctcggattgtcatgcagctataaagtgcatttcacaggtttatcgacgggagattgtagtgcgtgaccggagtcgtttccatcgcttcaaggatggttcctgctcatgcaaggatttctggtgatgaaattgtgttttacaaggttattctgttttggacaagatgctaatgaattttccagggagctcctgcaagtctcacacatctgcattgcaacacaaaggttttccacagaaaaatgtgatgcttattcaaggacgatggaatcagaattggaatataattcaggtacttcttcttgtaaactgagtcttcttgatacatgcttttctttttggatcagctgtcagtataattcataacttttatgcaaatgaaccgtatgcacatccccagttcttgcatcaaaggttgttctaaaaggcctagagaaacataaacaaaaatcactatgatgctaatcacacaaacaaaaatcactatgatgctaatctgtgagcagtccaacatttttatacagtaacacactcagaaagtgtgttctggattttgacagtctatctgaatatacggtgcccacatttctgatgcacaagtcttcatcttatttaggctatacacaagttttgtcttatttcaaaatatgcataagcttcatacgaaaatttggaaatttcatgatgagcacaagttaattgcaaaaaacaaattaggccatcttcaagtgcagagggttcctacctcatactcccaccgtcccaaaatataagggattttgggtggatgtgacatatcctagtattacgaatccttatattttgggatggatggagtactatttattctgattgccgttttcatgtttttctaattttgatccatgtttgctgacaataattcacttgattttgcagaaaatatcaattatcaaggttgaacttttcttttgtacatacaccaatagattggatcgatcaatcctgaggcatcattaaattttgatctctcgacagtgtgaggttatggattctgcccgccgcatgcatgaaaatgggatcttgatctatctggagcataataaatgactggtgttagccccatggcttgaacgatggttcctgctgcaaagaattccggtgatggaactttgattgaccaaggttgtggaaaaccaaggggagtgctacgactttacgacagacaagaacgttatgtttggaggggtggaattttgagactagattgggcacatttcagaagaacacgaacttttctttttattttttgccctaaacaggacagcatgtgagcttggtgggatagagttcggtggttgctggtcggaaatgagatgtaagatcatttgaagaactgagagaagaacatggtagaattgcagagagccagtgacagataaatgaagtatttcactatttcggtttaacaaagacagatggtaattggtgacaagctaaagacagatagtgacaaaagattgccatttgatatatggtggtctattattgatgcgttcaaatctatattttctgcggacacaagttaaccaggctgtcaaaatattccatatcttccgccaagctctccatggaatgcacaaagctgcggagttgatctatttcaaggtcacattccataatctctttgtcggcgatggctctgactgcatcgaggacgccgtaaccctgtcgctcagcttccttgaggacatcggcccagcgagccagccattccattcttcttatgtcaagtactggcacgatctcgacggactcgccgatatcaaccaaggcttgttggagtctttcctctagttcatggagtttccaggaatctgctccttcaggtagggaaacgccgtctacctgagcgactgagtcataattatcaaatgacaacacttccatgtcgttaaatgacaacaccccccctttttttaatacgcgaggagcatatctttatattaagaagaaataaatatatgtacaaagcggacgaaaaaaacaaagcgaaagggacagggtacaggaggagaaccaaaaaccaaaagcctaatcttctactaaaatttgcgacccttctccactaacatgggctaccaaaacagggattgcagctctagctaagccgccacagctccgcttcatccgttataacccttgcaacctccgcccaagttttgctcttctggttgaagacattgtttttttttccttccagatcgtccatgcaaccaacgttgcgatggtgttgaaacctcggcgatgttccttgaccatcttcttacgacagtcgcacaaccatgaaaataaagagtgttcattgagcggtaagcactccgaatgcccgatagctctgagcgcaacccaccacagtagccgcgactccgggcatgcgaccaagagatgatcaatcatctcttcgcattgatcacaaagaacacatcgatctgagtgcaacaaaccacagctccggaggcggtccgctatccagcaacggttaagggcgaccaaccaaaggaagtagagacggcaagggggcgccaaagattgctaaattggcttgtgctggagatgagttctaccaaaaaagagaacacgataaagccgagcgggaagagtattctcctgaggtctcccaccgctaagatagagaccggttcttcggaaagctacactgaccgaaggcaatcccaaagcttaaaatattccaggatcgcttgagtacccaacaccgaactgatgtcctggatccatcttttgtcagttattgcctcggccaccgtgcgatgattccggagacgagcagggacggctgcatagacagccaacgccagcgaccgaatggaggaaccctgcagccagcaatcctcccagaacaacaccgaattcccatctcccaccaagcatacgtggaaatcgatactagattgcgcttcttctgcgagaccggaatattaagcccttgccgcggcttttccggtgaagttctctgctgccagagccatctcaacctcagagcgatttccaacctctctagatcggggatccccaaaccaccatactccttgggcgagcaaacttgagcccagacgacccgacagacgccgccgtttgcagaagctttgccagcccaaagaaagccgcggcagatcttgtcaatccctttgataacccacttcggtgcattgatggccatgagcaggtaaacgggaattgagctcagtacaacgttcaccatggtagcccggccaataggcgtcatcaagtgagacatccaagaaggcaaacggcgcgcgattttgtcaaccagcggctgcaggtcttccttcttcaggcggaagatggacaaaggcaacctaggtatgtgcaaggaaaggaagcgacgtgacatggcaactcatcatgaagagtttgaagatccgtctcattgcactggattggagcgccgaacatttagcaaaatttgttcgaagaccagacacttctccaaaaatggcaagaatttgcatggctgtgcgaatctcatccacagctggccgtataaatgcgaccacatcatcagcatagagggatacacaaaaaggaatccctagcggctgcagcaaaccttcaacctcagccttggagaagatggaactcagcacattcatggctaagataaaaatcatcggggaaattggatctccctgacggacgcctcgccgatgcaaaattgggcagcctggctcaccattgattaagaccctcgagctagttgttcgaaacaacatggcaatccatgagcgccaccgaaggccgaagcctttgtgctccaaaacttccaaaatgaattgccatgaaatggaatcgaaagcttgggcagtatcaagcttcagcagcgccgatggagtccttcgatcatgcaagcgtttagctgattgccgcactagcatgaaattgtcctggatgcaacgtttcttcacaaacgcactctggtttttagcgaccaatgcatccaacttcggcgcaaggcggcgagagagaacttttgtgaaaagcttcacaaagctatgtaccagacttatgggccgaaagtccttgagcttcctggcatccgacctcttaggcagtaaggtgatgaaagccttgttaaccttaccaaggctggacccatccattcgatgaagttgattcaaagccgccataatgtcctccttaatgatgtcccaacagcagtaatagaactgaccagaaaaaccatccggccccggggcgttgtcacgagggctgtcagcgattgccttccacacctcatccacagtgaacggttcctccaagtcagagagctgctgcccccttggctcaaagtagtcaagatccaccgaaaactcacgatgactgacagagccgacttcagagaagaaattatgggcaagggcggccttttcatctggggctgtggcgatctgcgagttgtgctcgatttgttgcacaaaattctttcgacgccgccaggcggaatgctgatgaaggaatcgtgtgttggcatcaccttcctgcaacctaaatgacaacccttccatgttgtttgaggacatttggctacggcgccgctttggattcggcgaggcctctagctggagcaacgctatgaactccccgatgttcgccgactctttctccagcgcctccacggcgccgttcagcttcttcacttcctcgtcactggagaagagcgcgatggctatggtgatgacgcgctgtgccatgcctgatagggccttccttttgaaggacaaagcagtagcaggcacagaactgctactgctgccttcctcctgctgctgctggtggtcgctggcgttctgaccagtggcttcgtcgacgtctgcttcccgctgctggaagctatggagaacctcctcaccacgggaggcggcttctttgagcttgtcctgccactggatcaacgcggcgctcttgatggcgcgcttctctgacacctcgatcgtgctgtggattttgatcagcagcatctccagccgctggagcttctcggcggtggccgtttgctggttgaagttcttgagaatcttggacaccgccctgtctgcgaccacggcggtcactgcggtggtgatggagcggcgggaatcgaacccgtatcctctcctcggcaaggagatgttttgccgcctgggtcgaccgtctatgtctgggtcgaccgtttcattttctatttgagttttctttttattaatttaattgtctgtcaatcaattcggggtgcaaattgcattttaatgcgtctcacaatccgaataaacggcccttttttattttgtattgggctactaaatactaaacacatttaagaaatgagagaatttagaatagctaccagaaagaccagtccaatccataatgatgtaccggaaaatacaacgtttttattgtttgaccaaccatcaggagaagcaaatacaaggggtacactaatgactaagactgaggaagtcacaattaatgcaaaaacagctaattggaaagcaatagtcatatttctaatcctccaagttaccatcaaataaagttgactacatattatatttgatccctcacttaatcaaaattgtaataaaatacaagaagtaagaggggtttaatcatgaatccattgattcttctctttaaaacttattactcaccactttttttatttggatatggggttgagggggttttatgctttatttcacaagcggatatagcggatcctgtatacatggatacagtatacagaaatatatcgaaaagggacttgtattcgagatgtttctagaggttagtgagtcatttcgtatggctatgttctatttgtaggaataaaataaggattaggctgtggagagannnnnnnnnnnnnnnnnnnnnnnnnnnnnnnnnnnnntatagttctaggaactatcgagggttcgaatccctctctctccttttgctttcctctctctcttttcttttgcgtattgaatacgtttgtttctttatttgttttttttgttttgtccccttatctttctttcatagaaaggaatgaatggctcggctagatagaatacccgagccagaacagaaaaaaacagtagaaccctagattgtttcttatggccataccgcctgaaggatttaatagggacttggtgacacaaactaggcgtgccatagacatagttggtgtcatcataaggccgaccctccatttatatttttaatggcggaaatgggccagccctgcattttttttaaaaaaatggagctacttcacatcagctaagggcctaagaactcactcaaggcatataagttccatcgccattattttgtccctttatagttgcacaacactacacaagggcatcaagttagttccacgggcaaaggtccaccaagaagttgaaacatggcatgtccaatgccaacctatccacagtacgcgcaaagccgtaaagatcatctgctttctcactgccagctttgccatcgccgtcacggccggcgaagattgtgccaacaaggacgttgcctctctgctcagcctcccgtagaatagccgcccactgtcccagccatttgaaatcgtccaagtttctttcatctgcctcctcgacagccctgcccatacagatcagcacttgttctagcatttcggcgagctccttctgatcctccactagcacctctgtattttcaagctcctcactcgtgatggtctcctccgtctttttagttgatatcttcagattttgcattggcaatgtctgggtggataatagcctatgaagtgacatgacaataggttcagaactctcctcctccgtcttttcagttgatacctgcagttttcgaattggcaatgtcagggtggagcatttggttcttcggtcgaactcaatatgttgagaacgcttcatccgtttgctaggtctcttctccagcttcggtgagacctccagtataaactcttggatatctggagacagctcccccaacctctccaacgatccattcagcttttccatgtcttggtcgctcgcgaagagcgccttcatggcgctgtgcatccgccgtgccatgccagagagagcactccatgtgaagaacacggcaagggatgcgccggtggccacgccggctctgctgctgccgccgccgctgctttgctgctcatcatcggaagccgcgaagcgcccgataaccctcctcgacggcttctctgagcttctggcgccactggagcagcgagctgctctcgatggcgctccggatcctgagcagcagcacctccagccgctgcagcttctcgtgtgcggtagctggcgcctgcagcctccgcccaacggtggatatcgtccggttagtgatctggccgaccaccgcggaagtgactgcttgttctgccatctctcggtaatgttaatgttaatactcgtcgagtgatcaatctcgccagagatcgatatatatacaacaagtacgttatattctggagagaaaaacgtgagcttgatcttactagtttcatatatacacaacaagtacgtaatattctggagagaaacgtgagcttgatcttactagtttccatcgccttacggtgatgctcttgggacagaggcagacaacaactgcagattggctgggcacatagtttgtatcgggctaaggcctgcaagaaataaaatggtcgtaacgacgtgttgagtttatcagtatgacagtatctggctgtcctatttaaaaaacgccagcactgtctcatctcggcttcttggatgtactacaatgcacaagcttcttggatacagaggagcacagcctcacgccctcacgtggagtcacggttctcatagcatagcgcgcagtggacacgggtgattccttcctgctgctgctgctgatttttttggtgaacgcgtaaaaaaattatacgtcgatatattagaggaaaaaaaattttgttacacagtacaatcgctgctgctgggctgcccgctgctgtggaagctggggagagcagagagcctcctcgccgtgggaggcggtctttgtgggcttcacacgccggggtggtttagatgggccgcaacggagcacgtggaaagtgaccccgtcccaaggcctcttgtaggccgttggaagagattacgcgaaacatatgggcctcttttcgccgatgtgatgtactcaacccacggtcttacaatggggcacggcgccaaccagcaagagaacgaaacgctgctgatccagacgtcacaagcgcaagaacgctagccatctaccaccatgtacagtagtaacacgacgccaacccaaagcttcgtcaaaagccaaggggcccctcgtactacaactctctctagatcgatcgtcagttctctcgctacgcccggcgagaacaacggcgaaagccggaaagagacgtgacaccgccgttccccaccgcacggggcgttacgaccgtttcgccgtagcaaccaactcataatcacacatccatgcaaaaaaaccgatcgagctgtttcccggccgtagcagcagcaaaagtcaatccctcacttctggaagcttacttaacatgcaagtaagaaaaacaaaatccgacgcatgcatcgatccatttctttaatttacggtcaaatcagtcccatgaaaaccaggaggatcttagtagcttaattatctgttgacctactgtgcatgtccgtaatttggtggcgctggcctgaaagcttctccagttctgactttttgcaggcagagtgtgtatagctagtgctctgactaatccggctctcgatcatcagctgatctgcttcttgctggaggtttaactgtgaaatgatggtgtctgctctgcttttccctttgctccttctggaaaggaaagcataaacattgacataatgacaatttcagatcttagtgacgacttaatcttggagatcttgcatgcaattatgtcagggtcaaactttaattggttagtttagtctcgacctctcgttgtgtgcacctcacttagaatggtcagctagctaccatgcttgcatgcatacatgaattcatatatatacaaactggttgaacaaaagctagtagtagtagattagtcagacacttctcctttcgtttaattttaggtgtgtgaaatggtcgttgaacgccaaaatgtctaagtgggcttgcacgagttcaacgtacgtaccaccaaattagctttcctagtcataaatcacaaagtactgtaatgagtactaaaataagtcagctggtgtcatcaattatatattttcgtactccacgattagtccatatatttaatttcagtggctgactaaaaacgcaagccaattatagcttttccagtacacagtattataagcctgtcatatatacacatgatgttgtttcaaaatactactacaaatttactcgtatatattgaactacaatcaagatacatttgggtatttcctccgaccagttcgatttttatagcttctttagtaatagtaacccagtttggtttatgagctatagtgaaacgttgaaatcaatacaattgccagacaaagttttttattaaaaagattgagactacaacaaccaagtttatttatatacggcagctgctagcgcacgatttaaatatgcaactccatgatccacatttgactacaaatctacaaactaatttaataaatactagtagcaaatacattaactattgagtcaatccatagggagcacgcctatgtagaccttggctttgtttggaaaaaaaaaagcaatatgttttttgtttaatcccgtatgattgttatttgcatgccgacgtgaggatcaacctaatccatgttagcatgatggatgcaaaatgcaattaagtatttgattagtaggccggagttagtgggtgcttaccagtgtgcacacttggaccttaactttttcttacttgaaatactataaacaaattaaataaatcctgctcttagtaatttgaattatgggggtgtcgtcaaccatgcattgataattaatttaagaggccatcacatactagggcattgacttgtgctactgtcaatccattggattggattagttgtaacccacctgttttaaaacttttgatttgtatttctttttaggtcatcggaaagataccaagtacaacaaaaaatgttggtgcctcttgtcggctcttgttataatgtcagtatggtaaaagaaaaactatttgatttatggcagatacaaattttgagctggtgaccagctcgagatcaattgcaatgtcgtttaatatatattaaggaataatgattggaaaagaaagtcaaaacgatttgaaaatataatatgcactgtattgtatcgtacgttttcatgaaaattcaaactaatcttttacgtatctgggtcggtacatcgatctgcttaatctgtattgaataccacttgaatgttgaagcccaaaacgtccaacaaaaacagatcaatgaaaccaaatctcaccagctctgtttttttttcctcttgtacgactctaattacgtgacgtattaattttatcaacatgttaacacagagttgagaaatacacatgacgccacgatttggtaaactgcctggttggtctccaacatctgttctttgaccaggagaaaaaaagcaattaattaaagcagaacatatgcaagacatcaaaagggtaagtgagccttttggttaattactaagtacatttatcagggcatagcaaggtgaataattacatgtacttcattatgcatcgtgatgatgcatttcctgtactgtttgcacatgcatgcatgtggggttgcacatgttaggttaagatgttgcactgtaaagagccttcagtttattcaacaaattaccaccttttttttttcatttacctcccaaataacaagacaaagaacgccacagctagtaaaatatttcacggtgaattcagagtttggggcacatgcatgcatgaaagcgaaatggtaatgttttttttttactacctttgctgaccacagctttttaatctccaccggctgcctaaaaaaaattctgccctttgtcaaagcaagtaattaacagcgcagctagctgaatgtgactgtccatctgccttgctatcttgagctgtaaattactcatgcagtttacttgtctcctgtcagctggatagataaacaaaagccaaaacaaggaacagcaagctagctcaaattggaaccatatgttcttagtattttcttgtgtatagctagtttgatggtgagctctccctttgttttccatgaatttgagccatggggtagttgaatgttggggaacaagtgatggcgaccgggaaagggggtgacctaaaagtccatccatgcatgcatatattcaatcccagctgatccccacgacaactgtagtaggagtatatgtttttacaagtcaacgatcaagacgagagacgggtcccattgctgctccatatgttaactcatatggtccagaacactcatcttagccatagacccgaatcagattctttgtaagaggtatatatgggcaatatggccgtataggtatcgagagatactagcaattaatcttgtcaaaatgtcaattatgttataccattttaggattctactcttctaattaagtgtcctaattctacaattctagatattagtatagaatatatgatcttatgatcgtacttagagacctgattgggtttaatttaacagccttactaacagttactagcactagaaagtgtcaaaatgactgtcactctacaaaagatgcatccttaaacactatcataaatatttaacgtttatgattaaatttagtcaaatgtttaaaatttaaaccaccatcaatttttaaatgcttagttagtggaaaaaatatggttcgatatagatttagcttaaaagacaccatctaataccaaatatttattatattttttaaaacataatacaaacacaggctttgaaacacacgtgcactgatcatcatcaaagtttcaaacttttaataaaatcttgtcctagcgtatttacaaagacggagtatattaaaaataagaattctctatcgcgcttaccgctatacagagtcgccaaagaccaaagctgtcatgttgttgagggcaacggacttgatcgccgtgcacgaacggttgggagcggcctgcggtcggagaattggacgaaaattgccagcggcggtgcgtcgtttcccagtccattttttgttgttgcgctccggttgcttgcttgcttgctttcccgtgatgcagggcagcaaaagctgcctccgtcgcacacacgaccaccatgccttgctctgcaaatctgtctttgcacctgcaccactgaatttgtctatggctcttgtctactctacgcacgcatgcatgcatgaacacattaataattttgcttctacaaatcttacgaaaagaaatactgaccattaataataattccaactaaaaccattttttttcacattaggttctgcatgtatataatttcatgaattatgtttaacatggtttgggtatatatttggaatacgtacgggaaataaactaatttatgaggcgattccgtgagatctcatggtacaaaaatacggagtacgtgtgatcgtcatgttgacttctccaaatacaaagcgtcatgcaaccggtacctatctcggtttaccgagtttgaataattaatacgaaaaggtaatccggcgccggccacggctcggaaaccacacgaacgcggtcgcgtcatgggccacagaaaaaactcgaggttattccacactcacccccatcgtgatccagtgattgatcatcagtagtaggagtacgtgccacgaaaggagggcaaaacgaaatgtcgtctcgcgcgttttgtccccgcacactgttgtgtttcccctttgacccgggcaagcaagtaagcaagcaagcaaagcgttcgcgttgccatctactcgtacgcacaacgcgttggtggtcacctgtcgtcgtttgcgccggcgcgtttctgccggtgtttgtcacgcatctgctcgtcaaattcttgcctatttccccactccccagcgagagagcgtgctgagcgaaagcgagacggagcagcaacgaaacaaacgcattcggccagagcttaggtgactcggatcggatgcctttggaatttgcaggaccagatcgttggcaataaagcggtactgcggtagggatccaattggacctgagaaaagcacgtgcagcaagtagcaccagtgtgtgactagtgcagcttgcgactggcacacagcgatatgatacagcgtgctgtgactgtgcgtagctaccaaaaatggaaagcaggttgaaaatgggcacatggaaaagcgcagctggactgttgagatcgaagtcaatactccctccgtccttaaaaaaaagataaaccgcagttttctgtgccaacgtttgactgtccgtcttatatgaaaattttttataattagtattttcattgttgttagatgataaaacatgattaatactttatgcatgacttatttttttaatttttttcataattttttttaaataagatggacggttaaacgttggatacggaaatcagggtttgtcttttttttttaaggacggagggagtactacttacgcaactactactaccgctggtactagtagcgttagatttgatatatatcgagcagcaaccaaccggcgagttccaaaagcctccgatcatccaacgccggccacacgcgagcgtacgtgcgagaagactctgaccgactcaaacaacggatcctgaaatcatctattgtggacctcatcatcactgacccccgacaattagtactaggagaagaggggggaaaaaaagatccaaccgtcccgctgacttgcggtgtgtggatagcagaaagcgtacgtacgttacgtagcagcagcagcagcagcagcagcagtgggcgtgagccgtgaggtgagccacggcccacgcccacgcgcgcgccgtgctgaagcaggagcagtcgggatgctcgcgttggcgcggcgcccacgtgaaccgagggcgccacggctctctacagtctagtacaccccagccacacccgcggctgcggctgcacggccgatcgattcggtcacccaaactgcgtggcagcgtggggggcgcgcgcggatggacaccgcgtgagtgcgtggccgcgggcgcggcgcggcgcgacgatcggctacgcgggcgttggggttggggacttggggtaaacggggaacgcgtccagtggcggctacgcacgcatggaggagtcctcttcggcgccgcggctcgcgagtcgcgacgcccacgtacagtaggccactacgacccgttctccaggctgatgtctccggcgccgagcaacttgtgccgttggggagtaatggggtgtaaatggcgcaacgtaatactgctacttgcgagttgcgatttcacaaaactatagctacattatggattattgtcgttttgtaacaaaactataaatttaagttgccacatgatcactgtagcctattgagttaataattccctgggacatactcccttcgtctcttaaaaaaaaccttctagcaatatgtagatagagtatgtacagattcatgatagaaattcgtttttattcctatgtctaaattcgtagtcagaaaatcatttttatatgacagagggtgtacaatgctatatagatagaaatactctagaatatgtatttttcatgatactattttggtgttaatatgtggttttacgatattataataattttgacgctaaattcttagttttgttactatatgtaattttacaaaacaatttttattttttttcaaattacttcgattgctaggttttgcttctataaatttattactttcacaaactatagctatatatagattgtttctactcaaacgtactcctttctgcgaaagaaaaataaaatccttttttaagctgtaaagttgattttttttatcaatataaatttacggtaagctcttcttcaccttttcttataggcacctttatattttctatattataagatttgtcaaagcacatgaatgcatcacggtgaagaagaaaataaaacaaaattacatccatatataaacataatatagtggccaaattgctttccattggtgcgtacaaatttagtcaaactatctgcattattattacaacataaaagactattttaaaaggtatagaaaacaaaaggtgaaaaagaagaacatgctattttctttctcgatggttgacaaaggaaaccaaccgatccaagcaatggcaactggcaagacaaggtgcgcctccttcacagtgtgggccacacggacgcggggcgcagaaggtcgcatcaggtttcccgcaccgaggcgcccgcccggacccacctcccaggtcccgcggctgctgcctcgcctcgcctttggcgggctcggacgcccacacgggtcaacgcctagaggtggaaaccaccttaaaacgatttttgctacttccgtttcacaaatgtaagtcattctagtatttcccacattaatattaatgctaataaatctagatgtaagtcattttaatatttctcacattaatattgatgctaatgaatctaaacatatatatctatctaaattcattaacatcaatatgaatatggaaaatgctagaatgacttacattgtgaaatggatggagtatatacttataggcaaattttttttaaaaaaaataatagacgtaaatattgtacaatactacaatcatagtgtaattatattgtgacatgtatataactataatataatgtaattcgtgcaagagagaaaataatcacaacccacacatgcgagggaattttaggtggtgttcttttcttctaaagataaagatgaagattaaattttttttatgcaaaacgaggtggtattaacgtatgcttggttgagttttaattattacacacttcaaaaatatattaatatgatattatagagcaacttttatttagaaagttttcgcacgaaacacaccgtttagcagtttgaaaagctttgcctcaaaaaatctttatcttcatctaactcttattggagaaatgaatgcgaccttagcaccattatacattcattttcacaaagaaaatatatcacctaggaatttttaaaagttacatataagttacgctataattacatatcaattttgttatatttacatactttctccgtcccaaaatataatgaaatcagataatcggatagaacatttcgtattgcgaatttggacagacagcccatatagattctacctccatctcaaatatatacgaccatgagtttctatacccaactttaatctcccgtcttatttgaattttttttatgattaatatttttatttttattacatgataaaacatgaataatactttatgtatgacttctatttttaaatttttccaaatatttttaaataaaacagataattaaaactggatacgaaaaattatagctttgcttaaaatgtgtattatattttgggagggagagagagagagagcaggagtatgtccaatatataggtagtcgcctagtccctcttaaaatattccggcatttcaaccccacccactccgcacccccgcaagtcaactctcttccttcctcctccgtgcttaatgctctccgcattataaccacccacctctcctcctccccccacctcctctctctctatctccatctccaccgctacgcttcccagccatgggcaactccctcgcctgcttctgctgcggcggcggcgccggcggccgaggcggccgccacgtcgcccccgccgcgctcccctccgacccggcctacgacgagggcctgggccactcgttctgctacgtccgccccgacaagttcgtggttcccttctccgcggatgatttggtggctgacgcgaaggcggccgcggcggcggagggggaggcgaccacgttccgggcgatatccggggcggcgctcagtgccaacgtatccacgccgctgtccacgtccgtgctgctgctgatgccggaggagtcgtcggcgtccgccaccgcgtcgtcggggtttgagagctcggagtcgttcgctgctgtgccgctgcagccggtgccgaggttctcgtccgggccgatctccgcgcccttctccggcgggttcatgtcggggcccttggagagggggttccaatctgggccactcgacgccgcgctcctctcgggccctctccctggcaccgccacctccggtcgtatgggtggcgccgtccctgcgctccgccggagcctctcccacggtggccgccgcctccgcaatttcacccgcgcgctcctcgcgcgcaccgagaagtttcaggattctgcggatctaggctcgccggacgccgccgccgccgccgtcgccgcctgtgggggcgatccctgtggtctgcagtgggcgcaggggaaagccggcgaggaccgcgtccacgtcgtcgtgtcggaggagcgaggctgggtgttcgtcggcatctacgatgggttcaacggccccgacgccaccgacttcctggtatccaacctctacgccgccgtccaccgcgagctccgcggcctcctctgggatcagcgggagcagaacgtgcagcacgaccagcgccccgaccaacccggctcagccccaagcaccacggcctcagataaccaagaccagtggggtcgccgccgccgcacccgccgctcaagaccgccgcgtggcgccgacgacgaccagcggcggtggaagtgcgagtgggagcaggagcgggattgctccaacctgaagccaccaacgcagcagcgtcttcgttgcaacagcgagaacgaccacgtcgccgtgctcaaggcgctgacccgtgcgctgcacaggaccgaggaggcttacctggacatcgccgacaagatggtcggcgagttccctgagcttgcgctcatgggctcttgtgttcttgccatgctcatgaaaggagaggacatgtacatcatgaatgttggcgatagccgggctgtgttggcaacaatggacagcgtcgatctcgagcagatcagccagggttcattcgatggatcagtcggggattgcccgccatgcttgtcggccgtgcagctcacgtcggatcacagcacttcagtggaagaggtgattgaatcgactcatatcatggttcaatcctattggaattgctgttcttaatgttgcttaagtctcatatttgtttctgcctgaatacaggaagtaatcagaatacgaaacgagcatcctgatgatccatctgccatctccaaggatcgcgtgaagggctcgctgaaggtgaccagagcatttggtgctgggtttttgaaacaggttagttcatttgaatatgccctttttttttgcagaaagacatttttttgtgctccgttatgattaagcgttttgccattggccaagtttcaaagttgcgtatgtggatttattttttggcaagtaatatgcaatttcagaatgacacaattagtcaatgtatgaaataagtatgtgacctgacttccttccttgaatttgggatctgtattgatgataaagcatacggtccaaacttgattataccaggagcggaataattaaggtcagttttgctgctatcctgagtcaaacacataattaaggtcataattaaactaggtcagaaaaaggaaaactggatctggtctaattggtccaaagtttgaaaagtaaagtgagccactctaaattctcacttctttggggtgagaaatatgaccatcctacactgaaactgaccatgtctgacggggacatcataaaccatatgctaatttcaatgggcaaaaacttcaacgcatgaaaactaattagttaaattcttgagtcaccgcgtgtatagccagttcaaaattttgaatgagaagctgctccaagagaaaatgaagtttcttttgcttctgtccaagtacaaagaatctgcttgtgcagtactaaaatgtggccagaaaagagtgagttgagtggctttgaaggaaggtacgtttctcctcccatgcgaagaactattctctattgtcaactgcacaaatctatcttgctgctatgcaagagggaagtctctttcttggacataaagtgagctatctgatgagacagacatggcgatctgcgatattttgtcaatgaagaaatcccccaaagttaagcagcacagagaattgaacaagtgcatgaggcagccctttctactgatttagttgtcggtacaattttcagatagcctggttggaagttgcaaatagttaattttacaagcaaatccatagcgaacaatacatgcatcatttgtttttgctctctgtctgcaccttatatcataattccttagcattttgatctcacaattctctctcttttttaacagcccaagtggaatgatgcactcctggagatgttcagaattgattacgttgggtcctccccatacatatcatgcaatccatccctttttcatcataagctcagcacaagggatagattcttgatattatcttcagatggactttaccagtatttcaccaacgaggaggcagttgctcaggtcgaaatgttcatcgcaacaacccctgaaggcgaccctgcccaacatcttgtggaggaagttcttttccgtgctgccaacaaagcaggtgtgtttgcaaagaagtcaccatacatgtcaaatgtgtcgacctcattttgcagtaacttttgaacttctagaacatgatgctgaattttgtcagtcaatgacctgacctcatttttacatctattgctgttgcaggaatggactttcatgaactgatcgagataccacatggtgatcgtcggcgataccatgacgatgtatctgtcatcgtcatctctttggagggcaggatttggagatcctgcgtgtaaatagaaacaatagtaggctagtgaaacaaaacgtatagagggggttcttcccatgccttccttgagctgagaggtgttcttgcggctactctactcctcttcccccagttgctactgtacaatatcaaccaagcactgtggggggttggattcggcttgggctctcggcacatccagctgaatcgccatgaatcgcccgcagggctggccgcgtggtataatatgttgatgtaaatgaggatttgttcaattattaataatttataaaatcgaccaattggtcaactttctttgacattttgcatgtgtttttgttcatgcatttggggggtgagaatttgcatgtgcatgggagactgattctaagttggacttgatgattctagagaaagggttccttttggtcaggaaccgtttgctgtgttgacctcttaactgatgatagcaccagagctaccccaatttgacctttttttaaggcacaccatcttgaacaattcagcaggcactgccaggttgcctgccttatcagttaacacgatgatccctgggttatccttgccatgaatgaacctaagttgacctctgatctatttactacatacaatcaatgtgcccttgtgaaattaattttgtgtcttggattcagcacctcctcttctgattggctcaaagatcaggtggctgattgctcctcaccaataattgacatttctggccatgtctgcaagtggaattgtagattatttcccacttgcttgcatgcactccttggtttcaacagaaatgatatcaaatgatgaacaaagcttatgttaaaagaaatatatttctatgcaataaaggatgacaaaccggcgcgtataggcgtatatagctttgaatttttttccccataatcttaaaagtgagacatagtcatcttcgaatgttttaaatagataacactattgttaagcaagagaaagtaggaacaggtgcttttctttaaaaaatgtatgtttttttttctgattggttgctagagcgaaaagaaaggcgatcgtgcgagggcattttcctggtcatgtctctccctcccaccactatgcatactgacgttgagttccatttctgcactgcaaagttagaactgttattttccaagcaagggacgcttttttcatacggttgtagagggggtccttcttttaggtacacagaattttctttacggttttttaggtacacagtcacacagaacacatagttggtcatggagcttaccacattaaggacctgtttggtatagctccaactcctaaatttagctccaagagttagatttctagtggagttgtggagctgcttaaatccagctccatctctctagctaattttgtgagagaactccacccagctttgctcccattttaggtggagctaaaaactgtttgactgagcttcagctccaaaagaggtggagctggagctgtgctaaacatgccctaaattattggaaagtatcatacggcatagatgaaatatttcagcatgtggtttccttttccttttacatgaacacagttccttagaggataaattcatttttttcaaaggcaaaacatgctgctaatttgcaaaatcagtagtgcaaaaaagagagagagaaggggggcaaaatttgcattttagacgggcctagctaaaaaggccaagcccaccaatattgttccctttgacccataaaactatgggccatagcccttctgtgcccccgggccgccactcctacttagcagcaacccctctccgccgcctaaaccctagcgccgccgccgccgccgtcgccatcgccgttctcacactccgtcggcgtaagctcacaggtactccccacgatgacgacttgcttctggtgagttcgtgtgttcaacttttgcgcctacgggattcgatgggaagcttttgtttgtgcagggacggtaagatggcgccgccgccggcgaagggcggcgctgtttgttggtctgagatccatcggctacggcttaatggctatgactattgggatctgtaaatgagtaaggttgcccgccgccaacctgattgtttatttcttgtgttgaaaattgaaattgctatgctcgagctcgactgcagtgttaattagtaccgtaagtctttgaaatgctagcaaatcatactagtacgattgtgatgcggctgtgcttgatcagatagagacattttcagaatccgaagatgtcactgtacttctgcgattgtgcttgatcgccgcgttatcttttggtcacattagccacgatgctgaatcagttaacaatctagataccgctttgctttctgaagtatatttgtgtataattgtatactaggattgcacgatccctgaagatagtttttcccttgatggttcttacttgatgaacttggatgtgccgtgtgaagcacatattgtctgtggaaattccaatgactatgtgactatctgttgatctactgctgcatgtatgagaacatggtatgctggcttcagtgctttctatacctttagctatacttgtggtgacttgcaggtgctatgattaaccatgtccttgaaatttatttacacacttgcaaaaaaggagtattttattttgcatatatgttgttgagatcttgatctccaggatgaaaattagttgattcaatgatcaaatttttaaaaccaaaatttgctaaagcgtttaagtaagaaacgctgaaccaagtgccctaagggaattctactgttaggtttagctcatttattttgtgtcttatttccagtcctcagcttttcagtataaaattggtggcgagtcacttgtcttagaagcttatcctcttttctttttctttttgttttgcatatgttacactgttgccatgtgtaataaacatgatgcatgcatgattgagtggctttcccgcagtgtacttatgctgttcattaaagaagttattggattttcttaatctatattgttatcttgtaattttttgaacagcattaatgaaagcaacgagctttcattttccatatgaaaagatacagttgcattatgagtgtaatattgaattttgtttcagaaaactaacaagagggtcctttttgttcctacttgcctaggcaagtagccgggttagcaccacatgagaaacatatcaccgcgcttctgaaagccagaaaagaaagaaaaacgtgcagtcgtgcgctgaaggtagcaaaaagcacactagctagagagctaagacgaagcgtgaggagatggccaacgttgttaggaagatgaggtacgtttcctcctatctatctctctctttttggtggcgaagagaatgttgccaaatttctaaagagaacctgcttttgttcgaaggccataaagtttaagtatcagagctgttatgactctaactaatcatctaaagttggaccaacttgaacacaggccacctttggcttagccctttagaattgagctgtgcagcagtgctatccatacatcgctatatatatctcattcaaaaaacggtcatgtggatgatagtgtaggatcattattgcatcaatactatcagttgttttcattctttgcctacttgaattcttaactgcaatctctgaagaattgacaattggtgcaagttaaaatttatattttcatttttgtctctttgtatgctacaagatgatgttcctaaatttttttgctgctggactttgtctgccaatgtgaggttaatttggtggcagtttttctgttttgggacaatgtaattcttgaaaagaatccttttaaaagaatcatcgattcctagactcgaaattgtggcaaagcttctctttcactaaatcagtgagtataccagctattgctattgattgactaacgatcatgccattaattttccctccacttcaacaatgcgtcagacatgctgtctgttatgtaacgtatatattttcagaatctttggcagttgttgattagtttcagaactgagatttatttaagatgtgtgtgctaacacttaaagatagttgcattgcaatattctgtacacataaacagattcataacagtcataagtcatatacattgaaccaattataaactgcatgcttttcctacaattgaaatcatcattgtatagcacaaggaaaacgagaatgccttgggataaaattattgtcataaagaggttacctagtctgctaccctctactgttgtcatccatttatgtgcaaatggaggtttaggtcatgttatatatggatgtggattttcatcccttgaggggacattccctctttgtttgcatgtcatctaaatagttataaaaaaaattgaaagaaaaaatgacaacatagattaatacgaattatatcactccacaaacatgcaagaccaaattcaacttctataagttgcaacaaaaataacaaattaaagtgaaaatagttatcgcacattcgcagctatatttgttgtttttgttacaatttgtagaagttaaatttaaagttgcatgtttgtggagtgatatatttcatattaatctatgttgccaaaattttttttcatattttttgatgactatttaggtgacatgcatgaaacgaggggatatcccctcgagggatgaatttactttcccgttatatatgtccatgactctacttttcatgatatatgctgtggtgtttggcatcccacatggaagctatccaattattgtccaaagagatgcttgtatatcctgtaggatatagactaataatagggaggtgagagaactattttgggtcttgggatccagcatacatctgaattgttcctgtcaaaatctgccagtaatttttttttgaaacagacacgatgcaatgtttcatattggtatagcaggaaaaatctgacagtaatagttgcactcttgcctgaatatcctctactgtagtactaagctaccgaaaccaacaaatttatagtgcagggattgagaccaaactttgaaatacaatgttgatgttgtgccacccttgaacactttcttattggtattcacaatatactccatctgaaagtctgcagatctgctggagcttctgacaagaaaaatgaaacagtgcaacttcgtgtgaagacatgcgagatgcgaccactatggttgaaaaaaagacattgaacttcggtaaccaggtgtgttcagtataagacattactgtttttcagttagacttagtgttgatgttcgaatgttcgaccatgccctttatagttcatgagcactgctacacttactaaattctcttacgtactaacaatgatttcaaccatttgatttaactgcaggaaatcgaaaggcatgacgcatcagtattagtttttggaaattgcatgaacccacatgtttacactcatggaatttaattacagggactgatttttgtcaaaacattgtatggttaacccccagcagtgtactttagtattccggagctgcatgatagaaattaagctaacttctgcccttattagtattacctccgaatgcatttggcactttggcattggcatgttgtaaggagtgcggttatcgatcctggaacaaacagaacacggtcagtggctcgtctcgtccactcgccacttctaatcaacattctgttgcctactccatactactccctccgtcctatattataaggctttttagattatgcgacacatcttaatactataagatgtattatatgtacccaaaatcttttataatatgaaacggagggagtactatctgctatgacgctggatttctgtcacgacggagttgtggagtgcttccctgcagcgcacatactctctccatctcaaaaaggataatttctggttacgaatataaataagattcgtagctagaagttttgcttgcccgcagcgtacatactctctccatttcaaaaatgataatttctggttatgaatataaataagattcgtacctagaaatttatttattagacaatttatttattagacaggggcgtaagctcctgcctcgccatccaatccgtcgtagcacgagcggctggaaatgaacgaagacgtcacacatacaatccggcgaaaattccaaactcgaggtggtcatttcacctcacctgtttgcagaggcggccaggcaagcgatggatcgaggcgacctgtgtttgttgttgtgcgcgccaacgcgacatgcgctcgcgcggagagattccgtgtgccgtactacgcgcgcgggcaccaccttgcctgcctgtacgagcgctcgagctcgctgctattacgtacctacgcgcgcgccgggaaaaaacgccaaaataccgtgcaatcggcccgattctcccgggcgccgcgtggtggcggaatggaatcgctcaatcgcacattcgcattcaactgttctcgtcaaactttcaacttttcttttttcatatagaacttttctatacacaagctttaaacttttccgttatatctttctaatttcttcaaacttctaattttagcgtggaactaaacacagcctaaacctcatgattttttacagatcacataatcatgatatatacagtaatcgtacgacacagcgagttgctgaatgcttatagtgatagtgcgagtgtgaaggtgaagcagctggtagggtagagggcacatgtcatccatggaggcccaaagtaaagggggagacaatgcaaaggtggtgggcggattggacgggataatcccatttcccatagagaccgcgacgtcgagagagagtatcgtacgttatccccgggcgggtggggggacggtggacgagaatcgaggagggtgcagctgcagtgcagggacaggggaccgatccgaatctgcagtgcagttaaagtttgggcagcggaggcttctccttgacgcttcctcgatcgatcatcctgggcgcatgataaaaagcggctcatgtgcgcatgcatgacaaggacgcttgccgccggcctcgcgacccagagattccacggtcaaatcgcagtgtcgatcgatcaccaccccgtaaaaccacagctacttcctctgttttataatataaggccatgtttagttcgtgaaataaaaatttttggttgtcacatcggacgtttaatcggatgtcagaaggggttttcggatacgaataaaaaaactaatttcataactcgcctcgaaaacgcaagacgaattttttaagtctaattaatccgtcattagcacatgtggattactgtagcacttatggctaatcatgtactaattaagctcaaaagattcgtctcgtcatttcctccccaactgtgtaattagtttttcttttaatctacatttaatacttcatgcatgtgtctaaagattcgatgtaatgtttttgggaactaaacgggacctaagactttctatattaccaacatttatttagatgttaatgaatctagacatatgtacgtgtttaaatttattaacatctatatatatgtgggtattgatagaaagtattacattgtgaaactgagggagcactactactctcgatctggcggaataaagctaagctaatccgacggccggcccaaagcgaagcgacctgccgagaaacgcgaaggaatttcaccccgcatgcgatcccgatccatctcgcgcgcggtggatcgatcgttgtatcccacagaactcgtccgcgcggccgtgtacacgggcgccgggcgcagatggtacgtactcctacgagacgtgctgtgtcgcgcgcgatgcgttgcccactgctactagtcaataatgccaagcagttcgatcgatttgatggtcttgcattgcgtggtgatgactcgatcgatggatgtagcgtctctgcgcgcagcgttcgtcgctgtacgcgtacgtgtgggtgttgtcagactgggcaccaaaatgcatgcacgttcgtacgcacgcacttgcaggagtagtactgtagtaagtacgtcgtccatgcatgcactccatacgatatgatgggcccagattgtttgcattgcacgcgggccagtgtacgtacgtaccatgcatatatatatggagtagtactctggacgaggcagtcaaatttaattgtacgtgcggcagctagtaccattcaatatcgtaccggtcttcgcctgctggttgtacgtaccgtgtattaattcagtcaatcgatcatgcatatgtatcgtattatattgggtttgtttgaggggagcccggccggccggctagcttatctctagctagctgactaaataaatgtacactcttatacgtgcaactaggtaaagtcaaggttaccatacctaaatctacgtagcaccttgtgttttaaaatatgctccatccatctcaaaatataagaacagacgggacattttttagtacaacgaatttgcataagcaggacggagggagtagcaaatagatactagattagacacaatatattactacgaatctaaataggagaagtactagctaagttacaataatttaaaattgaggaagtaattaatttgtgagaaatacatgcaaataatacatatgtacattctcttaaacagacaaattctaatgaactgtgttttcgtcaggcgggtgtggaacaagctatctgcgcttggtaggtttgcattctaatgaagtgtgttttttcctcaggcgggtgtggaacaggttgcctgcgcttggtaggtttgcataacctctttcctgatcagcaataagcggtattccatccttggtggaagcaatcttgtggttggatgcacgagcacctcagaaaggggttcgacgactatggttacttggcagctttggttggagtgaaattctcatgttttcgataacgttattttccaagtagacacggtggtggacatgatattgcaaagaggcgactctgacatgaggtgaaacattcgcgtctctagtagtttttttttcccacttgttctctttaactagctaactcttcctcgccccttttcctttttggagtctgttccggtttagttagcatgcttttttttgcttggtcctcatcccctccataaccgttacttttgtgtcaaagttgtattcaaacttctttcttctatatatatagtagtacttcctccgtttcatattataagactttctagcattgcttacattcatatatatattaataaatctagacattaacatctatatatatatgaatataagcaatgctagaaagttttataatatgaaaagaagggagtagtatatattatagtggttgtgggttgcatctactataactgactctgaactgccctataactcaaaacatgcatatacttcattcattccatattaagtttatcttcagctctctctatttgtcccaaaataagtttattttagagtgatcatattgcattaaatttcactactagaatccaccaacttccctagagccaaatacactagggatcaggggaaaaactctagggaacaggtttccctagggtaaaccctagggatttcgctctagggatccattctacaggaacaacccagttccctagagtttttccaggaaaagctagggaaagacttcgttccgtagagtttcactccctagggacagttgtacatttggcatctgaatctgacgtgtaaagtggatttcttttggttttcagccaaatttggggaaaatattggcatttaaataaaatatttatttcattgttttattttggtttctttattttacggtcttcctttgcctcaacatcaaagctaaaatattactagttgaaataaaaatgccattctattattaatagaaaatactcaattacattgattcttcattttacattacattgattctacgacaatggagctgaaaatattcctctcacaaacatatgatggacacttcagatgtgctgatgaactgattctatcatcgctcagatccaaacgataataaaataaaatacaacacacgttcttgaaagcaaatctaaaccacttgattctagcttgcttctgcaacaacagtggaaagcttgaaacttgaaaaattgcatccgcaaagaactgaagttgaactaatcttctttgttcttccaatgcttcctgcccttgcctcttgaaaagaaaacccgaatagcatgctccacagcccagatcaagataatatgctcatgggcatgtatatgaaagaaacttcagttcgagctcagttggagcaacacttacttggatcatgatggaggctggagcaacagcaatcttgtggtgctcactgcttgccggagtgggctcttgtgctgcacgctatgaagaaagaaagtagaggaaaggagatgagaaagttggatcagaacaactaatgcaagacggagacaacggcgtgcggtgagagaggaggctccgtcgagctcgtcgagagcggtagctgttgggtgcttgctgtcgaccggttgctggagctcgagctttggttgagaaagggaaggggccgccgccgcgcgccggccggccgctgggaagaagaaaaacgagaggatgtggtttgcttgagttgtggagaagataaggtgggcccaaactttactgggcacaaattttgtatgtcgagggcacgttcccaatcgcagcaaggaaaaaaattgaagaaaaaatatattgggagtaatcagaccacgatgctgatgtggagcagctgtgtgttcttttcagccaaagttccctaggaatacttctttcccttgagtttttagtttgcaccctagggatcattttggtttcccttggattgctttaacaacctagggaacattttaaactctaggaaacccattgaattctagtagtgattatagtttgcaaaaatagagaataattgtatcgagagtagataaagtaaagaatatttgcatttggatttgataaagtaggagtattctagtcttttgtttctatattggtatgtgtgagatgggtgaaaaataaatgtatgttgagacggaggtacgtagttggtagtatatatatactataagcatcgatctgtgtaactttatcaggtcgcaattgaccaatgcaaacatcaatttatgtcgttgtttcgtacgtgtcatcaggttgtcatgcatatatacgtcgtactactgtctgcgtgtgtgcagtagtacgtttggatcgatgcacgtatatcggtgagtatatgtgtaacgacatgccacctagctagtcctttggtaaatatgggcagacacattctggtcccccattgagaagtggcctgcatgattaatttgttttctatgaattccatctagctacaagatcatcacagaacagagatccttgtcggccccgctagctagctagctatcgtgtaccttggttattttatgcaggtaggatgtattatatcagtacagtatatgtcattgtattcttaatttgttagtagtaagtagtagcacttatgttaaacaggtataaagatcgaccaccagtgcatatgctaatgtagattatcctagatgatacggtctggatcttaacctttttctctgaaagtgcgagtgggcaggatcttaatatatgggaacagcgttgtactactactcttgtaggagagaattaattgaagcatatgcaacccaatgcctagctagatctctcttgatttacttaaatatacagagtcctaaacattcgcaaattaatcgaaggaaattaaaattgatcgagtagctttactatagatacacacacaagtacaagccaatgcagtggcatcagattcttgagcattgggatctctgcattcatgtacacgccaagccgctcctgattaacctataatttagaacatacattccttggcaccttccctgggccaaaaccaattagtaatactctcctagaatgtatagagtttcccagtttgccatcactgtattatacacttatacataatgcatgtgcatgggtcatggggtgcaagcttacaacttgcaatgtatgattgtgctcatgtgatgcaacgtgagcccaaccacagtatctctctgtcttagactcgcatacacacacatgtatgcagatatatactgcacaattataagttgtaaaactagataaactactgttgttgccgcgcactagagacgacacggatctacttcctccgtcctaaaatgttgctacctaaaggacaacgaatctggacagaacctctctgcgacggaggtagtagctagctactagcaagaagatgagtaaccatgcgagtaaattatactccctctagctaccttcaaatacttgtcgatcgccagatattatttacagtatctttaaactttgcacttatcttcttttaaagaaaatatgcttatactcaagtattccatattaatgaaatgtattgtatcctaaatatcagcgacggaaccataaattattgaagagggagggctaatgtaggacttaactaatgaattgttaattttctcaaatttacatgcatggtgatttaagataatttaatcatgattttggaggcagagcctacggctcaaactctagctgtcttagagctgtctccgcccctgctatatatatagggtgtgtttagttcacgctaaaattgaaacgatgtgacgaaaaagttggaagtttgtgtgtgtaggaaagttttgatgtgatggaaaagttggaagtttgaagaaaaagttcggaactaaaccatgccatagtatggtcatgaacttttgtatatcgtggcataaccattatttaaaatctattgatgaccaaagttaaaattatattgttcaacagctggagatagttattcgaaaccggaggaattgaagtacaaaaattacaattcaattgtgtatttgtcgttcacatttcaatccatacaggtagagggccgtagcataggacccaagcagaggagaaaaaagtaagggtctctggagcttgggagggaggggcctggtgtataaagctaaagctgccattttttctgatccctctctctatgcgtgtgatttgtagtacagtctgacaggaatctgatacccctggcctgctgtcctgtgctagtacctcccatttgaagatcaccacctcaatcatctctctctccactctcacccacacatgtacacacactctctgacactgcacacacgcgtatgaaaattactctctccgtcccataatagatgacgtttttgactttttatttgcaacgtttgaccattcgttttttttgaaaaattagtgcaaatataaaaaagataagtcatatgtaaagtacttttgataataaagcaaatgacaaacaaaataaataataatttcaattttttttgaataagacgaatgatcaaacattgacaaacaaaaactcaaaaagacaagtaatatgggacggaggtaataactagcatgaatttgatgtctatactatttctgcttccagctctgaaatgaatttgtgttgttctgaaaggcacagtagcacactactgggaatttctcgattgcaggagaaaaaaatgcaagtgtctaaggccacatgcgatgttgcgccaagcgagatgagagaggccgcgacaacggcggaaagctagaggataatcgagcgccatttgattgatccaccaatatcgatacagatctgtgtcgacgacaaattaaagcgcagggcgagcgcccaagaggttagatctgactagctggtgtaacagttgaaatggatggttgtaagtgcatgcacactacactgatctttggtacggtgtatagtgatgtagtctgtcatatcattcatatgtaatcaatcgatatatcttacatcttgatcaaataatataatctaacttgtataagttacacatcaaatgttaatttgtctggtttgtctgcattgaattttttgctatcatgcatatattgatgtctgattctaaacatgaattttctactaactactaatatcttttacgctaaaaatctacatcttaatttaagttcagcccgaattaagctctgtgaaatttggggctcatggggaggcaacaagaggactgaaatggtcggtacataataaactctaattaacgaacaaaaatcatgcttcgatgttagtgcagtgagaaatcataggtacaaaatttaaataacaggtaaatccaaataagatggaaaagtggaatacagatatgctatggaagtaatttctgacctaattttatttattttatgccacttggattaccctatttcgatttagtctcctcatttcttactcaaaatattccttgacctacaataactagagagagtcttgagagaattttatgcacaagtccactagtcttcacctatacctttctttatatgaagttgtatactccatccgtcccataaaaaaccaacccagtattgaatgtgacacatcctagtgctatgaatctggacatacatttgtccagattcattgtattagaatatatcatattcaatattagatttttttttgggacggagggagtatatatctacggtagctaatcgtcggagaacaaaataggcgaacatccttattcctttctccattatacattgttatatccctttctagttgcagtgtgtattcgataattagctaggtctctgttgtattttgtcaatataaggaatcatattctatttttgccgggctcagcggaaactggtataacaaattaatatgcgtgccaagatggtgaaaggaatatatattgttctctctcacagtcgataaaatcattgtgactcgagtgtttttgacatataatgttggaattcaatgagaatctgcttgttgatttatacttcctttgcttgaaaatatgtatatatataaacctgaaaagaaattttcatttaatttccccctagctagttattctaatgagctactccctccggttctatattaattgacgtttcggataaggttgaggtcaaacctttataacttagactattaataactttaaaaatatttagtttaaagaaactagaacaatatatatagatttgtcttttaaaatactataataaaagtaaacatgcatttatttattatatatattataatagaaacataaggtcaaagatgtatcatcttttagaccgtgtcattgtccaaaacgtcaattaaaataaaaccggagggagtatttatatagaccttgaaaaatgataaggatgcaaagaagaagtgcggctgattagttttgtgattgcattggaacttcaatactattaatttacataggatcatcagtgatggtcttgtaattaatttgatgaaatccaaacatataaacacatggggtcaaggtgaggtcgtagcctttattccctctccaagaggggaagagtactgcattggactgcgcgaaagcagacgaaaacttagattccctcagacagcgacaggcaaacaaacgagagagagattgagattgaggctatacatccagcactgagcttaacactaattaattaattggagtgccaggataaatttaattacgaaattttaattttcatcgtcaatgaccactaggtggcactagctagttagctctctctttagttactgtacattaacaaggctctctctctctgctgcgctatatgagctgcactgcactgtgtggccggtgtgctagctagcttctcctgcatgaagtaatcagcttagcttctacataaacagacaaacaatcttttgctttccacattgcgttgtctattacgctttcagaattcagagatcagaaattcagagccttgctagcagcagctagcatcgatatcgtagatttatctcctaaagtggtaggcaaaccacggcatacgcatcaattttagcgcgcgcgcgaacactatcgattcatcgtgattcgtgagtcgaccatctccttaattttttcagttcgtcgatgctctatcgatcggagttagtagctatatgtcaacaattaatgtcatccacgatcaataatttgattatatcatttcaagttttcatatgatcatcgatcaaattaggtcaagtatatgatttaaccctgactggtttctcttgatggacagtttatgctcattcctgatgcatatggtatggttgttagctgtcggggaatttctgcattctggtagtggcataggcaacacatggtatatgctgcaagcttacccatacattgaaacagatagctagatttatatatattattgatcgagtattctggaatcaacagacaaatgaaaataatcgaattaattacgatacaatatatctgctgctgcaggttgagcaggatgaatatgcacactttgatgtggcattcagtcaatggccggccggttggcttcaaacctctagaaatgcaaagctactgacggccggccgttgccatgactcccatctcctctcctcgatcgagtagctaaaggtaaaaagatggcaaatggggggccaaaagaagcaaaagaacaaattctttgagcacaactaagcagattgctcgccatttcctgcacacttctgaattgcagtcagtacactagctagcttggttactggccggctggccccttcaattcattcttccttggggtgtgcatgcacatgaataaatgtctgtctctctgcctgcactgtggggacatttgccatgattaccgtggtcaggggaaaaaaaaggctttgaatggagattggtgcttggaaacctagaaacctacactatctcattcccatctcacatagaagagagatagagagtgaggagagatgtggctaatgctactagctaggaccatatatgcatgcatggagaactgggtcactatagtgcatgcatgatcactgatactgcttatactatgtgtgtatgtgtgtgtgtgtttgtgtgccgtcagaagtctgtgtgatctctcaaaagatgagaaatggaaccactagtttagagcttatatggatccctcatgctccattctttgcgttggctatagttgagccgcatttgcaaagattcatctggatagctaaaggaacacatacattatattcaacatgtgtctgcataatataatagttgcatggatgatgtcttgtgttcagtacttgcaaatatatgtgtgaatattcgatgttggttattcatcaaagtactgtatgcgtatgccggcgagagtgggtgcagaagatgattagcaaaggatcattcttgtatgcatgacctagctagctagctagcttaatttgtgtgttaacaagtactacaaatggagtctatgtgcacctatatatatgtatagatgcacatatcatctagtctccacaagacactgaaagtgatcatggtttcctaaatgtgcataatctcttctcttttttttggcaaatgtttgcagaattggagcattgccaatcacgaccttattcattctgaaatgataaagtgtgtaattcaatgcaacatcatcactgatgtgtgtgcatgtttggaaacttcttctcaacgatgcatatacattaataatactttggtgaagtaaaaaacatcgcatacatgcatgcattattatatgcattacatcaagtaaccgacaaccatatatcaaaatgcaattcagctagctcacacatatgaagagattgcatgcatcattatatatatgtggaccaaattaaattaactaactcccattgagtactctcgtagtcttgtagataaatatatatcaccttaattccaccatgaacacattgcaccaatctagtaaaccttacctagcaacagcatatatagcaagtttacaacacatattgaaaatggagaacaatatagagaggagaaatataatcccaccatcttatacgcgacaagtacaagaaccaacaagagaagcagaaagagataagaacagcgagaggaaaaactcaaaagcaaaaactagcatcgcctagcatttctctagacaaattgggtttgaagcagctcgatcgatcacgaacaatatatatggagatatatatcaatgcagccctaatcttgtacttgcaccacacacaactccttaattctcctttgatctttctcagagaagccatgactaaaattaagcttcagggctcgttagggttctacctcttttgcagcattgatccattccatcatccatttcgccggcaaatgcgtcgtgtcacagtatgttccccgacgacgacgagttgaatccggagagatcagcccatccgccgccgctgccgccgcctcccggagcgacaccggcgccgctgccgccggtggcgccgtctccattgccgccgggtcccgcgccgttgccaccgccccagaattggaggttgccggggaggcccaagaactccctcggcgagctgttcatcgccgcggactgagcgttgctgtcctccatcttgacggatgcgagctgcgtgatcaggcccgacgagccgggcaccttggtgccggccagcaactggccggcgaagccggcggcgtcggcggcggcctccgcgtcgaacgggtaaatgccggacattggcggcggcatggcgtcgttgcggctcaagaaggggaattgctgtatctgcgggaggcgccactgctctagcccgatggcggc

SEQ ID NO: 8773 - DNA, 65934 bp, Oryza sativa
tcgaattcctgcagcccttacctcctcgttacttagatcaaaaggaaggttgcatatgaatattgtcctatccagcccagcgtgttgtttcttgaattttgaggcaggaagggtgttttcctcctctgccacacgtttagaattttctaacttatcagctgcaggtacagatgcaggtaaatgtgtctgcttctgtttcttttctgatgtatcttgttctgtttctgtatctgtatcaacatcagaaccctcattgccagatggttcagccttctcagatgacttgatcaaattttcaagaacctttcttgaaatatcaatttcagtttcaaaatcatcatcagcaggacgattggaagcttcctgatcaagttcatagctatcatcttctccaacaagattatcttcagactcctcatcactgcctttgtcagacacatttaccagctctgtagggacagcaaattcatgatattgcatcttccaaaataatagctcagaaagcacaaagaattgccaggattagcagatgagacacagagtattaaaacatttttaattatgaaacaaataagccagttgatcatcttaaacaacatgaaccactgttcgcctaccataccaaagaaatggcaggtacctttgtcaaaagccaaaggtccatgttagaatagctgaagcgtatcattgaagtaaataaagatattgcaggtcacagaacaaacgaaggccagaactaaaataatagatacaaaaggttgtatttaccatcatccttagcgctggattttgcagcagcaacagtgtatactttctttggaacagcccaatcaacagccacagttctctttgcaactacttttccgttaacattttttatagcctatttaagagaaaaaaaagcaatattaggacttccaaagattttttactcttactgaacagggtactgaccatacattttctgcatcctgcttacgtgtgaaagatacaaaagcaaagccttttgatgtcctgtagaagaatgaatgaaatagtcataatttcttgtaatttgtttaaactacagaagaagtaaaggattcaatgcaaaacatacccgttatcagacttctgtggaatggacacatcccatacaaatcctgctaaactgaacatatccatgatctcctttactgtaatctgcaataatgaaacaaacgcatataacctctgttatctgttttagataacaaagtttggaacaggtgaagttttgcatttcatgaagcaccttgaatggcagattccggactatcactctccattttctgatcttcgagccctgcatagcaataagcaagtttcaaacagctgcaggtaaatggggaaatggccaaacagagaaaatgatagtggttcgacaaagtactgttaaacaccatgcaacccttgtgcagaagacagacactcatcaaccaaaagtaaagattttaagtaatctcattctatctcctacccacctattagcacaacagctcaactagccatgcaagatagtggtgcattataagcagagctaaagctccagtatatctattgttccattcacagaataatattaggatctttcaaacggaaagttctttaggtagaagtccagaaggccctgcttttatagaaagcacaggtgactaaatctctagaggcttgtacatcttttacagatataaaagagaagttagtggtagttacggtagtattttaagatgaaaaatatagtagtgccttttgtaaacaatcaaatcattccgtcatctacttatgtgtatatgcatgtagtcatcgaatctaatgtgaatgaactatgtaggttggggatactgtttttttttctagtttaaaacttatattacatttagtttagatccaatgcaatgaacaggcaccatgtgtacttatgagacaatgtaactaaatatatttgaaactgtagtcaggagacctgtaatgtatgtggtattcaagacatttccaggaggcacagctgcaggaggttactgttaatttgagactccagaacttgaagttccaacttccaacccatttttaattagcacatacccatccgttttgaattatcgtactaagacatgataaccaccttaggttagaacataaggacaattacatacaagcatacagctttgaggagcaactaaatgtgagcacgcacactactgcactggtaaacaaaggtgaaagaaaaacataagtatttgaaatttgtttaatcacagaatagaaacaagacaatcaagctaaaataatgaagtaatggcagcatatcaaggtaaatataatgcaagaagatacctccccaccaagttgacgagcccaaacaactgctcccttgacctccttacggtgcaagtgaacaactgaatcccaggctgatgtcacactagcaaaaagtacagctgctgcatctgttgtgcatccatctcgttcaagccctgttgagaatgatggtcatattctataatttacaccaattcaagaacatgctagtggtattaaaggaaaataattgtgtacttggagcttggaaaagcaaacgatacagaaactaaggtaaagacgtgtcctgcaaaagtacagcatgaactggaaaacagaaaatatgagatataattcaagactactacaatcagccttaactttcatgtcaacaaaataatttgactcaaagaacttccaccagagcaatttcgacctagtgacatggtatacaattaaaaaaagaactgaaaaaggagtagattaggaagtcataccatggagctccatttcctctttaggaagtgaatagttgacagatacaactgtgccaatctctccagctagacgaaaaacttcacttgccatagcaaagtctcggagaccaccgaatatcacagtttttcaatccttcatcataatcaattgcatatgttatattgtcgcactgggttaaactggataaaaataaacaattacagcatatatccttgaaaaaactaagaatggtgaggtcatgaaaagcaaactagaacaggatggcaaaatttcagcataattacttcaattttttttaggtaatgctataatgccttgatggtatagaatatttgagtccacacctttgcttttctgagcttttcaccttatcagtattgaaaatactaacttcctttgatactgtaatatcctttttcaacaactgtagtggttctggttcagtaaaacatgatgcatcagaaaattaaagcgtcgagaaaatttaagaatggaaacagtgctggaatctgggtaattttcctttcaaacctgcatcttttttatgagaggtctccttatgttttgcagtagaagtatcatcttcttcatttgttgcatcagcatcctgggcttcatttgttgaatcggcatccttggcttcatttgttacatcggcatccttggcttgcatggcttacatgcaaaagcagccaggcgatcagaatctcaatcaattgaaattcagaagcaactaccaggaatagagatttaccgttttccttcttctgtaaacgctccttcagtggagcacgatgtgttgctagcttaactctaatttttctaccagcaacagaaaatccatccttttgctgaatagatcgctcagcatctttaacagttgcactgtattaatgtaaacaagtcaaatatatatatatatatatatatatatatatatatatatatatatatatatatatatatatatataaaacaggttacaggccagttttgtatgccttgtgcctagatcattttcagcagaaagatattccttcatgaatgatcacacatgacacatctgtatttgagaaaaaagaatcgagctatatcaaccaaactcttatggtttcgcttgttcattagtgcagtatataatatacggcgaaaactttgtgcagtactccttctaataagaactaactattggtttggtttatcttctgttagggacctgatagtctgatactacacagtaacacagacacaccaccactagagacactgaacaatgaatttacgcttagcattgagaaatttgctcactagaccagtacactcacgatcaaaagcagttgtggaattctggaaatatggtaaagggaaacgcattttcattgaaaacacctacaaaagcaaccactgatacttacaactgtacgaatccaaagcctcggctcgtctccgaccctgcattagaaacaaacattatcgcataagcgaagcccttaataataagcaccaccaaacaccaaacaactctggctaaacagccatggaattcctgaattctcttacctttcggcgcgaccatgaagcagcgcctcaccggcccgacctcgctgaacaccgcctcgagctacataacagcaatacatcacatcataccgcgtaccacaacactgatccccccgaaatagcacaatcctaaccccttttaagcttcgcagaggagaaaaggctaggggggcacacgcttacatcggcggacttgaaggtgtacggcaggttggagacgaacacggtggaggggctgtggcctccgccggcggccgcgtcgccttccgtggctgctcccccgccgccgcgctgcttccgcttacccatcgccgctcgccggtgtcgcgggggaggaggaggcgtgtgaagctctccagtaactcgacgagggcttttgtgggctagggtttaatgatgactagatgggctggaccgccgccacccagctagctccagatctctccgcacctcgctctcgcgatcagaagctcggtgaggcggtgaggccactagcttagctggggacgaggatgaagcgcgctcgccgcagctcccgccggcgacgacgagcaaggcggccggcgtgcgtgaagcctctacgtcagtacgttgcggtgcgttgattcgcaccggaactggaaggtccaggatggatgtgtcgggccgttctgtgggccgcttccagcccacggacgtgtttgcgttggaagcccatgacaaatacagccctacaggggagttcgagattctgagaactaacatgcaagaatgtaaaactggaaaacccggtttctaatcacttttagttagttttttggattctattattgtagatcttaaaaatctaggaaaaattttgaagctactccctccgtttcatattgtaagaatttctagcatgcctatattcacatagatgttataataaatctatacacatcattaacatctatataaatgtgggcaatgctagaaagtcttatgatatgaaaaaaatgtggacaatgctagaaagtcttatgatatgaaacggatggagtatatgttataggaaaaattgtgactgctaaaagctactccctccggtttcattttaattgacgttttggacaacgacactgtctataaaatatatctttgaccttatttttctattataatatatataataaataaatgcatgtttacttttattgtagtgttttcaaagacaaatttatatatgttgttctagtttctttaaactaaatatttttaaagttattgatggtcaaagttataaaagtttgacatcaatctcgtctaaagcgtcaattattattattatagaaccgaagggagtattcgaatagtgcatcggatcaagcagacgaactcagcttgtttgtggctggtacatggtcaagtctcattgtttccttatcagccacaacaaaaatgtgaattttgaaacgttgattttgagatttttttttttaaaaaaaatcagtattggcttctaaatcgctaatacacagctgtaaaagttttgcctataaattcttttggttgatttgtttgtttttctaaccgcttatcaaccattgagcaaacgatgagaggcttattctcatggaatttcccaacattacgtttcattcgattcaacagacacatcagacatcatgatattcttgtagtaactactttgatgtagttatagttccagaaacttgctcgtacattcttttcgctgatatggtttactaatccattcgataataacaggacccatattacaagtgcagtaagataaggaatccagactagcacatatacacaccaaaatagaagaacacccaaaataaaagggttggaactttattgctaattgctcataggaccattcatagctaagtccaccaagtcagtctgatttctgattcttttactcttttgaagggagtcagagaccaacagcagcatctcatttcagacatgtttacagatacttctgccatctgaaggttgcaaagtacttgttgctatcttttggaactggagataaatcgacaaggctaacagctactatgcattcttatgccaaagggatctgaaaggcagctgagaaagccatgaggattcagagcgtggtgatctagcggcatgagaagcgtttgtgccagtggaagcgtcctgccaaaactttagaacataaaggctttcttcttcagtgcatctcttcaagagaacgcgtgatgcatagcccttctcattcatcaaatgacagatatccagaggatcgttatcttcaagagcaatcatatacagccaccctctttcagatagcagctcacgcacagcaggaaggatccgatcaatcacttggcgcccgtttatacctccagcccaagatgaagcgatgccattggactcgatttcttcctcaggtgttggtacataaggagggttcacaacaacaacgtcaaccaaaccatgcaggcgtttctcaagacctgacacaatatcagtagcaatcacgtctgcatggacgccatgggcttcaagggttgcttgagttgtctccacagcatgttgattgatatcagtagcgaggtactgggttcctgagcctaactgcctgagcatgattgctagagatgtgataacatagccactgccacatcctatctccatgcataatcttggctttagcgtcaaaagttgtgctttgtcagaaagaagcgcatcgacaagtgcaaaggaatcatcacatggttcatacacctctggatggcttgcaacgagttgaatctgtgcggtgtttaatgtccttcctgataaagactgcaatagaaagtgtcaccatgcggatattaaaagcaacatacattactcaaataaattattccttactgaaaacatgtaattttactgagataacttgggctgaaggtgcttgtatcttaaaacagtaaacgacaaggaaacaaatcggacaacttgctatgacggaggacaatacaaaatacttttttttataaagcaacaagagcaattgctcattgtacaaatgtcacctagacctcatgattcctccgactgtgtttttcttggatattagttttctgttcaggacaataatgttgcatgtactagacaagctccattgctatgcttggattgatcaggaggggaaaaaatacagaagaaacatgtatgctcatcaatacatacaaagaaatttgtaggtagctaaactgaactgtggacagctcatttaaacgttgtggtaaagcacaagtttccaatagggccaggaatcaagcaattagtgttgacgtaaagctagcaatcagatatatcagaatgaaaagaaaatggttcagacttcagacaggggcacagggctaggcatcataaccaggttcatcgaacaaaaagaagaatcttttgccttcacagtctttcttcccatacgactgtgccggcttagctgataagcgttcatccccatatcctctgaaaagcttattgcctaattgaagccaacagaatctaaaggcggcagtgccgtatttcagcgatcttgttctttttcccatcccatctttcacaagaatccaaattcgatcgttacaaattatgattaactgcctacagaagattggccaaggattcagattccaaaaccaaatccaagctaagcttcgccaagggagattgctcatatggagattcaatgtcgcttacactcatcgcccgatcccaaagaggagaactgacacgggggaggggagggactgaaaaggagagctcaccttgcccctcctggggagccccttctcgtcgctgttggtggagagctccgacagcctcccctccaccgccgacaccgccgcgctgtcgccgcccgccatggagcaatcggagcagcaagaggaggagaaagccggagcggcggagagagagagagaggctgcggcggcgcgtgcagttgcctattggggaaaaagagaagagagagagatagagagagaagtggaagggccaagctggtcaggcttagccaactcgagtccgactcgctcgcgtcgcacccgcgcctctcggagtccgactctatccactcccgcgacgaaaaatctctccccaaaatctactacgcgaagggagtggaatcctaaacccctcctcttcctcctcctcgtcgtcgtcggcggcggcggatggtggatgctcccatggcgctcgtctccaccaccgccacagtcgcgtcgccgtcctaccactactgcgacctgctgttcccgcccgcgaggaggtggtgttgcagggcgaggagacgcggcgggggcggggggcgggtcgcggtggtggccgcgagggcgccgagggaggcggcggcggcggcggtggtggtggagaatggggggcactcttacgaggtggagtcgctgatcgaccggctgagcaacctgccgccgcgggggtccatcgcgcggtgcctcgagacggcgcgccaccggctcacgctgcaggacttcgccgcggtgtaccgcgagttctcccgccgcggcgactggcagcggtcgctccggctgttcaagtacatgcagcgccagtcgtggtgccgccccgacgagcacatccacgccatcgtcatcggcgtgctcgggcgccagggccccgccctgctcgacaagtgcctcgaggtattccatgacctcccctccgagtcgcgcaccgcgctctcctacacctccctcatcgccgcctacgcgcgcaacgcgctgcacgaggaggcccgcgagctgctcgaccagatgaaggcctccggcgtcgcgcccaccgccgccacgtacaacaccgtgctcgccgcctgcgctcgcgccaccgatccgccggtcccgttcgacatgctgctcggcctcttcgctgaaatgcgccatgacccttccccctccgttcgtcccgacctcaccacctacaacaccctcctcgccgctgccgctgtacgcgctctctccgaccagtccgagatgctgctgcgcaccatgctcgaggccggtgtcttgccggacaccgcatcttaccgccacattgttgatgccttcgctggtgctggtaacctctcccgtgtggccgagctgtttgccgagatgtcagcaacggggcacactccagacccatctgcgtatcttgggctgatggaagctcacacgctggttggtgccactgctgaagcggtagctgtgctgcggcagatgcaggctgatggctgtccgccgacagctgcgacataccgtgtcttgcttgatctgtatggcagacaggggaggtttgatggcgtgcgcgagctcttccgcgagatgagaacaactgtacctccagacacagccacatacaatgtcctgttccgcgtttttggggacggtggcttcttcaaggaggtggtggagctcttccaagatatgcttcactctgaagtagagcctgatattgatacatgtgaaaacgtcatggttgcgtgtggtcgtggtggactccatgaggatgcaagggaagttcttgactatatcacaacagaaggaatggtgcctactgcaaaggcctacactggcctagttgaagcgcttggccatgcagctatgtatgaggtcagatgttgtatcatatattgatgaattgactcttaagataccccttttgtgataaaatgtttcatgatgttatatttgattccaggaggcttatgttgcattcaacatgatgactgaaattggaagcttgccaactatagagacctacaatgctcttgcaaatgcatttgcaaagggtggccttttccaggaggctgaggccatcttttctcgaatgaccaacaatgctgctattcagaaagacaaggattcattcgatgctctcattgaagcgtattgccagggtgcacagttagatgatgcagttaaggcatacatggagatgcggaagtccaggtttaatccagatgaacgctcccttgagggggtactcaatgcctactgcatagcaggtgttatagatgagagcaaagagcagtttgaagaacttcagtccatggtgactgttcctagcattattgcttattgcatgatgttgtcactctatgccaggaatgacaggtaactatcaaagaaaccttcatgctgttttaattaaaacttatgtggttctgattgtaaatgtaaagcattgagagtgataaatagggaataactttaatcaactaaactggctggttttggggctgtagaaaaatatatttggactagctatgtggggcccaaatgtcagccacaaggaatgtttaaaggagtaaagatttgattaatcacataaatgaccataaaaatatatttagatttgattaatcactatatggaatttgaaatataaattttatatatgaccataaaaaaacttcctctaagtaacatggggctaggtctaggggcaatcgcatgtctgttttgtgaaattccataaaatttgaatggcggtttgatagattaggaattctaccccctttgttggtccagttaacttgatatgccatatgcggcatgtaatgctgtaagtctgtaacacacttgttgctccaatcttgcaattttactctcatttcatacgctgcagaactttattactctaccgattcatatttctagagaccacttgtttctttatggttcttgaggggtttgaattcatatttgtaccttaaaatttgagaaagatctgggctgtgatatctttccttttttcctttgttctctcttcctgttatttatcctgcttaaatcatttagagttttgaccagcatcattcaggtagcattgataggcacaaggccaaaacttgaatactttgatctaaaagcacttaatattagaacaacacaaggtactataaatgatgtggacatcaaaatttctagaatccttaaaatgtaatgaaactacaacataaccgatgtacaatttcaggtggacagatgcttatgatctgttggaagaaatgaaaacaaaccgtgctagtagtacacatcaagtgattgcttccatgatcaaaggggagtatgacgatgactccaattggcaaatggtcgaatatgttcttgacaacagtaacttggaaggctgtgactacagtttacgattctttaatgcactccttgatgtcctttggtggtttggccagaagggtcgagctgcaagggttttggatcaagcattaaaatatgggctcttccctgagttatttcgtgataccaagctggtctggtctgcagatgtgcataggtaatattatttatcactctcatctggttctgtgagtgatccagtttttttattcgtcaagcggtgcttaaggttgtttgcatttgcaggatgtcagtaggtggatcattagtggctgtgtcagtgtggctcaataaactttatgatagactaaaaggcgatgaagatcttcctcagttagcctcagttgttgtattgtaagcttttagcttaagatttaccatgttctatagttatatcatgatatgttctagcactgttctggaatcgagttcgtgattcccatgattatttcttgtcttttcacttgcataaagaaatgcaatacgtagctacttatacatttttccgtttgctctaattgactgacagttctctgattgccaggaggggacaaatggagaaaagcacagttacaaggggattgccgattgcaaaagttgtgtactcttttctgaatgatacactatcatcatccttccattatccaaaatggaacaagggacgaatcatatgtttgaagtcccagttgaaaaagctccaggcagccatagattcttccaatggtgctgcaatttctggttttgttcccatgacaaactctcatttgccatcccctggttccaaattgtacactagggagtcccaagctgataatggttctgcccatttgactgatgaaaccttggtagaagaaaaggaatcagaactccttgcactgtgagttttcaggagcttgctgcctccttccttttgcagatgcgatgttatctggccgaacaagggaagataagacacagaatgtctcacaattttgaagtttgggcaatcagatcgtcctaatgtgcaatgagatggccttatgcctttgcagtgctctcttgcttcactatatgcagtggacgtgactcccaatatccacaatcttgcctagaacccagcacataagcatgagttcgtgatactggatttgcgctaacttgatagacaatgctggacttccagttgtgtttcaggatgtagcacttagtagggagaatcagagtatgcatgttgttgttagttgctcacttgttctatatgacatttcgtgcctgccccattcggcaagaacgaaccctgtctggaatatatggattcactcgatgcaagtaaaacatgctgatgagtcagtggaacacatcagtcatcgatacgtttctgatggaaataatatcgggagtttgtatcaccgtatggttccagttcctacatgatgtatcagtgtgcccgatctttttaatgcaagctgccttctaaaaatattcttgtgtatgatgctgccatgctggtgtttgtttttgaattcgtggtgtaagatcttgaaagcttatataagtaacaaatatgaaggtttaatttgtgcaatgacattaatagacgtgtcaagaaaatacttttatgtagttatattttatataattcgtatgaatatatgatcagagaagagtatgtaatcaagcctgtgcgagcgagtattttgtagtaaactgtaatgatataatcaagttctccaggcctccagctaagtgagtcgaaaaatagtactccagcctgttttttttttaccttatagtctttttaaaaaaacttattttaggatgtatttttttcgtagcgacaacatcattggcgtcgtggtctaacatgacggcattaatgtcattgacacctccccccttgcctcctaaccccactagtgaaagctaagtctaatctatactttatataaaattataaccaactaattccaaagcttaacatgcaaccatgccacatcatcacccaccaacaataattacatattcaacctcatgcaagcatgaaagagcatctacaatctatttaattctacaaattaacatgcaagcatattcaatcaccatctctcacatcatttccctaatagttttacaaatatctttatcatttttatattatttaatatatatacttatcaacatgttctacattaaagtgtaaattttatttgtttcatggtaaatattgataagcccaaagatttgatttttttttctttttactcctagctgaattataacgaaaaataatattaaaatttacttagtaatttccgaagcaaagcgcggggaatcccctagtataaagtatatcgacgtcgaggacatatttgtgatttttttaaaaaatgatctatttataataaatatatttacatttagaccctcgatgtgtcatcggcatcgaaaacctatttgtaaatatatattttttaattgcaaatatgtcattcgtaatattttttacaaatagtaattggtgccaatgaccgaccccctttatattagttacttaacttttacttttgcgggtgatagggacaatgccaacgtcgttgacataatcatgttagatcatgacgctaatgatgttggcgccataaaaatagtctattcctgtaataagttatttcatgggtctatttataaaataagttttttaaaaaataatcaaaaggtaaaaaaaatccatgttctctagttatgtaattggatcatgagtagatatacatgtgtgctagcaatagcaagtttaactttttgactaaaaaccgtaaattttcaagcgaggtaaattttcaagcctcgcacgggataaaagtagatttcgagcgaaatttcaaatgatttttaagaggtcatacataaatcaataaaatccgacagaaatttaattgaaatttgccaaagtttcatgttaccaagtcagaatcagggtttactaaactattttgggtgagtttaccaccaccccataataagacggttatcccgataattacacattaccgtaaaaaaccgtactgctaccgtgagatttatcatactgcacgtgatatccgtgataagtgcgtaaccgtatggcttttgcaaatgcaggccacagctcttgatttctcgctggatcctggttttcaccaaatcacctgcatcgcgtgatcgcggccgctaccgtgcacagtaactctgaaccagagctacccccaccaaccggagtatcggactccggaagccggaagcgacggcgccgcccgatatggaggcggagtcggcggcggcgaggcaggcgaaggagtcgctggagctggcgttccagatgtctcagatcctcgacaccggcctcgaccgccacacgctgtcgctgctcatggcgctctgcgaccgcggcgccaaccccgaggccctcgccgccctcgtccgcgagctctcctccgcggctcctccgaccaccgccgccgccgcacccagccccgcgtccaacgccaccgcggcgccgtccgcaaaagccgcgtcgcttttcccctccggtcttcgcaaaccctagggttcgtgcccccttctctcagacgagatcacactatcacttgatcctacattacgttgtcttagaatgtaaactagcggatcgttctgctctgtagattcgttttagccgcaacaccttcctggcttgtatcctcaagagattatgcacaatttttctatcagaactccttaattttaggagatcgtgacatggatccgttcagagatatggggatatcggtatgacatgaatatttgattgcggagacacttgtggcattaagactgagaactcatatttgtttgggcacttgataattttgaattcaacttccactgacatggaacggcctcatgaattgccatcttgatgttgcattgttctagagaactcctgttagctagttgttctttgtcagttacaattatggtatagccatttgtcaacaacttataatttcatcagttatgtaggttggttgcattttgatcctacctatgttttctttgtcgccctgggttaaagtggttatatacccatcaagttagttcattatccttcaatagttttcctagataaaaaggtcatgcttgagaactgtaggttatgtggggtttggtcatgtcttttgaccaaacgaggcactgaaaacacagcctatgctccccaccaggcaccagcaatgtatgtgggttggctttgctgatgtaccaagtagtaacgttggattcaactgagatctctgtttatagtccgataattataggcttttgatgtttatactgtgcattgctcagagtaaaaaaaaaattgaatagaagcctttcaactgctatgatactttgaaactaacaaccttaatactaacttgagacaagttgcaaatggttcctaacactcgttttcccttagcctgaccagacttattgcagtgctttaaatctcagattacatcccactgtgatcactgccagcagtagcaatttttttacagtcatttcaacactacgctaccttagtttttggcaacatttcaatgctacctttggtttcacttatcaagcatgatagaaatatataatgttcttgtggtttcaagctttgttagtggcttcttatcaggttcagctagacttaaactggatttcattgcaaactgttttttcttggtatagttgccgtgagttaactgttacctgtacgcttaagcagttactgaagaccgagtggaaccgatgtgcttgattttaaggtagagcagactcgagatttgattgctgggagaaaggtattgacaatcttaagggagatgtaaaatctttctttagaatgtatttgtgatgttgtgactggcctgtttcctcaaggaaggtgtggttcatggaacgctgtgtgctttgcttgacttgtggaagataagtgttctagtaatcatgggaatgttgcctttcccatttctaatagccaattgtatgtatcagcaagacatatggtcttttgttaattatcctctcttgaccttgaagtcctttgctttgccacatgcttatccaagaaggaatgtgtcatctccattggttgaactctcattttcagataacaatgaaagcaatgtgaatgttatctctgttccaccatctggttcaagttcaagtgcactgcagcttttcttttcttttttcttgaactgacactgcagcttttcatttctgctccatttggccccttttcaccaaattctactcttggttttatcctgtccagataaaaaggatagcatttcaattccgttcatgcaagtggtgaataaacttgatcaagcctttttagagaataaactttatgaagccatgtcacttctgcattcctgcctacaaagtcaggtctttatatggtcagggttggtggttgaatctttataaaaaaggtgaaaataactgaatcgaatcgaacaataatagatgtaaaaagtttttttaggccgacttgccttagactaggctagtctttgtattttgtgtggcctagtgggctggttcgcccacgcaatttcaggtcatttttatggaaaaaaaaacaatcatttaggtcggggccagcgaagatgagggcggaggcgaggtgcacagcggtggccggagatgtcgcagaagcggcagctggaggagagcagcggtagcagagcggaggcatgggggcccctggcccagccaaatctggggctgggagctcgtcgccgccccaccgctacggggagcccaagcatcagatggtccctgccctccgcgagtatatcccctccgttatctttgagaactcgattggaacccccatggttgtgtttgtgtggttggttgtctgatttggtgccggtgtgtggcttgccttcgtgcaggatgatcacggaggtgatgcagaaaagcagcattgaaaagttgttcatggctattgagcccctcatccgaagaatggtgaggcagcctatggaacctactttcttattttccatttctcacccatgtgtcatgaatttataggaagatatgactttttggtatatgatgtgcatgttttatctgtatccccttttgttctgttgggcttagggttatgtttgttgctaacgtggcttttatattgttcattcataattttatcgaaagtttcatctgtatctggtgcagctggcattcttagatctgttttgtacttttgaattacacaaaccctacttgtagtcttcaacttaatgtaaggaaccctgtaaatccgtaaattgaaacctaacaagtatttaatccctggaagactgttaattcctgacctccattttttggtttcatttgtttctatttagaagatagtattttcacccaaagccattgaaagtttatcctaggcaggattttcttcagccatgtgttatttggctgtccaatgatggccttcaggccttgatgttttatccgattgtaatttctaggtgaaagaagaaatcgagtcagcgtttgcaaatcatgccattatgatggcaaggtacgacattgtaacactgtcttaaactactatttgacaagtatcagccactgtatagattcattaagctaatgcagctttctttaagtttaacaacttgatttcttattttcccattagaactgtcatggacgttgttccacctacatcgaaaaatttccagctacagttcatgactaagctttcacttccaattttcactagctccaagattgaaggagagagctccttaagcataactattgctctagttgacactgttaccagagaagttgtagcatcaggcgatgagtccctgatgaaagttgaaatagtagttttagagggggattttgaaggtggagaaggcgatgactggacagctcaggagtttaacaataacattattagagcaagggaaggcaaatgaaccttgcttctggggacatttttgttggccttactaacggcatcagtacaatgggggaactatcattcacacataattccagttggacatgcagccgtaagtgtggttaaaagcattattttgttatgttgagaaatataaaaccatgaaacaatatatttcttagatttgaatgaataaattgtttttctgtggatggtcatggtaatctgagctcaaaagttttttcctcagcaagcagatgtcacatttctatccatatgtctgaatttgtcattgtttaattgtgttgtagcatgcttttgcagatgatagtgctattcagcaaaatatatggatatattggccctcttattctcaaaccatgcagatattgggcagtggtatgtcaacaaagatgtgggaggtcacagttgagcattcaaaaacttgtattctcactgacaaggtgcatttgtactatccacacagcctaatcaaaacagctgtcgtgttcaatgttgttggagaagtgagagggctaatatctgagaagttcgtttgtgctgatgatcttatggaaaaggataaggtattcacattttctctctcaacctagttacttagagaagattcttgtgtatttccctccaccagttaaaatctggaccatttttttaaccctgacttttgttctttctaggctgaagcacatgcagctgtgaagcaagcgtatgaaaattggaagaatgtatattcacctataacaatgaaacagcacttccatcaaatcattcacagctcctcgatgtgagatctccatcattgctcgcaaatgaatataaccaattcccaacacaggtttctactgatggttttggtttgagccagtcaagcataccatcagctgacattggatccttgtcaactgggaactgcagaaagcaatgaaaatcaatatcagcccgatttacccccacttggtggccatggaccacccgtagtatcacagacaatggataaagttctctaatttggtttatgatgattgcgccagtcatccctcattcagtgaagattactatcgttgtgcagatccatctgtatcctttgacacacaaagaccttgagctgcactgaaaggcttcgttgcaacgatatctaagcccaaggccgggtgtagagaatggaggacattgtcttatgttctagggtggatattctacaccaataggattgttgctctgaaaagaacgaaacctgggaaatgacggttttcctacttgtttatccctgtggactgtggttgtttagttaaactgtgaaatatatactatctccatctcaaaatgtttgacgctgttgacttttttaaaaatcccaaaatgtttgacgccgttgacttttttaaaaatatttgacctttcgtcttattcaaaaaatttaagtaattgttaattctttttctatcatttgatttattgttaaatatacatttatatatacatatagttttacacatatcacaaaagtttttgaataaaacgaacggtcaaacatgtttaaaaaagtcaacggtgtcaaacatttaggaaaggagggagtagtatataagtggggaaaagggaaatcatgtacatatgactatgagcttggcagtctcgtaatctttttgggcacagagctggtacgctttgctggtttacgagctacatccaacatttttgtttttagcaagagcattcagcattgcctgtaaataatcggatgaagttttgtgaatttaatccgtaaacatttgtggatggtgtcgactaaaccatgttctctagctcacctgagtagcacttcaaggtcctgaaatcaaatagtatcagattgggttatttgagggttaagttacttgtttgataggttgagtttctaatttaaaaatgttgtatatatccggttggatgtaggtacccttctctaggtctccagctcaattgcggttatcatcagctagttatatgatgttggcaagaacaatgttcctgcaacattagttcccctttcactcttaacagtttgcattgtttttcgcactattctattggattgatgaaatgtcttgattagagacagacgttagagacagacgttgatgaaatgtcttgatcaaagtgagcatcgctgatcactccatgctgactggagtaaagaacagtaccaaaaaaaaaacagtgatttggtgttcgcaggtgccaacgtctttattccctggtcactgcctgccaaaccctgcaagcactccacgcattatattagcgtgtgattactgatttgctggcacttggcagaattatcccaaaacctaatcagtacttgcaaccattactttaaacttgattacattacatgattcggtggtcggttgattgattgataccttgcggccgaaatcctcattactactactgcatgttaggaactgaataaagaagaggaggttccctctagatcctttacttgcacctttggcctttcttttctccttaatctacccacatggagggatccatgtggcccccagtatcaagttcaggtctccttgtgggccccaacggactcatttactcctcactcattaccatccaaactcctcttttaaccactgtaaatttattactccttgctaataatcctaataatagtcacattgcttagatttgtagtagtagtagtaataatttaacagtgtggtttgactgagaaaaccgcgagattggtggcagcctccacgaaaggagggcgtttgatatgattatatatatgcaggaaaaaaacgagatatccctgccgtgcgtcgcggcaacaaaccgccggcaaaccaaacgggcgtgaaatcatttcggaaaccccccatccctcctcccctttttcctcgtaataaccggacgccgacgcggccccccgcctaggctgccgcagctgaaccacggcgcaagcgcaaccaccacgccgcgcgtacgcagcgcggcagtaaaagttgcggtagaaaacggcaaaaacgccaccaccgccatcacggctgcgggctaccaccaccacggcaccaccgcgtggtttgactcgtcgccgactcagatcgcctcgtcggtgacacacacccacacacggcgagaaagagtgagagaaagacgaagtggaggactccccccactctataaatttactggggtttggttggtgcgtgtgcagtgcagtgtgcgtgagtcatcgcggagtcgtcagtgtttcatcgtgtgcgccgcgccgctgcgtgcagtgcgttgcgttcctccactcccgcggcgaccgcttcaactcgcgcatctcgaggaggccggctcggctgctgcgcctcactctcactctcactcacactgcagtggtggtagtggtaggcaatggcggcgccggcgccgaagcaggaggaactgcagccgcacgcggtgaaggaccagctgccggccatctcctactgcctcaccagccctcccccatggcgtcagtgcccattccctctctcatcctctctctctgcattccaggagtggatcgatcgatctccatggttggctgcttgacggcgccttcggtttctttctgcagcggaggccatcctgctcggattccagcactacctcgtcatgctcggcaccacggtcatcatccccaccgcgctcgtcccccagatgggcggcggcaatgtacgtcccctcctcccgccgccgccgcggcgtcgcaccgctcacttgcttctgtgactcactcatttggctgccgatggatgcaggaggagaaggcgcgggtgatccagacgctgctgttcgtcgccggcatcaacacgctgatccagagcttcctcggcacgcgcctgcccgccgtcatcgggggctcctacaccttcgtcgcgcccaccatctccatcatcctcgccggccgctacaacggcattgccgatccccacgaggtcgccctcctcactcccccccgcacccacgcaaagtttgctcctcttctgtttgactccttgctgtattgacactgacaaatgtggcgtgctgggttcggcatggcgttgcagaaattcgtgcgcatcatgcggggaacgcagggcgcactcatagtggcctccacgctccaaatcatcatggggttcagtgggctctggcggattgtcgtcaggtgtgcatgtctcatcctcagggttcagattccaggtcgtttgatcagtgtaccttaactggccctatcattctgctaattcatgtttatattcttgtaatgttgcaggctgctgagcccactgtccgcagcaccattggttgcgcttgttggatttgggctctatgagcttggattcccaagtgtgagtattttgtactacaattgtacatgtacagtcgtctggatgtatttgcaacagtggtatgacagcataaatttactatgcaggttgccaaatgtgtggagattggccttccacaaatcatactgctggtggctctttcccaggtatacatcaagatggctattgtgtgaattctaacggtggatgaatccttatgaatgttgtgtaaatctttgtgcagtacatacctaagctggtgcctttgttggggactgcgttcgagcgtttcgccatcataatgtctgtggcccttgtctggctttacgccttcttcctgactgttggtggggcgtacaagaatgctgctccgaagacacaatttcactgtcgaactgatcgatctgggcttgtagggggtgctccatggtaataccatgcatctatttccatgccatcctaacgtcggaaaggcgttacattacatctgtttgcatttatatcctgcaattggcagtttggcactaaagaaaagattagctaatataaatagattttcgtctgcattttataggataagtgtaccttacccattccagtggggagcaccaacgtttgatgctggtgaagcttttgcaatgatggcagcttcttttgttgctcttgtggaggtactgtggatatatctatggtttttagggggaggtgcagtatgttagagggcattatgcatcaaccagctaatattccttactgtctaatgcagtctactggtgcattcattgctgtctcacggtacgccagtgcaacaccatgccctccttctgttatgagtcgcggcattggttggcaggtaccatctagactccttaatctgcaaatattttgtccgagttcttgacaattcaaatggcatgcaggcatcttacctactttatttgtttgtgtgttgcctagggggttggtattttgctgggtggcttatttggaacagctaatggatcatctgtatctgtgtaagtacattctagattactgttgcctatattttactgttttatacagtttcatattaatactagcatttgatgttggtctgagatactttgtaccgttctggaacagtgaaaatgctggtttgctaggtttgacacgtgttggcagcagacgtgtggtgcagatttctgctggatttatgattttcttctctattcttggtaagcctaatgctttgatgtaattatgtatttagatggttttgatcgtactcttctgtcaagtaaagatgtatttgtgagtttgtgagagtggaaaaggtgaagttctatatccaggctgttatccatgacctgatcaagtatttcctgtaatgttcagaggtggtttgttaatggttccaacgactgatagctggataaatagctaagcttaaaatcagttcatgaatagtttctcaaggagccgcagttagccagaagctgaatattacaggaaatactattgcacaatagcaaggctgacactgactcagatttaactaaagttaaagtcgtgattactgcataaaaacctatacttgtgatgttctctcaggctttcataatttcttttgcttatttaagcttatcatcttgtcatacaactttaaagcatccttgttatgctcctgcaatactgacaataagcatgtacttcatctggttgtactgattctgtgttgcgttcctagggaaatttggagcggtatttgcttcaattccaggcccaataattgcagctatatactgtcttctctttgcatatgtcggtatgtacaatgaagagaatcttaaatgataaatctagctttctttctatcatatttgaattatgaacacctgcaatatatttggtttctgtccacaggtatggcaggagtagggttccttcagttttgcaacctgaacagcttccgaacaaaattcatcgtgggattctccgtgtttatgggtttgtcggttccacagtatttcaacgagtacacctctgttgcaggctatggcccagtacacactcacgcaagatgggtaagacccagtaaatatactcaagtgttactactcctttcatgaacctaacaattgatggttatgtttgttcctgtttgctctttcccagttcaatgatatgatcaatgtggtattctcgtcaaaagcattcgtcggaggcgctgtagcatatttgttggacaataccctccagaggcatgacagcactgccaggaaggaccgggggcaccatttctgggacagattcaggtcgttcaggacagacccacgcagcgaggagttctactctctgcctttcaacctcaacaagttcttcccatccttctgattttgcacgccagtgttttgtatcaaattgggatagcattgtagtacgattagttcttgggtaagtaattctagcattgccagattgttgtttctcctagtgtttttatactcctgagttctgaatcctgcagaccccagtgtaaaactatctgaggaaggagaaatgactcggtatttttgggtgtatattagttcggattaacagttaaatcaacaaactgaaaatgcctagtttttcttcccccgaggctgtaatttcagctgtgattttactatcttcagtgtaagcagttaaatcctttcagctgtgatttcactatcttgctgatcttctcgtggtatatggattgccttttcttcttcagacgacctaaaaaagaagtggaacagagtgcttcaaactgagcagatgatctacaaactgaaccatgagcccatgacgagatggaaatccaattggaccttgaattcgtccaaaccaaccagctgatcttgacaatgatacgtctctcttctttttttctcatgcctcatgcatgttcgagacaaaactctcaaaagcattgtcagtggagcccatctgccggtgacacctttggatcgttgacatgccaggtgtgagagtgtgaaaccacatgtgaaagagcatggtcatatgcgctagtagaattttccaatttgaatttaactcgttcggatcaacaaacctaccagaaaatccggaccatttcaactcgaaacagcgagctgcagcctgcaggtgcagggggagtcgcgtacacgacctcgtcaagtaccaaccactcacatgcaattatatgcaaaacagaaaaaaaaaacactttctaactctttatttcgtgcacatacagcaagtacaaatattatactcccatttagcaaccgacgttaaacgtgacaatacacgagggatactaattctttatttgaaccgtgaaattcgccagcaaccaatagtagatctgatgcaacggaaccaaactaccaaaggaggacagtttaaattcaaaattccctgatggctccctgaaattcctctgttacaatttatttttttaatcccccaataattagctgcttataatataataatcaattaagaaattaattaatcctttgctccctgattgcctctctgcctcgctgtacattgcccacttcgccgcccgtttcggtttccctttcttcattcttcttcttctcatcccaaatctctcctcctcccatcccgccgcgcccgcgagagatcagcagctactcgactcgactcgactcgaatcgaatccgaggtgcgcgccactcgctcgctgcgattctcctcttcttcttctgctggtttcgatcggttgcttgcttcttctgcggttgctttgcttgggatctctgcttacgttgctgttgtttgggggtttggatctcgggctgtgcgtgtggtggtgcaggggggcggcggcgaggggtggtggtggtcggccatggcgcaccgggtggacaacgagtacgactacctcttcaagatcgtgctcatcggcgactccggcgtcggcaagtccaacatcctctcgcgattcacccgcaacgagttctgcctcgagtccaagtccaccattggcgtcgagttcgccacccgcacgctccaggtcccccttccctcgcgcgatccatcctcttctctcgcgactatggttcagaatagtagtgttggggatttcgcatgtcaccattgcgttcgatgcatttttgtttgattggcctgtcgtgatgtagggtttttctgtttgatatgagatgattacttcgcgtgtactgaacatgaattaagttcagttcaattctgtgaatctgacgaacgaaatggggggaaaaatatctactactattgattaatgatgcacacgttgagctctgactctttttgcatgtaccactcgtttaatagtagtatgtcattttgttgtgcttcatggggcccttggaatgatttgaagaaagtaactttattcttaactgcactggtatcaacataaatcagatccataggtacagagctacagaggtactaagtatcatttatcatgtccttatttaattgattaaggggatattaagaaaaaacttgaattacatgttgctaaagtcaatttggtagtcaatgtagaagatggtgagctttatgctgtgctagttgaacttatgttgctaacttatatgtggtgcataaatctctactttttctgttggaagttctacaactgctttggcgtatttcactcaactgtctttcaatattggaagtatctctgaaacatgcatttatattgcattgccttctgatttcgtataaatccaaactttgcagtttgtcatccattattttgtttataccttgacttgggtgtatggattatgcgtatcattatttgaacagtatatttcacattgcaccatatattttgaccaaagtttcacaatgggcaaggtccaaaccaaccttttttcacttaacaccatatatctttgcactagttggcactttggactagggttgagcacatcaaaggaagttgtcagagaaaagctagtttaaatcatcaattttagtgccacaatattaggataaatatctttagaaaaagttagcaaatcagaaaataacttttttcagcaaatcacactaaaacaatgacgtgaacatgtttaaaagtggcacaaaatgatctatacattggggcaaatgaataaatagaaaatagaactagttaattaccacacactgaaaagaaggaagaaaacataaaatgttttgccttttataattatccctatgtaaatcatatgaatttctctcatattcccttgttttgctcaccccttgtccaaactgaaaacttatgtaaagatgtatgatgttagtgaaaacattgatttaaccctagtccattatgaaaccttggtcaaaatatgtggcccattgtaaaatttactcttatttcaatagcatgttaaagtataccgttatctttgtaacgtcataaagcttgtattaagttcataacaccggcgtggtaactataattctgcaggaattttttatttgatttgctctgttgctggagcattgctgatgcatttacagagcttctgaagtctgagcagtgtatttatcattattcggtatacttgctcaattcaaactgcttgttaaaaaatgatagcaacttgcactgcatagattgtacaagtggatcctgtccagaaatattttaggagaagggtaacattttggggaggtcggaagggggtatgtaccattactcttttgttttcttttagtgttgtaggcctctgaatgtacctgacggttaacacacactgtttctatagatgagtcttttgattaatttgttgcatttcagagaacttctgaattttgggagctgttttgcctgtataaggctctgatatagtgaacttgtaatagaccttaacaatctaatttcaccatactatagcgacttctttcatggcaaatactcaagttaaatttatccatgatattggtattttggctcaccatattaggtatgttggtctttcttatttagtgtggtatcatgtatacagatagaagggcagaccatcaaagctcagatatgggatactgctgggcaggagaggtaccgtgcaatcacaagtgcttactaccggggagctgtgggggcacttctagtctatgacataacaaagaagcagacgtttgaaaacatccagaggtggcttcgtgaacttcgtgatcatgcggactccaacattgtcattatgatggtaggcaacaaatcagaccttaaccacctgagatcagttccagaggaagatggtcaggcactagcagagaaggaaggtctatcattcctcgagacctcagctctggaagcccttaatgttgagaaggcatttcagactatccttaaagatattcatcaaatcatcagcaagaaggcacttgctgcccaagaggcagcaggcagtggacctcccactcaaggaaccaccatcaatgttactgattctgctgttaacacaaagagaggatgctgttcttcctaggtgcaaccgaagatttggtgatgctgcaaaaggaaattcccatggatcttacagcactaggtgttatgtaggtcgcttgactccttttggcctgtaattctggtggggttgtaatcacaatttaaatcgctagaaagaaatattccttttaaggtagataccatgtgtagttgcaaaattttggtagagactgttgctgggcaagactttctacagtttcatatctatatcatgttttctatcagtatgcttgtgttatatatcttgttatagtctaaattgttggagctgagaaatactatgatgttttccatgttggtgtaatatccagcatcttcctgctagaaactaaaaacatttatttttgcctttttggtggtattatccattccaacttatgaactgaacagctaatatatctccattctcacttgtactgcattttgcctttctgctgatcctgtttctttcttctcacttgttgcttgaagtatactgcatctgcggtccctgctcacgtgtatcacatccttcgattagttggtgtaacatcaggatttcagttcatttgattcagcgttttttacattattaggccagtcacaatgggggtttcactggtgtgtcatgcacatttaataggggtaagactgaataaaaaatgattatttgcatgaaatggggatgagagagaaggaaagagtttcatcctggtgaaactcgtcagcgtcgtttccaagtcctcggtaacagagtgaaacccccgttgaggccgattcgtttcattcaccggatctcttgcgtccgcctccgccgtgcgacctctgcattctcccgcgccgcgccggattttgggtacaaatgatcccagcaacttgtatcaattaaatgctttgcttagtcttggaaacgtcaaagtgaaacccctccactgtggggattgtttcataaaagatttcatttgagagaagatggtataatattttgggtagccgtgcaatgacactagccattgtgactggccttatagaatcagttctatgctatctgctttagcataatctgcttttccattggaccgggaacagcatactttggcatcgttgtcagtgctggcctggccatgcatagaccatttgtgtcatgagagacatttgttctaagactcctaccttaaaactccatgtaactttgatccacattcgcttctgactttatatcatgagaaagttaatcattcttccatttttgggctggttcatttcaggacatttttatttatgctgattcagacatcaacttggtgatcatagaacatttgaacattatcatgaaaaattttaatcattcttccatttttgggctggttcatttcaggacatttttatttatgctgattcagacatcaacttggcgatcatagaacatttgaacagtaatgcatgtttgcatgcatggagaatcttacagagataaggcaagcaggtgacaattccttgtgatttttcatcatacctcttgtggtcttatattgtgagactgatctgatctcactgaagaagaatatgttctcctggcacaaatgtcagtcaatcctttctgctaggatggagatagatgcctttttttctgcatttttccttttgcgattacatgaaagacgtctacgcatacagaccacacggactgccattcgcgagtacacccctttaacatatgctcaagagtcacactcatgtatgaatgatcgtagatattatgatttgatcttgataaatggagtcatgcacctacaactccgctaacatatcctttttgggatcagaagccaaagagggtccatcttttatagaaagcaagaactacatcaatatatcaaaggtgtttatcctatttcttttttgcaaattggaggacaagagagtggcaaaaaaaaatcttgcaggtatgtcaactgcagagtctcctcctctggattcttgatggacgcaacatctgccgaatcgtgttctgttcacttccaagaatgtgcagccaattagctgcaacggccttccctttctttctctccctttttcgaggctcaaaagatgttcgagaaaactctagctcgctttttgctcgtacgttcaaaatacggtgcatctctctaaatataaatttcaatctaatggcaggcaggcttggagctgattgtgatctgtcctgctggtgattatcactcatgtgttctctgctagattctgaattttgtggccataacgcgttttcattctagaaaggatgtttggatgtcgaaatttctttgcttggtgccttctattttgaattcaagttaaactaaattctaaagatttaattcgatatggagggcaatttgatatggtcaaaacctgttgaagcttcatagtacaccacaggtgagttgatccagtttaagctgaaatcaaaagcagctttagtgcacttttttcacgaaaattttgactaagagggttgattttagcattcagtaaagatattctgcatacgaatacccacggaaatctgaaactttgaattcaaaagatttgagaccatggaaattgaagccagagtacaaacaacctttttagagaagatagttcagaaaattaaataatgtttaatcgattaataatcgaacattcacgatggactgatggtgtgcgcactatgctaaccaacttccaattgatcgtccaattagtgcgtgtcggatacaggagcaattattataataaatctttactcgatcactagaaatctacatatattaatctgtaattctgtatggaccatgcatagctaattttgtactccagcagaggcaccaataagcatataaatgtgagattttattcaaatttttaatagcagtcctattaattaatgtttgtaggcaccattttacctgtcatggaaaagaaggttcatcccacaatctatatgcatgtcctcatcagacttagacttgctagaaagagattaattatgacctgctggttaattaataaaaggactcactggtggctactggctagctagctaggatgcaatctagttttgagtataattaagttgctatggctcatgttcctctctagctagctgcagttaaatatatatgatataccggtcatgtggttgaccaggagattacccactaaaattctggagctaatcatggtctagttctcatcatggagttattgtggctagaattaattccatgctagctcaacaactgtcaaaaaaagggaaattaaacagatgcgtttgagtgttatagctttttaattacttattaagcgtgatgatagtatccaccgaccactgtaactagattagagctaatttaataagtagagttaactattaattataagttaatttaaagtagaactagagctaaaatgtataattataatagattattttttcctctctttttctctacttgtataattaatgcatttgcttaagagcatttgtagaactaactcttaaatgagaagtagcacagtaacactctatatttttattctctttcatatagattaatcagttggcttatagcttactattaaacttgctctttcatatagattaatgagttggcttataacttactattaaactttcatatagattaatcagttggcttatagcttaatataagtattttacatgagttttagcagagattattgttaaaatgaaattactttgatgtcccacgatacaataataaataaagaaaatcataactgttggttggataaataggaaattagtacttataaatgctagtatttgcaggcaaatttcaaaagttagacgtcacatttgtggatggagagaacactactgtactgtgtgcgcatcgatcatcttgtcccaatcgagtacttgtgcaacaattataattattcttccattttaaattacttattgttctaagtttattatcccaagttaaactttttaatctttaatcatcaatttctataaactcatatagttttatatcataatatttatattgttatattcaccttaaaaatactttataatatataattcatgtgttattaaactacactacaaatttaatggtaaaaataaatatgtttgacttaggataatctaaaataaccaataatttaaaacggagaaagtgtacattaaaccatttacaactactgtaaggtagtctcacgctaccaattctaatatatacactactagttcggtgcactaattcaatagtagcatgtatctcagtcttaccatatcttgaactttatcaaaggttgccacatcttgtgttagatgtttgactttatcctcttgtttggttcatacttgtggaaagattctctcttattttttatggtcttatatatctacaattctattttgttagttaaggtgtgtctcactttttgctagctatatacatcttaaacaagtgtggcataaaagtatgacaaatggtgcaaaacttattagaggacgtttggatgtatatcaaagtatggcaaatgatggcaaacatagtatccgagctagctcttgtatgcttgacagtatgtgacctatattgtttctctcttgtcgtcaactcaagttacatatcatcttttttgcaccacatagcacaataatagatcatagcctatgtacatctcagttgtataaaggaataattgtgttatctcgatgtaatttatgtaattatctacgatcagtaaagttttttttaatctaaagtaatatggtactattataagtggagcattttgaatagttttgcatgttgctaatttatcaaacaccacacggtaggatattcattgcttgacactgaattattgtaattctgatgtgattatttaataagtcttcccctgtgtattactctctccgtttcacaatgtaagactttctagtattgtccacattcatatacttgtgtctagaatctagaatcattaacatgtatatgaatatggacaatgctagaaaatcttacattatgaaatggagggtgtactagcaaagtggaataaactagtgctcaattgcttcaacctgttggaaaatatgcagatagtggtgaccttttttcttgtttgttagtaaacgatatcgtctggcattcaacaaaatttggactgaatccaccataactcatattaattgctatgaaaatcctacagtaaatttcacattgagtcaccttttattactgatgttttgttttggaccaccctttaaataaaatttccattttgaactagctaatcttgcctttgttttactttgtaccattccaattcgtttctcaagcatataaacaacctcgagtacgtcaactcctattcatcaatatactccctcatctatatataaatattttcttgacacatgacaaattggatgtagatagataaaagagttgagggtggtccaaagtgccacaaaagtaaaattacttggtccaaatttgaaaacattggttgaagggtggtttaaagcaaaacaacatcaagaaaaggtggttcaaagtgaaatttactcaaatttcccatcaaatttctacattccaaagaattcaataaaaaaaacttatatgaggacaaaatgatagtttatggcctaatatgtgaaatatttgtcctttccatttctcctctttatttttgtcgtgttctctcttgcttaacattaattttgtgggttggtgcttattttctaggaggtgagagtataagataactactctctctatattaaattacttgttattttaactttatcctaagttaaatatttctaactttaactagaaaatttctaaaaatccctagtttaacaacaagtgagttatatattatgaaagtacttatcatggtgaaaaacaaaaaataatcttataatgttaggctatataaatatctagaaattaatggtcaaagttagaaacattggacttcaatctaaaatgataagtaatttgaaatgggggagtacacgtaatctcccttaagccactactctaatttccaggcatgagtataaaaattataagttggaccagttgtcttgtgctgtgcatcatgcagctataaacctatattgtggatctgcccctccctaccgcaaccaactatgagcaggtaataatgaactagagaatgcttctaagccttaagaacctttacatcatctcaatttgactttggatttgcctaatgccaaatattttttttgccaatgaaagaaaagaagaagaattttccatgacatataccatgaataagtgcgattcagcgcaaacatcatttgtaaattgtgcattttgattgtgacctgatcaacccatccacccctaggacattttcggcacatgttgatgatcgacaagactagctactatggagatggctcatgctgagtgtagcgtgcgttttttatgtaatcgaaaaacataaatgatactccctccgtttcaggttataagacgttttgactttagacaaagttaaactgtttcaaatttaaccaagtttgtagaaaaaaatagtaacattttcaacccaagacaaatttattatgaaaatatattcaattattgatttgatgaaactaatttagtattataaatattactatatttatatataaacttagtcaaacttaaaatagattgactttgaccaaaattaaaacgtcttataatctgaaacggagaggagagagtaccgtatatgttggatctcatatatgcatgcatggatgacatttatgctcctaatattttaagcaacccctaaatgggcgacaagtggactgaccacgcgcaatacggtgacgcatcatcactaatctcttcattgtgtgatagtcaaatcgtggcactgcacgttcacgatcagcatcatactgtcatgttctcgcatgtcaaagagacattagttcgtcgatatatggatgatgtcgtccatatataatgggggtacattgtggctagattggtacacctgattgatttgctagctttaattatatttactcccacaaagcttggatcaatccgtagaaagttcattcatgataggtcaaggtcaggaacactgctataggcacccaaacaatatagaaaagttaggtaaatacagagtgtgaattaatagaaaatatcgtcgtatgtgagaattatacatgaggcctggacagcatgtttaatgttgatgtagtgtggtagtttctaatttcataataatcatagttgttgcacgaagaaaattatgtaatacagagtgtgaattaatgaaaaatgccatagcatgtgaaagtgatatatgaggcctagtacatcaattctaggatgatagaggtggtgtttgaatctagaacaagtgtttcacgcaaaacgaggtggttgtaacgtgtgattaattgagttttaattattacaaacttgaaaaatggatttatctgacattttagagaaactttcatatagaaagtttttgcatgaaacgtaccgaagaatccaaactttcatatagcagtttgaaaagcgtgccacgagaatccaaaattttatcctactcttaccgaagaaacgaacagggccagagggtggtatttttcccattttacaatcatcacataaagaaaaatgatacaattaatcatcacagaaagaaaaatgttgctaaaccaaatatacagcttagaaatcaggtagttgatgaacctatttgtcagtgactgtttcgattacaaggtgaggtaactgtgaagtacatgtagctagcctgcatggaattccaaagttgaaagtgtgcatcgttagtgaccctccactaatcacaaaatgttgcggctatctccgtatgagctagctgtctcaaattttatgctccatttcttacatgtgctaattttggttagttggaggcagactaaagcaaaaaattaaagtgggagagcaaagttgtggagtccatccgtccatccgtccatccgtccatccatccatccatcgccgattgcatccaacttgattttgtcggcaatgcaatctaatgcatgcttgcatggttatcgtctctactgacatctcctaatccagcaaaatattcagtgaatatgactgtgcagagacagtgtcgcgtgcagtgcatgcatccatggaattattgttacttaaaaaaaattcagccagatgtattaaatgcgttggtgtttttggttcattgacaaaaccaaccatataaaagaattggtggtaatacttgcatatccatttgggggtctgttgccaaaaaaaaaatgaaggggctaaacacaagcttcggaagtaacattgccaatttttttggcttgacaaaattttagtaaggctaagaatagctataataatccaaacaaacctattatggctaggcactagaatttgaattgttagcaccctgcaaaaatatttgggaatagcaccctgcaaaaatatttgggaatggtgccatatttgtcaataaaaataaaattttaacacgtatttacatgtaataatcaaatattacaatatttaaatctatatatttcgaatgtaaatttcagaacttacaatataaatagtatcaaatgtttacagtgtattttttttctaatactcaatgtatataagatttgagactaggaattattggttaccggtgctgatcaacaaatgacgtaaaaggggaaaataaaaattggaagagagagaagcggagggatatatagtctgttcgccaagccaagatttggggacatatgttgcccacgacggcatgaacatctatcgcacggtccaaatccgattgaaatcaatcacaaattgctggcgatagatttttagcaataccggaatactcctacttttacatcagaattgtacatggaagttatgtgtgcatcgatctgtaaactagtactggtaaattgttgcacaaagcttttgtgcgtttaatttgcggaaacaaaataaaagaacttaggtattatcagtgtcaaaaaaagcagcggaggtgacggactcatggcacatcagtttatgttgtatgtcatcctagaaatgcttgtgctagctgactagctccaccactccagtcctctgatcctctactgctcctgtatacttcttttcactgaattttcagtgaattggttgttgcttgttagtactccctctgtcccagattataaaaggttttaaatggatttaacacatcataatactacgaatctatacaagctttctgtctaaatttgtaatattatgatatgtcaaatccacttaaaattccttataatctggacgacaggtgctatattggcatgaggaagagcaattcatcatttacgattcaagacaagaaccatcaaaaatgtattaaacctgcttagattaggtcatatatacaatagatttttttgaactagaacaaattatttcattgttcttcagacaaaagaaagaaccggacaaattaatcatggccattagtacacactttatgtaattattttcctttaaaaattatcttggtctgatcaacgtcatccacagaatactatgcaggttggtagtgcttgttgtaaaacagtgtgtaacagtgaaaccgacattttttgcccctgatatgggctacacatgggagagctagacttttattttaagaacaagtaaatttcacaaaactactggtattttggttaaattatcaaaatattatagatttaatatgatgtatcacaaaacgatatatttaacactaaatttatcacagaactacagatttaaagtagaatatcgcaaaactatatatttagtagcaaagttatcacaaactaaaagtttaatatcaatttaatcacaaaacttagacatatataactcaaacatagcattggtgctaaggatttaaaccctacaatctgtagctttatgacaattttattagtaaatttgtagttttgcgatacttggcctttatgataattttattattaaatctctatttttgtgatatatcactttaaatttatagttttgggatgatttagccaaagtatcatcacattacatttactgtaagagaaatgatccccacaagagagagagaaacgaaagtgcaaaccattcctagaataacattacatttgctggaaattaaaattcatccatctttgattgcacattatgtagtataaggtggcatcacatttttagtcatagtaatcaaacatggtaaattgacaaacttcagacctttgggttggagaatttgaaatatttttgacaggtttgaatcaatttccatgagaatttaacaaccagacggcatgtgcccaaaaggttctaaaatacttccccacttcggttcagatgtgaaatttgttcaaaatttatatgaggctcctattagaaatttgatgagggctagagacttacacatgatcccatctcttaaaagtgggttgaagggtgccaatcaatcacggttgtgcgtgtggtgtgagtgtctagtggtatgtgtgcaccctgcatgatggaacaatcccaaatttaaggaaccaccacgcacctaaccctgagcatattgatgttcaaactagtcattaatttttacatagacacgataatctcaagatatatcggtctagttttccagatatgctcatagagatagatgtgagcatttataagggtgagtgtgcgtgtgttgtgatcgtccgcagttatacctgtttctcgaaagaaaaaaaaagatgatcaaaatatttcaattgacaattagtaaatcatcgagttacacattgtgaacattttagtcactaaaacatatgaaagaaatatgaaacatgtaaataccatttgaaatatttctctattttcttagaaaaagtgttcctttcttatatgaaatatcaaattttaacggttaagacatactccgtatattttcttacgcataaaatattttaagggaaaaaaattaaagcttgctaaggagctttattctttgtatgaaacatgcagccatcaatactaggtatctagagagaggagggaaaatgagcatgcagagcgtcctatgagcaccctcgaggcatatcttatattgataaaatcactataggtgtcttgctttctatgagtgctgtcagggttatagataccgcatacccaatagtaatcgactaagctcggcgggcccactacataccaagtcttatacggaatcataccttgtatatagaaggggttccagataagtaaggacaagtaaagttctatatgaaaacgacaaggactagattgtatccatattggtcttcctagtcttatttggacaaggaaacatctatgggtataaatacaagcccctaggaggagaggggacacgccacaaagccacaagatcaacacacaatacacaagccaacacacgccaagacatgccgtcgggtatcaacatcagagattagcctagacaaaccccgtccggtttctacggaggccggcaatagggatctagcagcatatctgatctcggcgagtgcggattcgaggaggaagactaccctgtcgtagtcggttatctagccgccaagtcaacgacaacaagataagttatcccaaatattatacttgtgtaattcaaatgaataaaggagcaacaccggcttcagccaacaggatgtaggggtattacctgtcagataaggggcccgaacctatataaaaatccttgtctctgtctcttttactccaatctcgcatataccctagtaccaatgatccccataccatctaaataccgtagtcgcgatctcaaacgtcgacaagtgcgttgcctaccactaaaaaaataattaaccttaaatacaattgcttatgtgaagtgtaggacttggacctgaatgggccaattccagctaaaggaatctattgagctactctcactttgattgaactctaatttcacgaagagatgtcctctcgtttattatatgttatctaaataattataaacaaactgataagatagattaaataattccttgaggcaagataaaaatatttttgccttctgaaacagatgttgagtgatatatcatgtataaaactatcttttttttataaatgtttagatggtatatatgaaaatagtttcccaaaagaagcctgtgggcgtaaattaggactcggatcctctacattaaaggaaaaaaaatgcaaagaatctacagtacacttgcattaggcatggtttttaccgttggatcttcatcaaacggctagaaacggatgttacactgaactcgaatagtagaaggggaataataatattttgtcaaccggtcaaacccacactgtgcaagcagtttttgctacagtactactatactgttctaacagtggcccttgcattacaggagaggatccacgtcccgtaaattatttcgtcctttttggatatcactgaattatttgcttcatgttttctaaaatatactccctccgtctccaaatatttgacatcgttgacttttttaaatatatttgatcgttcgtcttattaaaaaacttttatgaaatatgtaaaactatatgtatacgtaaaagtatatttaacaataaatcaaatgataggaaaagaattaataattacttaaattttttaaataagacgaacggtcaaacatgtttaaaaaagttaacaacgtcaaatatttagagacggatggagtatttgcttagaaaaaactttccagtagtactcattgcttttttttttttttgaacattgtactcattgcttgaaaacttatttcaaactattgactccatgaaaagtatatgtcatcgagttgcaacttgcgacgtcgtacaactccatttgggaattttgcaggagcgtttacacatggcgaagaacacgacgagcggttggcagttagccgctgactgaaacgcatgcagagacaagcatttcctgcgaaaaatcaacgccgattccggtgggcgatcgatcgatcgacggctgcatctgcgcatccaacttgcttagcttgtatcttcgtaaaacggccacgcgtgagtgagcccgtcaccctgcgagagatgtaaggagggcatgtacaaaagatagttcgacacgacacgatctcttagttaatacttctgcaatagttaaaaaaatataacctcttaactattactacatcaaaataaatttttattacccttattttcttttcttctctccatctccatgtaacaatatttcagttaataaatgctaccaagagttgaaatctaaaccgttgtcatacgtagcaacgctgtttttttttctttttttttcttttcacgtcactaaatttatatgcatatcaatcgaaaatcaaaagagtacgttaataaatatcattgtacatgtctaagaaaaacggacgtgaaaacgtgcacgctttaatttactggccctgcatctcggctagtttccatgcagaacagcggcgctagagacggcgtatgcatgatagatgtatgtatctcttggattgatgacgtttgctggaaatttgggagtcaatgcaaatttttatgttttcaatgtattatatctttgtgatgcatacaatatcttctcagtggactatttaatctccaggatttgatacttcatagatttcactcaaattaatgagtgctggagctattgtgtatgcatggcaaacattaattagaagatcaaggaaaaaaaatatagtgtgaggtattagctatgtgttcaatactccaccactaaataagggagacagattttgactccaaatttgaacgttgtggatagctatgatcccaccaccacatatgtgatgcttcccttcttttcggaggatatgcaacatgataatctatactccctccgtccaaaaataagtgtagttttgcactattcacattcaaggcaaattttcaaatttttcacaattttttcaaggcaaattttgctacaggacatcgcaattgtgtggttttaactcagggacaccgcgaaagtgaagttttgggggaagacatcccataatcgtggatattagccgatggacaccgtgccatttaaattagctcagggacaccgtgaaagtgaagttttgggggaagacatcccataatcgtgaatattagccgatggacaccgtgccgtctaaaggaatcttgccatgctgacgtgacggacggatgcccttttttgacgcggttggacctaaatgcccctgcgccttatctccttaatgtttggccccacatgtcatcctccatgtctggccccacatgtcatcctcaatctctctctctctcatctacaaggagaagactagagcaaggcaggcgacgaccagagctgggcaggcggctgacggcggccggagctggccgcgaagctgagcagagcagtagctcagcggggagcaaagcagagcagcagcacgcacgccctggatcccccgaagcaggaggtggtcaagccgtcgccgccgggccgcatccgcaacagcacgccctcctcccccaacctcctcgtctcgagcgccgacgccgatgccaagaacatgtgctgctactccgcgctgccgagcgcctgcccctcttcccctctctttccaatcctctccagcggctcccacgcgcgtgcgctcctgagcaagatacggcaggcgcgcgacggcacgggccgaggcgacggcggcggcctaaagggagcctggcggcgttgagtggatggggataaaaggctggctcagcgaggaggtgccagggcagcgccgagcagaggaggcggaggtggaggcgctgggtgatcgcggaggcggcgcccgtgtgggccggcttggccgtgcgcgggggcggtgctcgcagcgtggtggtggccccgagcaagacgaagacagcgggtggtggcgaagcagcagtggcgcgcgggtggtgctcgcacgggagatgtggccgcgcgcagtggcagcggccgagcgtggcgacgacttggtgcggcggcggagaggggagagaggtagctagcggcggtggggaatggcctgacgggaaggcctttttttgctgacgtggtgcaggggtatttacgtccgatcgcgtcaaaaaacggcctcccatccgccacgtcagcacggcaagattcctttagacgacacgatgtccatcggcaaatatccacgattatgggatgtcttcccctaaaacttcactttcgcggtgtccctgagctaaaaccacacaattacaatgtcctgtagcaaaatttgtcttttttcaaatgagacggacggtcaaacgttgggcacggatatccacggctgcacttattttgggacggaggtaatattttctttctttcttatataaaaaaacaaaccacataaaggaagtcgtgggcttaaaaatccacatcagtaacacactacataccttgtccacgaatacaaaaaatgattggaggtgtgaggtgagaaaattaaataaagagcggtggctaggagaaatagtttttgtgaatacttatatttgtatggcaaataaatattaaatgctaaaattctttatatatagtctatgaatctttatatgtgtaaataaattccaattattaggtatccttatatatacatatgatgtatttcaacttttttaaatgggaggtgtatttctactttgaacatgatgaattgagaaagttgcaataggggtcaaatctcttagatatttgtcatcccttaattattttccaaggatagtagttggcgatatttggtccaacgtttgtttgtagtaaaaagtaacggcaggagtacaaaaattaattaagtatggttggtaaaagctcattgaattgcatgcggctgatgaaaaaaacgtcaattttgtcacagatattttcacaccttaattactactagtattttacttaagcaagtcatctctaaagcagtgaaagactgaaagtagtgagcactagccactagcttgaagataaacacgccaagttaggccacagattatttttttttaaaaaaaaacacgccaataattagtgtagcaaaaaaaatccttgaattcccattaatgcgtcgccttcaaagattttttttggttagctagactaattatttccattttttcacaagattagactaattcaactaattcttttcatcgattcgcctttcacccaaaatcgatcgagctctcctttccctgattcgattcgttataggcccatcgatcttactaataaaatgattacaaatctaatcaacagcgaccactgactgaagccgcagtaatccggtcagtctgcgagtgagctcacacctcgatcctcgtcctcttcttcgattcctcctctgttctcgctggccgtacgtgtcaagcgtatccagcacacacggctatataaaggctgcacctcgagccccttttcctcccaaccaaccaacctcaaatcaaatcaagaacagctcgtgcttagatcgctctctcgcttgctgttcttccaatccactcctcttgtttgtggcaaagatctgggttctttttttttctttttttgccgggtttttttggagaggttttgtgagcatggagggtttaaggggcggcggccatggcgaggcggcggtggacggcggcgacgagaggtgggtggaggactcgtcggtggattaccaagggcggcctcctctccgcgccgccaccggatcatggaaggccgcaatgttcatcatctgtaagccactttaatttctcgatgaatctttgtccgtacgtgttcatgtgatttcttactgatcgactgagtgacgtgttcgtcgtcttcctcctcgatctcggcgtgaattcgatcgattggttaaatgaagtgattgagttcagcgagaggctgagctacttcgggctagcgacgagcttgatgatctacctgaccaaggttctccaggaggagatgaagttcgccgccaagaatgtcaactactggaccagcgtcaccaccctcatgcccctcgtcggcggcttcctcgccgacggctacctcggccgcttctccactgtcctcttctccactctcatctacctctcggtcagctctctcactagctctaatggcgttcctcgccggcagcgagcgatctctgatgatgatttttgttttgttttctgtcattgcaggggttgattctgctggcgatatcgcagctgtcgccgaggctgaaacccgagcgcaacctgcacctccacgagacgctcttcttcgtggcgatctacctggtgtcggtcggcaccggcgggcacaagccggcgctggagagcttcggcgccgaccagttcgacgacggccacgcggcggagcgggtgcagaagatgtcctacttcaactggtggaactgcgcgctctgcgccggcgtcctgctcggcgtcaccgtcatcgtctacctccaggagaaggtcggctggggcgccgccgccgtcgtgctcgccgccgtcatggccgcctccctcgccgtcttcctcgccggctggcgccactaccggtacagggtccccgagggcagcccgctcacgccgctcgtccgcgtcctcgtcgccgccgcgaggaagaggcacctccacctccccgccgacgccaacgagctctacgaggtgaagccgcagaatatcaagaggcggctgctctgccataccgatcaacttaggtgaccacttcatttcaactcacgttactttccttgccccttcttttctcgcaaaaagacactaatcattgacgcacgtacactgcaccacggctcaaccaccagtcgacccaaaaacttaagctgacgagagaaaaaaattatcgatagtgaaaatgataacaatatttgatcacgttgtaaagttatacataaggacttaccttgtttatccaaaagcttaaactgacgaggaaaaatgcaattgtgattgtaatcatggaatgtgtggatgacatggcatggcaggtttcttgacaaggcggccgtagtggagcacgacggcggcgaggagcggcgcggggcgtggcggttggcgacggtgacgcaggtggaggagacgaagctggtgctggcgatggtgcccatctgggtggcgacgctgccgttcggcatcacggcggcgcaggtgtccaccttcttcatcaagcagggcagcgtgatggaccgccgcatgggcccgcacttcacgctgccgccggcgtccaccttcgccatggccgccatcggcatgatcgtcgccgtggccgtgtacgacaaggtcctggagccgtacctgcgccgcctgaccggcggcgagcgcgggctcagcatcctgaagcgcatcggcgtcggcatcgcgttcaccatcgtggccatggcggtggcggcgacagtggagaggcagcgcctccgcagcgcctcgccggcgtccatgtcggtgttctggctggtgccgcagttcttgctgatgggcatcggcgacgggttcgcgctggtcggtctccaagaatacttctacgaccaggtgccggacagcatgcgcagcctcggcatcggcctctacctcagcgtcatcggcgccggcagcttcctgagcagccagctgatcacggcggtggaccgcgtcacctcgcacggcggcgccgccgccggctggttcggcaaggacctgaacagcagcaggctggacctcttctactggcttctcgcctgcatcggcgtcgccaacctcgtcttctacgtggtcatcgccaccaggtactcgtacaagaccgtcatggccggcggcaaggtcgtcgacgacaaggccggcgacatcgagtgcgccgccgccgcagctgctgctgcctactgatcaatatcaagcagtagctgatcgattagctagctagctagaaaatcatggtaagaaagaaaatggcatcatcatgtattatgatctgctttcgtggtacgtgacaacaacaaaaaaattgtaaggattatgtcgttcgtccatgtatatgcttaatctgcttgtgattgccatctgatcgtgtgatctactgctactgctgatgttgccaagtcctgaactgattcagtgtagcagtgattagtaagttacgcgtgtgcttagtgcaagaggcgaagtgctgagtagatggattacgtgcacttggagttaagagtgcgagattgagatggcccgaaagcctgcttaattcggacccatgggcggagccactacgattcctgcgtattccgaggaatatacttcagtatacgcacatgtacacatattagttagccaagtactcttcctaactgagatgcgtatagatgaaaggtttagaaaagtgaaaaatcttcttaatctttccattatgattgttgaaacaaagttgcacaatagacatgagattgtttacaagcttctcaaattggttatagtactttcagtagtaacagctagtgttcaaataatcttttatgccatgaataatgtgaagaataaattgataaacaggctgggggatcaatacttaaatcattgcttggtcacatttattgagtgtgagatgtttttgaaagtcaaggactgtgatattataaaccgctttcaagctatgaaggaaccaaaatagaaaattagaggtaccatgtaatatttgtagttttatttcttcgattatcggtattgacatactgtgaaccattgatttttttttactatgaactttttttttgttaaacgggaatacccaacttcgaaatcctggctccgccacttcggaccgagtttgcagccttgcgctgtgaggaaaaagtccaatgtatgtccctctaatgattgagtttcgatcacgtccctcaatcacagaaacaggtacaacgcattcctagtcttccaaaagccagtgcaaatatagtccaaaggcagcactgaggtcgtttttagctgacgtggtgcagtggtgcttatgtagcgtattgactaggttttcgtcttacaagacatctacgtaacacttacattcaagaacaaaaaaattttaggacctatgtggggccaacatgttaggggttcttcttcctccaaaacctcccttctttcctctcttccccatctctctccacctctatcctctcttcctaccttgtcggtagggtggtggcaagtagaggccgagatgatggcccaacacaggtagacaagatggtcacatacaatgagatggctaccatcactatcgagtgtcgcctgccttagttattatgacgtaccactttcattcatttcagcgagtcgcgtgtattagatcgattcaatcggtttctagtgcatatcgagatgacatggcatccatggagatggatattacaatgatacgacaagaagagcaagtcacaccgccctggtgtgatactgtggctttatggatgactacgagcaaatggaggacgatgaaccaccctcaccgtgagtcaacaagcccgggtttttttttccttatgccactgccggagcagaaggtgtccgtagcatatcatgcgtagctttggcgtacgaatgcccgaataaacaacaagtatgggtctcgtcggcccaatgaaaagaggaggaagaagaagaagtccaagcattatgtgtcgccgttgtcgtcttcaccatagtcgaggtcgccttcgccagcctacgagatactccctccgtactcgtaaaggaagtcgtttaggataatgtttaagtcaaaccttaggaatataaatcatgaataactctcaggttgttgagtttgaaaatataaaaattatataaatagatttgtcttgaaaaatactttcataaaagtatacatatatcacttttcaataaatatttttatagaaacaagaagtcaaagttttgtttttagagaccgtgtcgctatccaaaacgacttcctttatgagtatggagggagtatctccaaccctcgaacccaacgacccatactagataccaagaagaggggggagaggtagagatagatggggaagagaggagacagggtgaggttggaggaagaagaaccgctgacatgtcggctctacatgagccccatcgggtttttttattaatgtaagtgtcttgtgggatgaagacctaatcactacacaacgtgagagccacattacctagtccctacacaacgtcagtaaaaaccggcttcagtactatctcaggattacattttcactgattttagaagatacagatgtgttgtagccaattttatggttgagcgacaggataaaatggccgttaattagatagagacgtaaaagtagacttttcctgcgcatcaacggctgaaacagcccaaagagtagttacggtgctttggttgggttggactcgctgagtcctggtattgggccatcaagtcgcaatggggaataagttcagtttagacccctcactgttgtccagtctaaaattgataccgaaatggatacaacgtgtccatcaactcccaaaaccaccccaaataagatcacaagatggtttggatgacgatttcaactgatgtggcacctacatgaatggtttgattatcgccatgtcacgccacgccaagtgcagtgcgggtaatagttaagggagtcgaaagcccaataaaaagttggattttggcccaatagtaacaacaggttggatttaggcccattgtgtatgtaagctacagtaataagtactccctcaccaaactgcgtgacgtgttcaagatacagtctctcagttgacccgtgaccgtatgctcaccaaacttttttcttaaaaaaatcgccctgttctgtaagactgtaacggcgagttctgtttttttaaataaagaaaaaactgccgaccagcttggctaggctcgttactagaatcaaaatattgcattataatactcgtattctgaatctgagaatacacagccgtgctacacgtttgtcttaaggacgtgtcattaaaattctgattcgattcctcgtgtgtttggtttggataggtcatatgttaagaaaaaagaaaggctttattaccatgtgggacacatgtcgcagttgttttaaaacggttgggagttttggcttcggactggctttcacacggccgtgaatggacaccaccaaccaaacgatgccgcggaatattccttgcaacgattttcatcagggtcaagtcaattaaatttgtttatcatctgggaaaagtaagctaaagcgaagcaagagcaaaggagattactgctaatttttctgctctcttcatccaaatatatactccaacagtctagaacatatttagtagagctctgacttctaaatttgactccaagagttatgagtagagttgtagagccgccgaaaaccgtcgaaactaagctctatctctttagttcattagagtgttccactcagtttcacttctattttagatggaactaaaactctgtttgactaaagctgtagatgtgccaaacagacccttaaaataagattagatccatttaagaactacgaatataaaaataggatttgaaattagcctatttccatattcatagttctaagctagtccaatcaactactttctctgttttataatataaaatttttattaacgtctatataaatgtatgtgagtacgaagagcgtatattgctatatattgagaacgaaaggagcattacaaattgcactatttttgtagaaaagaaataaactaatctccgcaccaagacaaaagggagggagcaaccagcctcgctggaacggtagcgtccttatcctcctcctgctattgattattttgcgttcccccgtcgccgcggtcccattccgacctgttatcgcgtacggataccggccaccactcgcggatcttctatggcatcttcacttcaagagtatcatgtgcaatctttttcgattaaacagaagaggcacaaccgcacacatcaaatgcacatccacaagtatgacctcaacatgataagatcaaatataaacaaagaccaatagtatatatccttaatcccactaaatttctattaaaaacacatttaatgtgtaatattcgtgagtatagatttaaaatctagcgagtgagagttatgcacccaccattgcaccagtgcaccaccgatgtttcctcaatattatgtacatattggtgaagtgaagaaagtggcggacctaacaaccaagaccttacttttgtgttatactcatgatagtaattcttttaactaaccataacacttttacgatatagacaaatgcaaagcatgattaacgaagggtcgataataatggtgaaactgcattacatctggtagccttatgctcatgatagtattttttaagccaaccatagtgctctagcatctatagagtagtagagtccaatgtaattcgttgctatattgcttagacaatagaggtaacaccatgtacgaacaagattactatatcctgacactagcatatcacaattctttagatccaccactcccgataccggtaaatcataatttctgggatccacgactagttggtattaccttcatcctaaaataaaagagattttggttggatgtgatacctctagtactcgtgatactaggatgtgtcctgtacatccaaatttttttatatttaggatagaagaagtaagcagcgttaatagtaccaactacattagtaatatcacataaagtttcagtcatatggtgggttagtgatactattatccattgatttttataatagataagtatattataaactgtaagtagtagcacggtatataaatagatggtactggtacgagattaggtgctactaataagagtgtgttcttcgcagagcacagcacgggtggttttgtggtgtactatggccggcacagagaatcccagatggcattgcaggctggaacacctccgagtgggagtggcccatgaaaggtagtgcttcgtcgatcttatctccggtgactcatttccgcatgtgaagtggcgcgacgctccagcttatcaattgtatttcggatgtgttttttcacataacccctcctgttattcagtttctgctctgcacttccctaatatagaaattgaaaattaaggcccaagtttgcttcaagtttgtatcgtagacacacttccaactttccaagacattttacacaagagaattagagatgatattgatctaagcttgcaagaacatttactagtttgatttggaatatgtcggcatctttcatttaccaaaacaaggttgtgttcgccagtgtgagttcctaactccacattcttcattttctgtgtgcacgtttttcaaattgctaaatgatatactttttttaaaaaaaactatacgaaaattactttaaaaatcatattaatctatttttttaaaaaaaataatactaaattaatcatgcgctaataagtcgtttcgttttgtacgcaaggaattagagcatgtttaatagtatatcgaacgactaacttcaaatcatctatagtcaatttagtagccaatttatacaatagatacctataaacatatacaacactagtaatatctggtcctacctgtcaaacacacattatattttataatctaggtacaaatttatagcccgctgctcttctctcttcttatttatctactcgatatgtgttaatagttggcttatagtatgctgttgtactggctcttaggtcccatctgaagctactgaacacaacctaagtgtgatctaagcttgcataaacatttaccagtttgctttggaatatgttagcacctttcatttaccaacacaactaagtgtaatcggggtcatcgttttcttctaggatattgggttgtacataactttgtatttcaatgtacgtaagagagaaaaaatccattaagtagttttatgtgctatgcatatctttgtattttcctctggataactaagggctcaaattatgaacatgaattatttgtgtcctattttcggaaacttcatgtagctaatttttttcttaaaaaaatatagttttaaaatctagtaaactaggagttggttcagattctcatcagaaatttttagaatcaagctcatggagccttcatactccacaattttggggaaatgtagtggtcacacaaaaaaaaagagaaatatggcgataagaatctcctaattctatcacaatataagggcccctttagaagttgtacacttatcatcacaccacacacccctatctatcgtcaacttggtggtttctcagtgggcaggggagcagaggggcacacagtttagattttgtccctataagagcagacttctattagccgcgtacagatagatagacacaacagcaacaacaacaagcgaattcttcttgcagatagggaaaaaaaaacgaaagcgagagatgaggagcagctcggctctgttcttggcctttgttcttctcgccgtcttcctcgcggcgctccccttcgccgaatccagcggcaggcaccaccaccaccaccactcccatctccatggcagaggtacgagcaaaagcagaggaatcgaaagatatttgctttcttggagcgacttcttgcttgggtcaggagctaaattgaaggagaaatatttgggcttcttttcaggggaaggcgagagaggaggagaagcacggtcgctggcggcgaagggggcggcggcggcgtggccgtgctgcgacaactgcggcgggtgcaccaagtcgatcccgccgcagtgccagtgcatggacgcgaggccggcggggtgccacccggcgtgcaagagctgcgtcaagtccagcctcagcgtctccccgccggtctaccagtgcatggaccgcatccccaacctctgccagcgccgctgcaccgccgccgcccgctgacctcccccgccgcccatctgacccgacccaccggccaccgccaccgaccggccttacttaattaagagtggtttttgtttgtccctttttttttttggaaaagctgaagaagtgaagaagcagtagtacctactgtactggaggtgattggagggagcagctggtttcaggtttatgtgctggaatcagcctccagttttcatctcctcgctctgctaactacggagtaattgtgtagagattactcgccgagctatatgtacaaacggcctgtgtgatgagacgaaattgtaatggtaaattttttttcaccttcatatgttggatatgagtgaaattgttgctagcgaaatgatgatggatgcgtgcttggttcatattttccgttgctgtttgtctggctctgatgctttctctcctcttctgtattaatctcaattggattacaaggatgcctgtaaaagcttatgacatgctgttggttgattttgtctacttatgtcgataagggttaggagaggacgccaaaccctaaatctaattgcccgatcaagtgcgcactgtaaggagtacgtgaggttctctgctgtttcttttcatcaacaggaaatcagaacgagaaaagcaaatgaacaaaagacaaaactagaagaatcattgatggcttcaaacataggtcggtagattgattttataattaggagaggtgattgtttataggctaaagcttaagatcttgtaatctagaactctaacatgatgagggtaatacagcatgaacctggacgcgatccggcatgctgttccggggtgtatgaacctggacacgattggggacgaacggtcggtgaaatttgggaactgcacatcagaaggcttgtgttgctgtcaaccgaattaatcaggacgattgccatgaacaacatccacgatagtgagcttgcactttgcttagtggaggacggtctgggcctctggggattcgcatttccacaaggatatgcgttgccatgattttcactaggccgcttgtttaggcacgaaaggatgggaaagtgaggaatatgctcggcaagaagccaagaaccaatctccaatagtgcaaatttggggtgactttacatgtttgaattcaacattgcagtcgcgcaagtttgcaataccactatctgaatccgtggtccaaatctgaagagacctgcagtctgcacggtctctagagcaacattgccagtactaaagaagaaagagttccactaaattgctcatgtggtgatgttttggacttagctaaaaatatgtcgacaattttttgggctgatctcagtcggcttctctgtgcgtccgattgctctgcacgagttttcggttgtgcttgccggaccgttcgatttcttctcaaaatcatctcctataaagtaaggactgcatatgcttttgctttttaacttttccaatgtaagatttaaatttacatctcacttacacaccacttacatatgtaattactatgtaattttaagacttacatatgtaattttaaaatttacattgtaaatccattaaatttacatatctaatttagtaacttacaatgtaaatacatgctgactattttttgataaaaaatatggcgctataaatatagctactcccgatgttttttattgattcatcatgtggtggtgtcgtggtgatgttgaacagttgaaggaacagagggagaagaatctgagacaaaggacggcaagagagagacacacgtgctgaaaagaacaggaaaaagagttgtccaggcccaagtgtgcttctctcgtactagagtgaggcccaggaagtagcttacccgtcgcagcctatcaatgtgggcctcttttgtctccaaaccagtagactacggcccatgcaggcccatcttgccgcctaccgaaaagaattttttttatttataattttttttattaaaagttttacaaaaataattttccattttgaaaattgacggaagtagttgcctaccgctctctgggagggcgatttttaagggcggcgaaaatgacgtggcagccggccgttcgctctcgggcgacggccgtcaacgaaatttgcaggcggcccccttgccgccctccgctagggcgattttatactgtgcggggggccgcctgcaaatgggcggcgaggggggcatggaattttgcaggcggcccccttgccgccctccgctagggcgattttgtactgtgcggggggccgcctacaaatgggcggcgagggggcatggaattttgcaggcggcccccttgccgccctgggggagggcgattttttgcctccccctataaagcccagtccctcctctgttaaatttcattatattcactaaaaatccaaaaaaaacgaaagagagagaggggagggcagcagaaggggagcggcgaagccctgctggttcgctcacttcatcacaggtatgctcccatacatcttttgcatttgtactaatatgttatgtttgagtatatatgttgcgttttagttttagttccatatattttagcacatctgtagcacagagcacatatgtgtagatccagagcatagaatataatagtatgaattgagacatagacagtagtgttaattgtaagatgtagttagtttgatctggagaatgtaacgtaattttagaaatttagagaacaatattgtagagaatgtaacttagggcgtagtacagaaatgcaaggttaacgcagttattgttttcatcaggcacaatgtcaagtaaggtcacatttcagatagttcacggtgaaggaaatattagatttggtccagatggtgttgatctgtcagattttgtaatgacatctaagggcatcgataggcctgcggagagaacatttcagtcaatttatagttggttgttgagaggatttagaatagaccaagaagtctacacaatgtcagtatcagttgtagtgagtcgtgcaacagaaggttatttttgggaactaatgccgatggacagcactgatgcttggagacggtatgtggaaatggcttttgaacggtcatggcccctcgttatatttgtgttggtacaagagaaagatataaatgtttcaatgcaaaccgaagatgtagagggtcctatcaatgcaggggatgttgttggaccatcgatgcaaaatgaggaaaatcaaccaagggaggagcaggccatgggcatggcggatgagggggagagagtcggtataattgttgatgaaatggagagggaagattcggataatgaggaagcggacgacgacgcatcatccgatgaggaaggtgatgtaatggccactgattgggcaaatgaggacttctctggactttactttttattactactgttaaatacttgtacgaaactgatggtccttgtccagcaggattcgcagccgggatcttcggtactggggcctcttcgtctcacgccggtaggactggtcctactagccagttctacgacgacgacttgcacggtgcacaccaccacgacgtactaggctcctctcagcttggaggagctccagaggcgcacactcaggagcagccagaggtcacacctgtacaggcaggacgggttggccgtgccgtacccccggaccgactcacgtactcccaggggcacattagggcgcagggtaggagggacaggggtaagaggcctcgtcagtagtgttctacctcttcagtccttatgtgaccgtttcttttggcttacaaacttgtaaagcagtactacttttgctattactactgcagtactacttgtgtttgtctcgtctacatagttcttttcattcatatggtgctagaacaacttatgctcacgacaacacactttcggcgcttcacggtagtgtcagatccagtagcgcgcacagtccacaacagcacacatgaaaagcggcagctcgagttatcactatcaactttcggcgctgcctgttgacataaagtgaatcacgcccacgcgtgatcgtcttgtcacatctaatgaataatgtatctcattgagttcacatatattgcagtgaaaacgacgctatataattgacaatctgaaggcaacctcttcatatcttctttcccactagcacaccacacacgaaaatggaagcctattcattggtaatacgtaatctagatttaagattatgtagaacattcttcactacaattttacattttggcagcaaaccaaatatgatcaaatgcaattttaccttaccaaatatttggtagtgccaaaacttgcttatattttggcacaaacaaaatatttgtacggtaacaatccaaatatgccctaaaaataataaaattgtattttaccagtcttggagattttaatcttgtataattttcaatataaaaagatttgataactattgatatttattaaaaaatatagagcacactataaaatcgccctcccccagggcggcaagggggccgcctgcaaaattccatgccccctcgccgcccatttgcaggcggccccccgcacagtataaaatcgccctagcggagggcggcaagggggccgcctgcaaatttcgttgacggccgtcgcccgagagcgaacggccggctgccacgtcattttcgcctcgccctcccagagggcggtaggcgactactcccgtcaattttcaaaatggaaaattatttttgtaaaacttttaataaaaaaaattataaataaaaaaaattcctaccgaaaacgggtggaagcgtcggggattagtaccacctcgcggagtcgaggaggtgcgggtgggagagatggctataagtagagagccccgtgcactattgctccatacttacctggacggggtcaacgggcgatcaagaaggctcgtggcctaggccaatggcccacattgcacttggtgggcgcgttagcttaccatctccccaagtgggagagtggacgtcataatttgtggtagagggggtacgcgtccgcgcggcccctgccaactctcttagattaaatttcggtccttgctattgttggttaagtttaagttctttattgcattcgtatgctttcgcgcggcctctaccaattctcttaaattaaattttggttcttgctactgttggttttggttcttgattgcataggctccttgtatcctgaattttcggttttggtccgttgggtttacgagccatgtcaatctcttaaattaaaattttggatttgggtttgcgctggtaagttttgcatctatcattaaacattgttatttttcgaagagaaggtccaaatcaagcagagttcattacaggaaacaaaacaaaacgaacacagcaaccacttcaggaaaactggggaataccagctaaactaggacagcactagaacacacacaaaaaccaacttctcaaacaaccacttaaactacttctggggataccagctaactaggacagcactagaataccaggcaccagctaacgagggcggaaatactcttcatcctttggagaacgtgattggccaggcttcagttaaaggcttggtggtgtttaccttagctgaagcactgctccccgtccgacaaaccagcgataatcataaagggaagacaattggcatgaaaggaaggctgaaggaacaaggtgctcctgggaacttgaatcatcagcgtcgttgctcaatgtcgttggagctttcaacccagaaactggtagaggagcaatcggactcgtggttagaaattcagatggacaagttctcctgtcatcttggaaattcctaaggcgttgtgtagaggcagaagaagcagagctcctggcttgcacggacaaatcatctacttcctccatttcatattataaaactttctagcattgtccacatttatatagatgttaatgaatttagacatatatgtgtaagatgatgccctctaaaagatggcaaacgagaattcaagtacgatgctgccctgatgtttcattgacaaaagaataggatactagtgtctactcctttctgaatcacgacacagcgagtcatgaatttaatacatcagatacccgtaaattttcatggaaaatgctatgcataacaatcaagtttagcctgcatatgttttcttggaaatatatgccagatatagttatctgaagaaaataaaaagtaacaaataaatggcttctctaatgtaagcccaacacaatcaaacccgagaccattaccggtccaacccaacagattacacctgtctaggattgcaacggcctgtaatacaaggtccattacaaaccgccttattttggcagcccaagctagcacaaaacctctcagaagtcagaacacgagatggaaaccgaaaagaactctgcgttgctccacattagtaccacctcgaaagtttgcgtcgattgcctggtgctctttcggtataagtacagaaccccgagatccgttgctccatacttacctggacggggtcaacgggcgatcaggaaggctcgtggcctaggccaatggcccacattgcacttggtgggcgcgttggcttaccatctccccaagtgggagagtggacgtcataatttgtggtggagggggtacgcgttcgcgcggcccttgccaattttcaaaattaaattttggtcctttgctagcgtttgcttgcaattggaaaactaaacagtccctgctttcgttttttgtcgcttcttgaactcactagaagtaataaatttatgaaaaatttgctcaatttttagaaaaattgtggtgtttagattaagttttctaaaaatatgtggtggtttttgtaatgtggatatgaatagattatgaacgattaaagtaattgttttatttctcgcgcgagcacgaggtgaggctcgattcactttcactataatcgcggccatggcggcgaaggttgggttgttcccctcgtcgtcactcaccaccagcccccacgccatcgcggctgcgccgaccaacgctccccgcccacgcggggctcgtggattggcgtctccaggtcgatccgcggcggcgatggacgccttccacgtgtcgtcgcaggccgccgagccgctcctccgcaccaccggcgccgccgccgccgcggcggcggcggcgacggcgacctccaaccccaggctccgcgtgcggaatcctgaccctaatcctccgcgccctaattatagccgtcgtcgcttcttctatcctggggcaaggtgctggtagtggtcgtggtttttgacgacatggaggtggatgtgcaggtgcggacacatgcgcagggcggcgaggcgccctccagcggtggcgccggagatggcgcggccgggaaggagttctcgtggtcgtccatcatccttccgtaagatagctcccctctccatctctttggtcagtgacatttggggataaaatcggacagtgataggtgataagaggaatgcatttctagtttggttctagcttcccaatgttgagggatagcattggcacctaatttcaattcaagggagagagaatgctttttaactgttcagtagatattgcttgtttcatcgtgttgatgagaacaatcatattaaattagggcagactgtacaatgcattgtaagtaagatgcaatataattctgcactgtcttctcttctctgctttaatgctagataagaacatattataattcaggagatgataggtttgcatagtattttgattacatactgaagacaaatgttatagttggatgtaaaccattggtggttattatattaatacggcttggaatatggataaaaaaacaaaagcataaaggggaaattggaaaatatatcaagctttaactacttgtgggtcaatgtttggaacctaggttcttgttccctgcattgggaggactcctttttggttatgacattggcgcaacctctggagcatgcatatctctgcaagttagtccctattttggttggctatgcaatctgttatagttgtcatgtattgattcactctaatggtgtttattcctccagtctgctgaactcagtggaaccacttggttcagcctgtcatctatacagctagggctcgtggtaattttttagatattttcatgcttaccaaactttttgttttcccaatcaagaacactactgtctttaatgtgattttttgtcatccaatttaggcaagcggttcactctatggtgctcttggtggttcgcttcttgcatatcgcgttgccgattttctaggtgattcgaaaaaaaatgtttttcgttttttttccttactgtataatctttagcaagaaaattgactgctagtctactactaccatccttggttcaggaagaagaatagaactggtcacagctgcagctttatatatttctggtgctctggtcactggatttgcacctgattttgtacttctgatcataggccgtctcctctatggtatcggtattggtttggtgagtaactctgaggcaaccttttttctccccaaaatgcaatgccactgttattgaacaagtaaaagtataaattcatgtagatgaatgtcagaggaccaatagttatatatctttttgagttgggtagcacatgaaaactttaagagaggaaactgaactgcataatctgtatacttggactgcaaatgactcattacttccagatttagtaacagtgtagcttgatgaccacattttggtggaattaattataaaataagtggaaaggaaccatgaacgcgtttgatccttccagatatggcaatattgtgaatgcttgtagttgaaatccatcatttgggacaaggtctttccatatgaactttggacattgttgttactcagtgttgcggcagatatctatacctaattaaaaaaatacataaagcttccggtaaaaatttcgtccgtcaaaacccatgtccgagagactcttttatccccgcacaattagcgaagtcctgtttctgttaaccaaattaacaaatttaagttagaagcccaaacacggtcacgccaaaaagaaggcctgacctgggccttgaagaaggcccgacctggtttgtggcgttggggaaaaagatgaggaaaacagcctaagccagctggtaaaaccatggaaaaaatttgtatataccaaaaataatgaacaccacgtataagtggaagagatatagaaaataataccatctaacataaattattacaataatgggataattttactaatcagacccaataaatttaaccaaacattatcaacacagacatcaaataatctttacacgcatatttctcggtggtctcagctcgggttgggggaggaagaattactaataaaagatacacaaggattccgcatatttcttttcgtacgctgtccataccaatccactgcacacgaatgatggccagccggcgagcttccgagcttcccctgacctttttatcccaagttttgtgaatcactccgattttgagggaaacggaaagaaaatatcgtgtgggtaaaaaaacctcaactaattttgggagatcgagaaagatttggccggatttgatatgatgatcagcttcggtattgtatagatatgggactgtctcccggaggttgaagatgctactaaagcgcgtgggtttggcttggcaacgagagaagatatatgactatgctatctgagcctgtggctccatttgtgggctgggtcgaagagagccgagccgagcagagatatatagaggcagcagactgagctggggcttataaggaaggaatgattttagtgaaccttttgcattataatgtatagtgatttcaatattttaatttattgttcaacttctaatagatgttgtataaaaaaacgcttttacccgttgcaacgcacgggcattttttctagttaatactacaaacagtatatttgtttactgccaactaaaaaaatccgcaaatatctaaactgccgatgctttgttagaaaggtgttaataataactgaagaggaacataaatgcaaatgaacatattcatatcaaactaaaggtttggagataatgaatcattgttgtgtccatgtatattacatcatggggttatgtaacatcactgaatcaccatgctttgtgccaggcgatgcacggtgcacctctttatattgcagagacttctccttcgcgaatacgtgggacattgatatctttaaaggagttgtttattgtattaggaatactggtatatctctcttccaactgctacacacttttaagtatacccatctatcccctgctgactactccctctgtccccctcccccccccccccccccaaaaaaaaaaaaaaaactactgggtttgaatctggacata

SEQ ID NO: 8774 - DNA, 7655 bp, Oryza sativa
tgcctctctctctcggcgcgtgcagcgcacgtgcggggaggaggagcagccgagaggggagaatgggccgagcaagggagaaacggcccacagccaagagggacgcaatttagaccttttccgagagaactgatttggataggattgagagatttagggtttggattcgagttcaaatttgatattcgaactcgagggtttagggatgtatcaaggggaattcaaggagaagtcaaggaaaagattcaaaaggaatacttgggtatttgttctcgggaacatagggtggagtcaaggaaggaaacaaaacgggggtttggacattttgggatttggaaatgtgtttggcgaggattcaaaggaagggattgactttcggatttagatttcggagacttgaattgggagaggagatttgaggcggaggattttgatttcgatgagagggaacaacgggatttgaattgagatcttggcacaacttagactcgcacacaaagaacgaaaattttcgcaattaggattttgccgaaatagtttttaacaactcacgaaaagcggagcgttacaagtagctttttaaaatacgtgttaatagaaatatagaagtagctagggccctgtttagttccaaagttttttttctaaacttccaactttccatcacatcaaaccttttatacacacaacttttcagtcacatagtttcaatttcaaccaaactttcaaacttcagtgtgaactaaacacggcctaagttcaattacctcttattagaacgcgaccttagaatagcaaaaggtgtatgttttggatcataatatcctataattaataaactcgcatcagcaaccgatcaggggatgtagctcaaatggtagagcgctcgctttgcatgcgagaggcacggggttcgatcccccgcatctccatttttttttattttttttacttccctattccaagcactatcttcccaactgttctgaatgttcaagaccgtttatctcaactttctgaatattttccttattctagtaacttgtaaaacgagatggagagcaatgagattattatcagtcccaccatgattatacatatagtcggatcaattaactgcgcacattctctgaactttcagaatattttgtttaccctgttctaagacgagaggagaacaatgagattatctgagtctcaccacaccatctgcatcttttgcatacatacgggtgtgtttagttcacgtcaaaattacaagtgatgtgatagaaaagttgaaaatttatgtgtgtaggaaagatttggctgtgtttagttcaatgtgatagaaaagttgaaaatttatgtgtgtaggaaagatttggctgtgtttagttcctgaaattgagaagaagtttgggaaaagttggtagtttgaaaaaaaaaagttgagagtttatgtgaaatgtgatagaaaagttgaaaatttatgtgtgtaggaaagttttggctgtgtttagtttctgaaattgagaagaagtttgggaaaagttggtagtttgaaaaaaaaaagttgagagtttatgtgagtaggaaagttttggatgtgatgtgatgaaaagttgggagtttggggaaagtttggtgtgaactaaacagagcctttaatgtgatggaaaagttaaaagtttgaagaaaaagtttaaaactaaacaaggctgtaatagatcaataactgaacacgctactagtctcaagtgcaaatcagacgtatgtacacatgtgtggagattatgggtaccccatacccacacggcatggttatctgactagttataggggataacttatatgtatgtaatatgtaacagatcataacttgggtgttacgtttccttgtatattacggaacggcctaaagtcctggttggctaatattgtaaagtagatttaggaaaccgataccgtattggttaaggtttctatctcgtaatcctgccccccatcctatataaggtgggcaggaggccctctagggggcagatgagacaacctgatcgtcagatcaatacacactcggcggattcaaatccccaaacaggagtagggtattacctctcattgagagggcctgaacctgtctaaatcctttgtctccacatccatccacttttaggtctcgtgcgctaccccgttttattattgccgaattcatgtttcgacagttggcgcgccaggtaggggtaaacgtcgagtttcctgacgacgagtgcgatggaatcaactttatgagtcgccggcttcgtcttcgctttgggagctccttgattcctcgccgccgacgacttcaacaagacgaatcgtcgctgctattctctgcctgatcttgttcgcatcagcacgacggcaacgacggggcaacgacagttcgacggatttgatggtcgtcctcgtccaccaccaagcctactggtccaatctacccaacgaggatgccatggtgttgcaagatggatctacaaacacgaagcatgccaaaaccgatctaatcggatgcataggagacggctgcagccacgccgatgcctccctgccgtcctgcgtcgtgctgatggacaccaacgccgcccgcgactgcgacctccgcctcctccgctccgtctcggagtcagtcgaagagatcaatctcggcgagttttttccttttaatctccgacttcgccgggttttttccttttcaacttattgttgtttattagattgatctctaaatgtcagattaatctctcttggtattttctgctgtttgcatgtaacgccgcggcactactcttgccgactggtgcttccgtctgcatggctggcctattaagccgccgctgttgggcgtctacgacttcaccgccggcctgcctccgtcgccgccgattggtgcctccgcctacacggctggcctattatgccgccgctgttgggcgtctacgacttcaccgccggcctgcctccgtcgccgccgagtggtgcctccgcctacacggctggcctattatgccgccgctgttgggcgtctacgacttcaccgccggcctgcctccgtcgccgccgattggtgcctccgcctacacggctggcctattatgccgccgctgttgggcgtctacgacttcatcgccggcttgcctccgtcgccgccgattggtgcctccgcctacagggctggcctattatgccgccattagtgggcatcttcgctttcaccgtcgacagccttcgtcgccgccgactggtgtcttcattgttattaatggacgactttgttcctacattggccacctctgccatcaccaaggggaatattacaaagctaagtcatcatttattttattctttatatgatatttttccttttcctctgcctcactacaccaattggtcttccattgagtagtgagtcgggggctacagatgttatatcatattttttataatatttatcttgattgcttgcgacataatctgagtacaaaagtacctatcgagttatggagttctatcttcctatgctttccgtttggtttgccaatggatggttgcctttgggccgattcctagcacccgggggctcgttggatggaccgagtaacgcaaggtgctaagtattattcggaataaatcaaaagcatagagatgagataaatttattttctgctcttaataattgcaaaagtacctaagtagtaaattctgatccgtgaaactttgttccattaatgacgaactcatgtcactcatatgcatgtttgggaaatgcctaggccgactcccgatgcttgggggctatgactagtcggacagagtgtttaaacgtacagagtcatctgctcggggaaatcaaaattgacaagaggagaaatacatatttatcaatattttaaaatacttgattttttctcgagtattatatttatatcagatactactcatcctatatgtttgttctgcaggatccagatccagatatgcataaaagggattcatggctttaagcttatctcttacgctccaggaatggatcagtcagaacatcaccaaccggccgcctcgtctgccgccgactggtgcttccgcctgcacggctgacttattatgccgccgttgttgggcgtctacgtcttcaccgaccggcttgccttcgccgccgccaactggtgtttccgcctgcacggctggcctttaatgccgccgttgttgggcgtctacgtcttcaccgaccggcttgccttcgccgccgccgactggtgtttccgcctgcacggctggcctttatgccgccgttgttgggcgtctacgtctttaccgaccggcttgccttcgccgctgccgactggtgtttccgcctgcacggctggcctttatgccgccgttgttgggcgtctacgtcttcaccgaccggccgcctcgtccgccgccgactggtgcttctgcctgcacggctggcctattatgctgccgttgttgggcgtctacgtcttcaccgaccggccgcctcgtccgccgccgactggtgcttccgcctgcacggctggcctttatgccgccgctgttgggcgtctacgtcttcaccgaccggccgcctcgaccgccgccgactggtgtttccgcctgcacggctggcctattatgctgccgttgttgggcgtctacatcttcaccgaccggccgccgcatccgccgctgactggtgtcaccgcctgcacggctggcctgttatgacgccaattgatgctatcttcttcacggctggctacatcaccgtcaccgctaataggcatcatcatcttcaacacaagctgtctacgtctgctgctgactagtgccctcacctctacgtctggtttagacagctaccactactgatgaacatcatcgtcttccgtcgccgactggttatgctgccgccgactagtgcttttatcttcacaactgcgcgtcttcactaccagtttgcttctgtcacttcatcacggcaatgcaactttgtcatcatggatttctacttggacatcttcaacatttatcttcaatcaagcaatgactactcgacgataagaagctataattctcgactctatgttcagttgtttcccaactaaacaaagagtcgggggctacacaaatacatggctcaaaattcgacaagctttatgtcaaagatggagcaatcaattaatcagccaacgagtcaactccaggagtcattatcttcatctttgcttcggagcagatattctacttcaacaacttcaaatatttcggtttagacgagttgggcaacaacatcaactctcctccaattatttgtcttcacggttggcctactacgcaactgccgatagaggatctcatcgttatcatcggctgctacatcgttattgactggatcactgacatcgtcatcttcatcaacatcttgtcaagcctcatcaacatagcctactctgctgccgttgatgggaaacttcgtcatcatagtcggctatctctgttgccgctaatcatcattaccgtcggatgcgtttgtcgccgccgattattttcttcatcttcatgattggtggatttcgccatcaccgttgatgcgcgtctacgtcttcatccttgtcgtttccgtcgttgcaaggttcgcgagtgcgccggaagtattcaagaagattaattgaagaccgattattgcaagttgaagacaagttgcaaaggagaagacgtttggcttataccccagttgagctgcctgtgggagtggagccggagcttcgctagattttattttccgctgcagttttcttcatgatgaggactaagtgcctcataagtaagtatttatcgttttagttaatttgatgaatctgtatattaaattgtcagtttgtgtacctcggctgattcctggacgaggattttatgcacaaataagttcggaaattactagtgaatttccgggcgtgacattttgtcaccaccgactgttctttcgttgttgttgggcgcctacatcttcactgctagctgacctgactgttgccgactggtttcttcgcctccatggttatgcaacttcattacatttgattggtggcatctttactaccactgacatcttccgttacttctgatgagcaatttcgtcttcatgttggtcatttcatctccatgccgactgcgtcagctattgccaatagacaattttgactatgatagaaggacaagctatatgctcaggggctcatcaactcaagcgtgaggattatatctccaatttggacttgttccggatacattccacatggattcatagttatgagtctattttctatgctcaacgactggaccaattattattccccgtaagggctatcaaccgaatacttgcgccattcgggattcaattattatatttattttggagtatcccataagggataatcattcagatcagaagctattcatatgagctacacttggtctatattacccggaagatttattactcgggagcatgttacatgcgtcatcctttaaagggtgtcgaaggcatattttttggcctaggcctaatatgtctgcagcccatattttcaggtgtggcctgtcacgttcttttagggacttaggcactttttgcttaggccaaagtgcgcgtgatcaagtgcccaataccttaaaatccttttataccgcagttacttaactttttaggagttggtacaatgcatcttaaaaggtgtcaaacagtaaagctttatatagctgtcccgctgacttttttataagtcaaggtgctgtttgggtttttaagcaattgattggatacaatattattgctttttgccacgtaagtgtgcatttttattgaccaatattatggcttaggctgattatatattgtgatcatttttcaggcggttggtaaatcctttatgagtttatttactcggattttataccacatatgccatatatttccaggtgtggtggaaccatgtgtcttctagggacttaagcacatctgttaaagcagtgtgcgcatggcgtatgcccagtactttgaaaatttctttattcacaacatacaagcttctttatagctattttgctatgtgaattttcaatgatgtagccaactttaggttacactcatcatattttacaaagcagtcggtatatcacttggatcatattattcagggattcacaccgcatctgctacatattaatattaagtcgcttggttgactacaattatcgaaaccactcggtgcatctagtcgatgcacctgactttattttttcagccctccacagtcttctgatttagaaaaagtactcgggagatcatggcgaagatgattgaagcactcggctttggagtaatctagttcgagagaagattatctttctgactgtgaaggtctcaggggctactgtgagattatgggtaccccatacccacacggcatggttatctgactagttataggggataacttatatgtatgtaatatgtaacagatcataacttgggtgttacgtttccttgtatattacggaacggcctaaagtccggttggctaatattgtaagtagatttagaaaaccgataggggtgcaggaat

SEQ ID NO: 8775 - DNA, 4172 bp, Oryza sativa
gtgggcccgctgcatccgcgtccaccgcgaaccgcgcgcgtgcaccgtgtccctcccccgcccgagagcatgagccgcgtactccctccgcacggtgagccgagccgctgacaagcgggtcccacccgggaccgcgcatggtgagcccggtccaccggctctctctctcctccctcccgcgcgcgtgcgtcttgggccgctctgggccactttcttgggccggccggcccgttaagctcggccgagccgccctttctctcgggccgcgccctagccgcccgagggaagtctatattccctccctctcccctgttcttttcttttcttttccaaaaaaaagggatttaattaaatccttttcctttagaccaaaaatccaataatcttagaaattcaatatctttccaaccgtaaatccgtttgactccgttcaaattccaaaatttctcaaatctcgagatctatctaatggcacgcttagaggtcattaatagggctttattttcgccgtttgttgagttgtcccgttttgcgtgtagtttcggagcccgaagacccgcagtgcgaggatttcgaggatcaagctccagatctcgagcaaggcaagccacctttgaacatcttgagccatatttgaaatctaattatattgcttgcaaaatattatgcattgataggattgcacttaatctgttgttccgtctgcaaggcagattggcagacctacctaacttgttgcatttgatccttccattgttaattgctataccatgtccccttgtaaccatccagttgcgcctcgatattcgtgcaccctgtgccagtatcgacggtcgccttcaaacttaaaatctgagtaacaacttgggtaaaactggagttttacaaaagacttggaaaacccaacacctgggtcggtgcttgtgaactaaatgaatttccaaaaccgcggaccggggaacgtaccgggtgtacggtttcccgctctcgcacttaaggaccgatttcttggaatttcatccaaacataagacaagtacgaccacatgggtggaatgggacacccctggctgagtaactagcttatcaggggagccttgatgccgagagacatgtggattcgccggggtggtgtcgaggaggacccctgggcttcctggcacagtatggtctgggacctaacctgttgttggtctgggacccctctcgtcggcatatggtaaacctgtgtcggctttggaaatgccttgtcatgaaagcttggaggtctcccgacgtggctgatccccacgggctgggtgatccgggttagtaatgtcgtgtgggtaaagtgtaccccctctgcagaggttaacaaactgttcgaacagccgtgcccacggtcatgggcggatgtgaggtgattcctagcgtagttttgtttgactactgcttgtgaaattgctgttatgaaaaaggggttcgatgtttgaaaaatcagcagctgacgggatcagctaggcccgggtggccgtttgtaaagtcgttggcccgggtggccgtttgaaaagctgttggccgggtgccaatcttgtttcaattctaaagactaatacattgcacatactccgaccggacgagatgcactgtctcatccgtgtcgtttgagaagcactcacctagttgtttttagaaaagagttcaaataaaatcaattgcaaaaacagccgcctttccttgaagcctgcattaaacacttatttccctggcttgctgagtactcccgtactcacccttgctctatataaataatcccccccagttgctgaagaagatgaagcggatcctgctgatgaggagttcttccaggagcaagccggctacgatgagttttagggtttcggcctagttcccaagtcgcgcatgtgttgattggtccaaatcctggcttccgtttcccttttgtaatgcagttgtgagctcgggatctgtccgcagcccaacatgactgtacctctactctataataaagagacccctgttgatgtgatattctgtctccctgtgataccagcactgtttcctttgactggtatcgattaacaggttaaattggagcgtcacgggctagttccggtcggtactagttcggggcgtgacaacctccagccgatgtatgctttaaccttcagatcagtgcttattatatattgtttctagccgattggtttctatcggattatattattgttattttattacatcttcatcagccgattgccttcatatcattatctacgttggacatatagccgattgcttaaatcctatcgctatcggctggtattagcatcggctattatcggctatcggctggaactactccatcggcttgtcagccgatcggctgtttggatctactatttgcatatcttgtcagttgcaggatcaaactgtctggccgctcgcatctaatcaagatttggacctgcacaggagctaaacagatctcccaggccggtgtgttctattttctcgtcaacacagattcttggtcccaccgcggctgcgctcctcccctgcacgctccgcggcatctttgtccagatcggcgtgccaactctcagcggcttcttcgcccgcccctcgccgtcggcagggacgaagacgacgaggccacccatccccggcgccctccacctggactacctcgacaccgacgaaatcgaaaaatcccttctcaccataatcgaccactgcaacggcctcatcctgctcgaccaccacgtcgtcaacccagccacccgccaatggacgcgccttctcccttactcgccgccggagtcgtcgccgccgggcagcgaaatcatcctcgacggctatcacgccctcgtctttgaccctcatcgtgtcgccgccgcactaccagttgttcttgatgccctacgtcctcggacgacgagccacggtgttttctccatgtcttcgccaatttgaaagttttcaaatcttgaattgaaagttttaaaattttgtgttgaaagttttcaaatttaagttgaaagtttttaaattttgagttgaaagttttaaattttgacttgaaagttttcaaatttgagttgaaagctttcaaatctggattgaaaattttaaatttgagttgaaagtttttcaaatttgagatgaaatattgaagttttcaaattttaacttcaaaaattcaaatttcgagttgaaagttttccattttgtgttaaaagttttcaaatttgagttgaaagttttcaaatctgcgttgaaagttttcaaatatagggtgaaagttaattttcaaaatttgacttgacgtatatatattttttaacctgttacttaaaaagatcgtgaaaaaattcatccgtgcttgattaagagaaaacacgaaaaaactaactcatgcgagtagaaatatactccaatccattcacacggtagcacacatgccggataatcgttggacacaggcctgggcctcacgtgggacgtggcttgccagaaagtgcgcgccgccagcgcgtatgcgcttagttttctcggaattataatggtatattttaaaacatgaaaatttataatggcatggatcaaattaaccccatctttaaacacagagcagagttagttatgtttgccagctctaacattgatttgcatacatttaggttcttcattgatgtttgtctgtctttcagatcaatgattttttttctttttggaagtggaagcttgttttcagatcaatgaattccaggttacttaattttccttccaattaaccaatggagtacttgactaaccaatggagtacttgaacaatattttaatactttttcccaattaactctgtaaccttgctgaatgatgcaactgccagagtcttcggtttcattttgacatggtctcctgctttgcctctaatattgttcatatcatagcacagtccataattaatgccatagtgaagggactttttaatcctggtatttttaatcgacgtagattagcattaataaaattaaaatatattaaaaatcggtccaggagagcaacgagagacggatcggccttagactcgctggctctgcctccctcgtccgacgacatacgtccacgtatgtatatactactcgtactcgtactagtatagcatat

SEQ ID NO: 8776 - DNA, 20325 bp, Oryza sativa
tatatatatataaaccatgcagcaacagggccatgcaaaaaaaaaaaaggtcagctcgatctttagtcccggttggtgttaccaaccgggactaaagatcgatctttactcccggttatttcacccgggactaaagatagcgatctttagtcccggattggtactcccggtttggaaaccgggactaaaggggggttacgaaccgggactacaaagggtttctccaccagtggtggcggatccaaaaaattaattcgttggtgtcataacgtatctactggtgtcatagtatgctaattatgattagatcatggtgttataatatatgaataagcagtttaactatagattttgccaaaagttgtcggtgctgtctgataccggccgttacactgtagatctgtccctgaatggctcataattaaaaaaataaggtgtgtatttatatatgtaagtgtgcgcacgtggtaagtccctatgttttgcaatgtgtattagaaaaagattaatcattaagattgagtttttttttaaaaaaaaaagtagacaaacaatcaaagatagctagacatatagtcaatccaacccatgttacatcgtctaacttgtatcagttaggatatataagtagtaatacaattctagataggaggtggcttttacattatatttattactccatctgttttatattataagtcgctttgagttttttctagtcaaactttatcaagtttaacttagtttatagcaaaaattagcaatatttaaaacaccaaaatagtttcaaatatagcattgaatatattttaataatatgtttgttttgtgttaaaaatggtattatattttttctataaatttagtcaaacgtaataaattttaactaagaaaaaataaaaacgacttgtaatatgaaagagactacctatacatttgtcgacaaattttgtcgacaaattttctcccaaaaatttgacagatgtaattatagtacaatcgtagtgtaattacactgtaacttatatgtaatcactgtaacttgcatgtaactacagtgtaacttatatgtaagtttcacataattttgaatcgttagatctattacaagatttgttttggtgagaaagaaaacaaatcacagcacacacatatgtgaaagaatttgttcccacgacctccattttaccgaaataacatgttacggagagatttttgaaagttacatacaagttacactatagttacagtgtaattacatgcaagttacagtgtaattacactacgattgtactgtaattacatctgtcaaattttgggggaaaaatttgtcgacaaatatatagcaaaatcgatatgaaacaggggagtagtcatcttgctcaatgaccccggcccacctctagagatatgagccgaattttggccctacccacacagctgatacctgtgggcctcatactaggccgcacaaatgcaattgggcctcatattggcccacccacacagatgatacctgtgggcctgctactagatcgcacaaatgcaattgggcctcatattggcccactccacatcgtactggcaacatatcccgttccgaaattttcgggatagcgagctccctaatcatgcccagataattggtactattaatcatgctgagacaatcatatttttactggcaaagattatatatatactactatcaatcaagctagctccggaaaaaccaaggagtaaaagggaattcgatggaattttattcatccaaattatcgaagagagatcatcgagtgcatgcgttgccatgtcaattattgtactagtagtgatcgatcaaggcacacgaaattaattaagccgataagcttaattaattaattaagcagaggcgatctcgtcgtcctcgtcaccggccgtcacgccgctcgtcggcgggcagaagtcgacgcggtagttggtgccagcggggcaggtgaaggtgctggtctggtcgtccttggcgtagctgtaggcgtcggggcagagccccttgaagaacatggagtagctcgtcggcgggcacacgtgctcgaaccgtccccggcagcagtaggtgtcgccgccgaacttgccgcacgcgctggcgcagccgccggggacacggagctcggggaggcacctcgccgtgatgtccacggcgcagctcggcccgcgccccttgctgcaccgggcgccaccgccgttcgccggctggaagctcaccggcacgttgaacccgtcgatgagcgacaggtcgaggaagtcgtcgccgccggcgccggggcggccgagcgtgtactcggccagcgtggtgggcggctcgccggagacggcgcaggacagcgcgccggcgcagtcgcccgtggcgcagcggccgcggccggcgccgtcgaaggagcagccggtgcgcggccagatcctggcggccggtgtgccggcggcgacgctgatcgaccacgactgccccgggtcgagccgggcgccgccgcccgggagcgcgcccggccacaccgtgtacgagcagcggttcaccatggtgatggtcgccgcgtcgacggcggcggcggcggcggcgagcagcagcagcgacacgagagcgatgtcgatacgtcgtcgacgcgagatggagggctccattattgttgtgactagcttgaatttgattgatgctgtagtacagtcaatgcctttgcaagtactacaatttgtgtttaaatttatagaagacatgagatgcatcactgacacgtgtgatagatattgcgtgtgaaatttataggtactccctccgttttatattatgaggtactttggcatttttcctaatcaaatttcattatattgaccatgtttaaaaaaaagttatagcaatatcaaattaattttattaaatatagcattgaatatattttcacaatatgtttattttgggttaaaaatgttgttgttattttttataaatttaatgtagccttaaattttaattagaaaaaaattaaaacaactcatcatatggaatagagggagtagttaacttgtggtgtcagtgcatacatgtaaataaattgggaaatctggctggaaaatatagatctaacctgccggcttgagcttgaatgggtcagaagtgatcgatcggtcgacgataacgtacgtggcgcacacagacagagcgccaggccgccagctgatgccatcacttcactgttagttgcatcttcctgtgcaagcacagtttatgatttttatacttcgtgcgcatgcttatgcgcgggaccgtccaatcagtaagggtgaaatcggagcggattcggacggacagtagtcatattatatcctaaactatattttttaagcgggtttggtgcgggtgtggatagtataaggatatggatgtggagcggattgttttggatgtcggaaatggtgcggagtcactgtggaatcggttcggaaacggattaaatttatcggatgttacatgtatatacaatcaatgcaatatcgagttagcaatataaggaacaataatacaataatcaataaatgacccattgtaataattatatgattaagtactacaacatgaatacatgatgtccataatataaaaaatatagctatgtgagtgtgacatgagatggtaaaagccttagaccaaaaaaatctatgttaattgatgaattaaggcattgtatgtaccaacttatgttatatgcaatagatagagtggttatatatgttgataatttcggattatccggcaaacggtttatcggataatctgacaaaaatgtcggataatccgcatccgccggattttagagatatcatatccgcatccacatcatactatccgcatccgcagcccataccatatcggatcggatattatctgatccgttttcacccctaccaatcagtcttgcggagatgctgatctgctgctgtgaaaagagaatgcctattcatgtgttggagccaacacatattataattcactgcaccctccgtcaaaaaaactaatctactattgaatttgacacatcatagtactataaatctggacatacatatatccagatcatcatactagaatatgtcgcatgctgtcttagatttttttttatgggacgtagggtgtagttctttctttgtcccaatttaattgtagtcgtgggtttccgcgtccaacgtttgaccgtccgtcttatttaaaaaatttaccaaaaaaaataaaaaagattagtcacacataaaatactatttgtattttattatttaataacaaaaaaaattaatcataaaattttttcaaataagacggacggtcaagttgaacattaacggtgcaaaactactcttttcgggacgaagatagtattaatttttttatggaacattattcttttttagaatatatggaacattactcgatgatttatattttttaaaactatgtgcattattttttaaaatctgtttgaaccattgtactgtacttaaagtatatgatgaaatgagtttaatattaaatttattcaaacatttaaaagtattttactcgaataataagtttgttatagaatacaatggttcaaacggatcttaaaaataatatatatacgtacaatttaaaaagatataagtccttaatggttaatttataggagtgttaattgtagtcaagaatatatagattgatgcatgaatcaatggattgactagctagctgttaaacaatattattgtgtaatgcttgtactggttgcgtgtggaaactagatcgatatcttatatagttgtacaaattccacaccatcagttgacaaactgatgatccagctcatcttatctatatatatatataaatccgtcagctgtgatcgaagttaatctgaattatttcgatgccattgccggtcggactaatgactgacggagtgcaccagtaacatgttgagtgatgtaggacggacacagcagcggcatatactccctatctcccataaaaaatcaatctagcagtgttacacattgtaatgctacgaatctaaacatatatctgtccagatttattgtattagaataagtcacattcaatcctagttttgtttttcgtgggaggagtatatatatatatatatatatatatatatatatatatatatatatgtttttccttcaaaagtagtagcgccgattttgggtaagtgggtcacccccatcgtcgaattggcctaactctttttgtaggtaccaagagtcgacaggtagtcctaaatccctatcccttttggcgcgagctaattcctttacgtctttataaagataattgttccagcaatatgtagtctttgcattgaatttgaatatatggaagcggcgaaccatctcagcatcatcatacttcctcttgtatgacttgcaatagcgctcaaataaggcccacacggcttcgtccgactcaaggtcctcttttgtcacgcactttccatcatctatatatcgcaaacaaatcaatatatttttgcaaacattgcattacattacatctaaaaagtggtcaataattaaaacagcgaattgtactatcaaatactagcatgcaattaaattcattcaattgttacatgctattcgatcgtacttttttttttcatgcaacaactgaatgaatttacttaataatactagaccatagatatatagtttgtttatgtaaatgtaaatgaatttaatacaaatcaattgaatgaaaaaaaaaaagactatatatagtttgttttgaagcaaattaggccctttttgattcagcttaggattattataatctaaattattagaagtaagctgaaacaaacaagtagattattatgctaggttattataatctataaaccagattactataatccaataatctcctctagaggagctttttccagattattaagtggctaaagacccactacccttagatgcctttaataatccagagaaacaaacaactcgtagattattttacgattattttgtgtcagcttattataatccagcctagagtaatctgatttaataatctaggttataataatcttaagttgaaataaataggtccttaattagggtgggattaggtaggtttacctgggggctcggtgctgtagcggaaagagaggcgatgagagttgtcagggggcttggagaggtcggcgatgcggcggcgtcgagacgcggcggcggaggcagcggccgcgcgcgctgagcgggcgacacgagacgcggctaagctggcggcgcgagatgatgccccctcgtcgtcacggcgcgccgccgccgccgcagcagctaagcgtgcgacgcgggacgcgccgtgggcggcccgcacgagcctcgacgccattgttgtcatggcgatcgatcgatcgagagaaggatgggtgacacggctggtcgccggcgaggaggacgacgacgtacggtgttctatcgtgtcgtgtggccttggtggcgagagatcaatcatcatcaggcttaatttgggtgactacatatatggttacttggagttatgaatttcgatgaataaaatcgaatggatttcaaaattgagatataatttggaaatattagtttgcattccttaattaattaattaagtcatcagtacattgacccggccggcccatgtatgaaagaggatgagagagagttgacagcccaaagaaggtaggtcgatgggcccatcagatagagcaagcccagttataacaaaattcttctcacctgaaaaagcgcaaaaggcaaagctaccattcggactctcctcctcctagctccgtccggccggtgagcttcacattgaccacttgctcctccatctaccatcgatcgatcaagctaccatttgttagatgcagcagcccatctaccatctcactttatccatcccatttccttatatatatacgcacgcacgcacattcatcgatcgatccgtcgatcggtgagtgactcacaggcacagctcgatcgatcgatcgatcaccatggccgcctccgccactcgcagtagtaagctcctcgcgttgtggctgtgctgcgcgctgccgctcatcatgtcctccaccgccgccggcaccaccactgccacgacgccggcggtccagcagcagcctcagcctacggcggcggcaggcgccggcgaaggccagtctccctcatcaactgcctaattaatctcgatcgatcatgatcagtaacacgcagtaaatcgagagcttcacttgcaggtgtcgtgccagctccgacgacctcgacggcggcgtcgaacgtggcagctgccgatacgacttccaagaagataccagtggaaggagcagggccgcacgaggagtacgtgccggcggcggaggtggcgtcggcgctgccggtgccgatccccgacgggaaccccgtggagggcgccttcaccaacggcggcctcggcggcaaccaggccttcttccccggctccagcggctacggcacggcggcgggcctcggcgccggcggcttcggcccgtacggcggctacggcggcggcccagggacgtacggctacaacggcccattgtacttcggctccgcgccgacgagaaccggctcgccggccggatcttgcgccgccgccgccgtgttgctccttctctccgccgcggccatgtatatttgagataataattagttaattactcggttataaatcctaattaattaagctagtatgcgggagcagtaaatttacactcatgttaatgttaattacctaagtaatactcctatatatgattaatgatttgtatatgttaatggtgattatttttcgaggggatagacagtgagttcctgcaattcaatgtagagaaagagagttgatccagttaataagaaaaaccaaaatcaaaaaccttataacaacacggttaattaatgaaaaaccggtgaaaactccgacattgataagaacaacagtccaacaagggaaaaaactcctaaaacgaagccttccagaagggtacaccgacagaacagcgacatcgtctaatcctaacgaatttaaggttttcactcggagaatccccttgaagtggcgctgaacgagggctccaatagcaacgccttcaaaaaggtaaacggcgtccgagggtgtcgctgttgctagcaccggaagtggagcaaggcttactgttaatggtgatggtacgagtaataattaattactccagattgattcttaatttatagtagtagctatcaacagtgatgttcctctttaactagcttaaaattaagatcaacagctaggtaggagtaggacactcttcatgagtgacacaactcgactaatgcaggcaggccatatcctacaaacactccctacatatcccttaatttgtccttctttgagagagagtaacacatgaaggtcatggtgtggtgaaagcttcatcttaacttgcattgcatttctccaagcaagtatatagggagtttgttgagggatctaacaggctttatatgttgcaatctgcatattctgttgcatcagacctgagagtcgcgccgatacgtttcccgatgtctttcatgccgattgattagtactcctacatactacctccgttttttaatagatgacgccgttgactttttctcacatgtttgaccattcgtcttatttaaaaattttatgcaaatatataagatatataaatcacacttaaagtatcatgagtgataaaacaactcaacaaaataaattataattacgtaaattttttgaataagacgaatggtcaaacatgtgagaaaaagtcaatgacgtcatctattaaaaaacggagagagtacgtaataagaggtgacaaattatgtacactatcaggtgcatatatatattgggcatattaattgctctaggtgatcagtagcattggaggaaggaggaaatgaaacacactacttactatgtcagtgtttgtatatcttatatatatatagtatattgggaatttgggataaagggttcataacacacatatatatcctcatcaaactatcacattcatatatctttctgataggtaggtaagataatactcggtctataacaacataatgtgggagaattggatgatgccaattgaatattgaattgtggttctaccactatcagatgaagtgaattgcctcgttcaagtatttattagcattgtaaaagaaaaagaagaggaaggtgaaattcatactagtaccaggcaactccaattcagtgttgaagttgtcaagaccagcttcttgctcaacagttttggtatggccatgtatgtgccacccaatccatcccatccatgagaccatgacggcctttgcagagtgaaattcagctctggctgttttgctgttttcaggtgtttagtgtagctttggggaatgatcttgaggtgcttgtaggatggtgctttcagtgagaacttttcttagatggatgtatatctcttctttatcaatgaaatgagacagaacttctgcctttgttttttttttaaaaaactctggctgttaggctggagggaatgagggaaagacacaggtaagacagtacaatcaccaaaaaagttaaaggcacaagacaatagaatgattgagtaaattgtacgcaaaatcgacttttacctgcttggaacaactatgcacggcatgccagtgcgctcaacaacaaactcataaaaagctatcatctgctccacatttctcttggaaggaagtactgttacagtgttactcaacttttctttctttttgttttttggagaaagagaggtgatcctttcccatttcattaaagaaatgaaagcagttctaaccgacgttttgtttcaaacttgcatctttgctaccagcgtacattactgaacccgactgaaaaaagccaaaaacaaaagagagagagagagagagagagagagagagaagaaaataacagggcaccaaacatgtgctacaccgattatcagacaagagacgcaaaagacaggcagtagttacttaactaggtctgatggtctgatactaattggcaacatcactcaccaagacatgccaagcactcaactaggaattaaacaggaggcaaagggatgatactcaaccgagttgtcttcatcaagttgagagcatgtgatgcgctgttattcacaagttccgggtgtcttccatgtctacagagagctagaacttcagtatactgtagatgtttgtcggacaatgtggtgatcattgtgacagaaaaagcagcatgtccagtataccgaatctccatattgcggaacaaaattaagcttatgggagtgaagcttcagcttcatattctgtttttgttcgtgaggatggatttctggacgggtctcttgtgctttatgtgctttgatctgcatatttggttgcaacatctgaagattatgttctcataatattcccgatggcttccatgcctattcaaagttggccatatatatataggacatgagttggagaaaaggtgacaaggtagatatatgatttgatcatcaaatgcatcaagcatagtgctctcagtgatcagcagagtgagcagcaaatgaagcaatactgtaatgatttcttttatgatcttcaggaaatacacttggatatatactgggagaagaattcagagactcaaaacatatataaggtgggtgaattggacattgccagttgaattgaattgtacaccacacgagttatggaatctaccacgtactgacagatgaactgaattgcctcattcaagtagaacagctgacttgtgaaaaaaaaaaagggaatgatgaaatcaagcaccatggtatttctgcaatgttaatgtacctagcaagttattgaatcaggtgtttgagattttaaaactcagacggaaaaaaaacacttcatgttattactcccacataagctgagaaaccaaaccaaaccagaaaataggatgagctgccttgtccaattacagcgagttcagtacattttttttgttacaaattcatataggagtatattagtaccagccaacccgagtgcaggtccaaattcttaaagaccgtctaatccatggctatgagagtacaaaaaaattgatagggctgcaggtaatcatttttttttaataatggattcaaccggcctcaacatccaaatgggatgtgcacagccaagggttgcaggtaattaatcatggtgactatgtttgctaagcttctccctaagctatccctgattacttgtatggattttctggagggatctcatgggctttatatgttcgatctgtacattgtgtatttgtgttgctgcaactgtctgatctgcaattctgcatctataagcttcccaatgccttccatgcttatccatagtagtagatccaattaattaggacatgaactgaagaagaggtgagaaactatcaaacacatatatccaacgcagattaattgctctaggtgatgagcagcattggaggaagaaggaaatgaagcaccgttgactttttaagtacgagtttgaccatttgtcttattaaaaaaatataagtaattatttattcttttcatatcatttgattcattgttaaatatgtacacatatagttttacatatttcacaaatctatctaatctaattatatactaaaagtccattaaacttcctacaaacgctcctaaaccgccacgtgcccccctacaaacgctcctacgccgccacgtggcactctaataaattagaagaattaagcaaagcatctagccgttggttttcatttaatctggtggacccactatttttaaacgttagatatagcataaaaaaatatcaattagatttattattatctttaaaaatccacacatgccctgtacgtgtacgtgcatgtacgttacatattttgtacgtgggccctactcccccttttcttttttctttttcactaacacatgagaaaaaacaaaattcatattccagcccatatggttcggagtatgtacttgcatgtagggcctcacgtccccacttttcttgtctttttcttttttttcactcacatgagataaaaaccacgttaataatttcaacccatagttgtacaaatataagttattttgagttgtattgtactatacgcacgtcatcgaaatattcataaaatatctaaataaatgaataatatacattatataatctatctatctattatatactaaaagtccattaaactttctataaacactctcaaaccatcatgtggcgctctgatatattagagaaaatcataaaaattctaagaaaaaagaaaaacatctaccccttgattttacacttaaattggtgggtcctatattacacaccgttagatgaaattgattttaaaacaaaccaagtactatagggtcccacctctcctccttctcccgcacatgtgtgggtatacgtatgtaccatggtatgtatgcttccttcccttctttttttccttttttcttattttccccatttatataatagatatatatatatatatatatttaaataatcataatttcaccaacaaagaatgctcacaggtaactaaattagctctacaatttttgaaaataaaatttacaccattatatgttaccattaaattaataatattatatattttctacataaacatgtgtactcattattttgtactattattttcacataatgcactattttaaaataaagtttacacaattatattgtgtacctatcaaataaataattttagatctatattaactgatttatatgtgcacttaaactgatggacccattatttaaatcatcggaactatttttttttacattggactattattctcaaataatgcactaaagtctacatcattatattgtgtacccattaaattaaaaatttaaaatctataataactaatgtacacttataaagaaccggtggactcatcatttaaatcatctgatatattatttgctaataaataaagcgtccgaagttctctttttggcccgctacacaatgcacgtctgcacctttaccttttgcacgcgtgacaaagcatcgtgtctgaggcatctaaggtgatcatgactgccgcagcactaacgttttgccacatataaattcatacatagagaagattaatttattaataacatgaaaagaaaattagaggtgtgatgcagcaagagcagaattaagcaatatgggttgtgttttttctaacacttagctctatttaagttaaaatcgagagttaattacagaataattataatgtattgtgttatgtcgtgtttggattttgtactatttgtagctctatttaagttggaatcgagagttaattacataataattataatgtattgtgttatgtcatatttggattttgtactatttgttggtataggtaaaagaaatcattatgttataatatgagcacaatattaacgaatatcaatagaactcttacaaagacaagagtgctataaggaagtttaagaccctctttttttccttgattctatagttggattttcgtttgcacgctttccaagtttctaaacggtgtcatttttaaacaacattttaactttctagaagtcaattcattcatgtataccctcaaatagctatcacataaatcagataattcatcaatttcagctgtcctaaaccctaagtagtatatatttttttcatgcgagtcatggtgatcattaaattagggatcaacggataatcaaagtcgtaagatgaatatgtacaaactactatcaacaactgtaaattggtgtcaaaattaattgctactaattagacatctaatggcttgctagccacataattaatttctctcgacatgtatataaacatgcacgaagctagaacaaatattaccatatgccccatacatatatattaagcggttaatattctaattacatgtgttaagtcctttaaaatttcttaaagtgctctcaagctgtcacgtggtgctctaataaattagaggaaatattagaaattctatggaaagaaaagcaaagtatccattacttgattttcggttaaatcggtacgcccaatattataaaccgttatattaaattgatcttagagcaaactaaatactgcaaggtcccacctctcatcccctggcataggtacgcacctacgtacgtgggtacgtacgctttccatcccttttttcatttttccctttctttttctttctatgcatacactcccctcccccctttcctactatatcatgcgcttcatgagacaatttatcacaagaattttgagtatcttgctctcgtatttttcatttgtggccatacaacacggtatgtatatgaatggcctgtatgatatttaactagcaatagtttattatttactcgagaaaaaaatgattcaaaagtcgtaagtacttaattcatctcctactcaaagtttgtgaatggttttttaagatacattaagaaaaatagaacccttaaataatcataaaatgacattatccgagctttagtttgcccttaatctatgagacaaaatttttgaacaacaataatcttatctttcaataatataagtgcccgcgcatgcgcgcgggccaccttcctagtttttttaataagacgaacggtcaaacatgtggtaaaaagtcaacggtgtcaaacattttgaaacggagagagtatatgatagggactcaatctgatgacataatgtgggtgaattcaattgtgccaattgaattgaattgtgtgctataccactaccactatcagatgaactgagtacaatggcatgtggcctagcgaaaaaaatgttaaacagcatatacttgtcatggctttctgcagtgtaacaagttttttttttttttgagttgatgcaagttatggaataaaatgtgacagattttatgtagacactgatgaaatccaccatcttattactcacggtagggacaaggtttgaaatttcgttttgcgtatttacccagggaaatttcgaatgaaatttgtattaatgtgaataaattttgactgaatttgaccaaaatttgactattcaaaagaattgaaaatttctgttgaaaaagttcatgccaaaggggtccgaaattactgaaatatagaaattttgaaccgaaatttcaaacattgggtagaggacgcaaacccaacttgtgaaggagttcaattgccgcgatgaactatatcgagttcagtactttttttttgttccaaaaaaactctgcccgaaacagcttatgcaatctcattgctggcctagcttcttggatgattctctcaatcaccaccggcacttgcgacaacacgttctcaaagaagtgagaactgtattcccggcctccatgggtgccgcaccacgaagattaccgtggagtagaatctatggtgttataagttctgatatgcatattttattctgagagaagttcacccaaggcacctataagcttcctcatgccttccatacccattcgtagtagaggcgtagaaccggacgtgaactgaagaagaggtgatgatttatcagatgaatcgattcagaagatttctctagcctctaggtgatcagtagcgttggagggaggaggaaatgaagcacactatacatataggggtttctttctgatcttgaggaattacatttcaatatatatatattgggataaaggacctagaacaatagataaggtaagataattgatatgactcaatctgacaacataatgtgggtgaattggatggtactcccagctgaattgaattgaactgaactgtgtggttctatcactatcagatgaactgtactgcatgctccattttgagaagaactcagttagctctgaaatacaatttgtttcaacaagagttcactaggtcttaagggtacatcacatgtcatgcattcactaatccaagaaacagaggaacaaagatcactgatcgattattttcagagtacatgcctgtttctctctttgcaattgatggggttcaagcatcctaccgaggcatcccgcgtggttgttgatatatgcaagaaactgaataacaccgaggcatcctgaaaattagcagctacttgattcagacgagaaaactaatctatgggaaaagtcacaacagataagtaccatcaaatagcagctacttgatttttttagataatgaaaatggattacatccccggcttctgtcataagacacacagccacagaaaacttttatggtacaatgaactgctagtatatactgcaagtatatatgatctaacggtgtatattgatttgatattttagttaattagattgcaatataaaatttgaaagggtaattttgtcttttctttcgttattctatcatcaaatcgtgctatcgtcacgtgctttgtcatcaaatggcgatcaggatgctcctcccctagtgcacgataagatctaggaccgggtactcccaattagattcaatctgaatcaaaaattactaaagtattattttattttctatcaaattcctaatatgcccttctatatactgccagtatatactggtagtatattgtaccgtaaaagttctctatagtaataaaaaggtaaggtaaaagtaaatcaaaatgagaaataaagtgatgggacaaatcctcaattcccctttattattgactagcgttaaaccacataaaatttttttagctagcaattctaatggaactacgccaccaatagtggaataagagacccttagctaccgattccaagagtatagcactattgcgcatagtatcctgctcctcctgtgatagcatgatcgtataccaaaagtggagccagtaggaagacacgaagataaagcagctacttgaatcaaacgagaaaactgatccatgggaaaagtcacaacagatgagtgtcatcaagtgcagagcatgtcatcctctagaagatgagactaggatgtgattgtcaacttccagatgccttccatgcctagctacagcaacaactagcaatggcgattgtatttacacatgcagtgattttgcatatgagaaaggtttcgaagcagaatgagcattgctgggagcagctacactgttctacttgtatactccagtatatttcttgtatgcaatgcatatgcctgaagcaggggagatgtgtgtcagacaatatgctgacaatgatgatagagtaaattttgttaaggttagcaagggcattctagttattttcatgtttattgtgcacatttatatgctcctttgagcaagcctatctcaatgtatagagttttatccccaaatttcccttcttctcagcatcttgacaaagttaataagcagcttggcaggaggagcatgctgaactatgattgatggtatagtacttgatactgggggagttaaggatttgaatactattccatttattattactatgaaccattaggggaggacatgccctgttagaaactaaacacaaggtggttttatttgtactggaaaagtggaccatattcagaaattaatgatgattgatgatgcaagatactactagtatatgtttaacaatcagggtcagggaagaaaacatggaagaatgcccactcaacttcaattgatgccaaacaaaatatatgcaaatacacatacgattaatcagatgtaattaatcattgatgattagaacaacaaaccagtaacaagctagccagccatcatctactccacatttccctgcgagagaagtactaactacctagctctgatactaatcgacggagactcgctgggacatgccaagcactcacctttcaagtacacaggaaacagagtgttgatgatcagacggcgcctgtttccatcacaagtagtttgagttcatgtggtgattaactatagatagccaacaaaacgatgacgtttacaaggaagcactggatgccatgggaaaagaaaccaatgacgaattttatgaagtgcgaagaatgtcatcgtctaagtcaaaatgtgttgatgatattaccaagttcaggattcctttcatgcctacagagagctagagctagagcttgggtgtaatggagattgcatgtcacacaacacaatgtggtgatcatgatgatatagcaaaatcaacttcactagttcaggacttcagatcagaaccttggcagcaggagctaagctagcatgcatatatgatggtagtactataggagtaaaagaatttggatcctcttccatttattaccattagccattaggagtaaaataggagtactaccattttctacatgacttggcagtgtgaaaaaatattgcaggcataccatcttgtagtttcagctttacattgcaatttattttgcaagtatggattttctggagggatctaatgggttttataggttttattctgcatattctgtagctctagatctgtgcctcgcacctaaaaatttccagatgccttccatgcctattcgtagtagtgtagagccaaggatgtgaactgaagaagaggtgaacaatcatatatcgagcagattgatcaatagcattggaaggaggaatgaagcaaaatatagtgtggtttctttctgaacttgacgaattacacttcagtgtatgtatatattgggataaaggactcatatcatatatcttcactataatggagacaaattatcatatgcatatatctttctaacaggtaggtaagatatatggtacgactcaatctgacaacataatgtgggtgaattggatgatgacaattgaattgaattgtatgattctaccactatcagatgaaatgaattgccttgttcaagtattttatcaagctgtaaaaaaataagaggaagatgaaattaaacagcatgggcttgtcatggctttctgccgttagggaatcagatgtgcgagattttgaaatgctgatgaaaaatcaccatcttattactcacttttatgcaaagaccaaaccagacaatgagttcaattgcctcgtccaagtacagcgagttcagtacattttctgttcccaaaaaaaaaatgatgcctgaagtagcttgtgcttctcatagttttctttctgcaatgtactacatagaggcctcattttggttgtaacatatacccaatccatgggttacatacaaattcaaactagtagcaggcaactccaatgtagtgccgagttgtcaagaccacttcttgctcaatagtttcgatatggtcaagtcagtaccaccaaatccatccatgacggccttcgcagagtgaaactcagctctggcggttaggctgggaaggacaggcacaggtaagataaacacaagcaccaaaaaattggggcctaaggcagtggaatgatgactaaattgtatgtgaaatcgacttttacctgcttctaacaactatgcatggcataccaatgcgctcagctgcaagaacgccagattggctacctgcgacaagaacacagttttgcacgtcccgtccaacatactcggatccagcgcgtagagtgacaataatcttctcggagctgatgatgcaaagtaaacagtgtgaagttcagatatatttctcatcaaagtacaaaacctatgaataagcaaacaataataaccttttagacgctgcattgatatcaacactaagtttcagaatggacgcaacttcttctgctatcctctgcttttctgcagaagctgtaacacagcacgcaggggaaaatttttaacattacagacacttaaaatacatgagcaaggcttcaattgttgcagtcagtaataaatactaaccagccttttgtgcttccttaactagctgttcatccaaactggaggctactccttcaccaagaacaagttgtccatataagcttctttcaacctcttctttcccaacaatatgtatttttgatgttctctcttggcctaatttttcaatgatatatctgcactcaaaggtagaaggcacataatatactaaaactgtcgcatgtcattcaggtccagattatcttgacagtgtcatgcatgtcccaaagtgcaaagtttcatttctatttattttgagaagaaccacagagttgactggaaaaaaaa

SEQ ID NO: 8777 - DNA, 9999 bp, Oryza sativa
tggatttccttactaggcttttcttttctttttcttgacaggcctctgttccagtagagcttgggcttctcctacgattgtcatatgggccgttggagtttgggcttctccaatgcaatccaacggcctcttctccctcttatctctgcaactttaaaacacagagtcatctttctttcatatgttttattctcaatcatcatttcagtacatttctatttatatagccctgcctcgttacgaacattacaaattacattatagtatgttcttatttgtatgcaaattagggccatattaccggtactataataatataagaaagcaaagagaaagaaagagagacaagtgttgtttggttcacttgagttgggttgcacaccatgccatatatacgtggattagtagcactcaccaaattcaatcatttgcagcatccatacatgtaagcttacaatacaatatttatttgaccgagcacgtacgcaaatgcactctttgacaaattaagcaagatccgagtgatcgaccatgttttccggaggacttaactgaagtagatagatattcagatactccatctaactactactagatgatactatatgcgtacgtcactcagtcaatgggacgatcgactagattaaattattactttcaccatcctaattaatcctatcttagtataaaattatcccccactaactccttaagcttaacatgcaaagatgtcacatcatcatccactaacaatcatcacatttaaatatcatgcaaacatgctatatctttatagtttttataatttaagagatttcaaatacaaacatgttaaattatcatccaacataatttacataatgtttcaatgtatatctttattatgttttatgatatcctatatagttttatagttcatccttatttagttagtgcttaaatgattaatctatggtccaaattatctttctcattttttcatctaattaagtcatatcacatcaattatttttaacctttagatgattaatctactttccaaaccatctccttatttttcttcttccaaaaagtcataccaccttactttttacatttgaatcaccattgtacatactatttaaatttaaattatcataaaccacattaacttacttcttaaactgatgttatctagctatcttacaggttatttttattgtttccatactaaattttccacagcaatacgcgggatttcacctagttaatgagatatgcataccacaatcgttcaattcagtcatatttttactatcaatcacttattaatccattcattttaaattactaatcgttacgttatatattagtttaaatcaaacattttaatctttaacgttaatttctataaactcatacagtttaacatcataaaatttatatttttatataccatagaaataatttcataatatatgaatcacatgctaaacaacacatatttttaaaattggcatatatgtagtgctacataatatttatagttttcatagaaatattacttgtcgcatgtacttctagcaggttttcgggaggaatctagaaattaatggtaccactgtacgacaataaataaataaataatgctattgataggccactcggccagatgtcaaaaacctaacgctactcttgatacatgtgggaatatgtgtacatgcataaaatatttcacgcgagcttcaaataatattttatcctaaacaacttatctagcgcccgtttcgtcatggcgcctagtgggaaaactatctcttaaaaatcctaaatgcaaaaattgtttccttgattattgtccagtgtccgtgccattccagatctcaaatctccaatccatcgtcgaatccaaaccctaatctcaaatatgtcctaaatcaaatcctctcgaaaagtctactttgcctcccttgagtctgtgggccgatctcttctccccggcccatttcctctcagcccatctctccctcctcctccatccttgcccgcacgtgcgaggcacgtgcgacgctcgggcgctgagcacgagagagagctcgctctctctttctcttctccttccctctctgctcccgctaccgcttcctgccgacgccgcccaaatcgccgcgccgttgcttcccgcgcgcgtgcgcgcgccatggtggccgacaggccagtcgccgccgccgtcagcgcctgccgcgcctgagcccgcgcctgccgccctgtagccgcgcccttccaaaccgcccccgccgtcatcgccgtcgtcacgacccggccccaccaccaccgcgcatgcttccaagggttggaggcagagctcctcctcccactgtctcgtcgccctctctctccttccttcttttcccaaagtggcaagaggcaagtctcctttccctctttcctttcttctttttctcccccgccggcgtcatcctccctgtcgccgttttggccgctagccggagcgctagctcgctggcttgaccgcccaatgtcggttccgccctcccaaaccgacattgtcgcccctataaatccgagcccctttccccattccaaactcccttgttttcgccttccgtctccaccgcaccattgtcgctccgccctacttgcacctccgccattcgttgccaaagcaccgggagagccggcgcgtgcgaaggacgcgtgaaggggactccgcgcgctcgtcttcttcctcttccccggcccgaggccggagagatcactcccgtgccgtcggcctctcatcacagcgccccgcctcgtctcggtagggcatccctccgttctccctcctcgctccatctcttccccttagctttgagtagcagctcgagtagtaccccagtagctagttggcgccgccccaagccgcgccgccgctcgcagtaagctcgccgccatcgcacccgcgctcggtagtagccgcccgtcgccggccttcctcggcgatgacccgtccaatccgacgctaaaaacggattcccggagtcacgtagatgctctaactcgcccgaatcgatctcccgtcatgccgtcgccgtttcccccttctctcgccgccggttgccgccgccgcaacccgccgccgtcgagccccctccggcgaatccgagccgttggctcgtctccctttgtcccgtgcaacctcccggtgcgctcgcccatgcctgcatcgctgtagatcgccccgccgctcgccgccgccgtccgccatccgttccggccgacgtcgtcgtcttcctctcaccagcccacgtggctgccacgaaggcggcacgtcggtgccacctcggccgcgaccgggtcaagcagacctcggtccgccgctcccctccgccccgctcgcgcacgcggtccaccgcgagccgtgaggctgcgcgtgggcccgccgcatccgcacccaccgcgagccgcgcgcgtgcatcgcgccccgctccaaaccctagcgccgcgtcgcgtgctcctcgctcacggtgagccgagccgccgacaagcaggtcccactcgggatcacgcgaggtgagcccggtccaccgactccctctctcctcccctcccgcgtgcctttgggccgccttctcgggccggccggcccattagctcggccgagtcgcgcctcttctctcgggccgcgccctagccgcccgagggaagtctgtttcccctccctctttcgttgctaattcaaaaagggtttaaataaatccttttcttttagtccaaaaatccgatgatcttagaaattcaatatcttttcaaccatacatccgtttgactccgttcaacttccaaaattcctcaaatctcgagatctatctaatggcacgcttagaggtcaataatagggctttaatttcgccgtttgttgagtcatctcgttcgcgtgtagcttcagagcccgaagacccggagtgcgcggatttcgaggatcaagctcaagatctcgagcaaggcaagtcaactttgatcatcttgcacctataatttaaagggacaattcgaaccatgccacacaaattttgcaaaatttgtgatatgccaccctgacccacatgtcattgactcatgtgtgtcctacatgtcattgagatacgggtggcatatctcaaattttgcaaatatagggtggcatggttccaacaaaccctaatttaaatctaagtatttcttttccacaaatattgcatgaataggattaacacaagtaaatcggccgcggcttgcgagatagcctgccggcccaaccctaattgttgcaattaccctccttgaattattgaacacttaaacctcctttgtcgactgttgtgcttcgatgcacgggacttcgggcacgcgcatcgggacacctcccctcaaatttaaaatatccaacgatgggtaaaacttggggttttacaaaagacttggaaaaacccgacacctgggtcggtgcttgcgaactaaatgaatttccaaaatcgcggatcgaggaacgtaccgggagtacggtttcccgctcttgcacttaaggaccgttttccttggaatttcatccgaacataaggcaagtgcgaccacatgggtggaatgggatgcccctggctgagtaattagctaatcgaggcagccattatgccaagagacatgtggattcaacggggtggtgccagggagaacccccgggcttcctggcacagtatggtctgggacctaacctaatgtcggtttgggacccctctcgttggcatatggtgaacctgtgtcagctttcgaaatgccttgtcatgaaagcctcaaggtctctagacgtggccgttctgcacgggctgggtgatccgggttagtaatgtcgtgtgggtaaagtgtaccccctctgcagaggttattaaactattcgaacagtcatgcccacggtcatgggcggatgtgaggtgattcctagcgtagttttgtttgactactgcttgtgaaattactgttgtggaatgggttcgatgtttggaaaatctgcggctgatgggatcagccaggcccgggtgcccgtttgaaagccgttggccgggtgccaaccttgaatcaattcaaagactgatacattgcacatactccgaccggacgagacgcactacctcatccgtgtcgtttgagaagcactcacttagttgtttcaaaaaggagtttaaataaaatcaattgcaaaaacaacagtctttccttgaagcctgcattaaacacttaattcccatggcttgctgagtactcctgtactcacccttgctctatataaataattcccccccagttgctgaagaagatgaagtggatcccgctgatgaggagttcttccaggagcaagtcggctacgatgagttttagggtttcggtctagttcccaagtcgcgcctgtgatgattggtccaagtcttggcttccgctttcccttttgtaatgcagttgtgagctcgggatctgtccgcagcccaacatgactgtacttctactctgtaataaagagacctctgttgctgtgatattctgtcttcctgtgataccagcactgtttcctgagactggtatcgattaacaggttaatttggagcgtcacgggctagttccgttcggggcgtgacaacttatccaatctatgatccaataacactgttatactcattgcaattaaatgtttgcaacaaggtactatagttaattctttacatatatattctaattaaaaaaatacatgtttttatcatttaggtcggatgtttcacacttcaaactgaaatctttcaactggtctgttactatgttgcacattttaattttgttttataatatgtctttcttaatgttgcatatgaaattatttggatgttttaataagtgcttttcccatgtgttactagttcatttgaaaacattacatggtaattatattttagttaaaatatacatgtttcaattatttgaggtcggatgtttcacacttcaaactgaaatgtttcaactggtccactactgtgttgcacattttaattttgttttcataatataaattttctaatgttgcaaatgattttcttggatgttttaataagagttttctcatgttttaccagttcatttgcaaatattacatagtgttgtttgaatgtttcagcagatattttgtgatgttcttgatctttcacgctttatataaaaatattttaactacaattataatgatatactatttttctccagaacataatcatatgaggtcttactgtaatcatttaattgcaacaaacaaacgatggaatcgatcacataacaaataagtagtttacaagaaaatatattgatacaaataaccgtaataatcaagaggtccatatatgatatatggtccataccaagtaaatatatcacacgactatatatatccctagcagccacgaacacacttcaactaggttattgggatcaagatacttaatgtgttgggcttttttttttccaaacaattatagaatcagttcgtaggatcaaagatactaattttatcaagtatatgatttatgtaaaatttgcaatattgtaaagtttgaagatgataatattagtttggtagggatcgagctaataaccttgagtccaactgcgagctactaaggagtactccctccggttctataataattgacgttttggacaaggttgagatcaaactttaataactttgaccatcaataacttcaaaaatatttagtttgaagaaactagaacaacatatatagatttatctttcaaaacactataataaaagtaaacatgcatttatttattatgtatattataatagaaaaataagttcaatggtatattttgtagaccgtgtcattgttcaaaacgtcaattaaaatgaaacagggagtacttattaatcgtgacgaatatttgcatgtaacagtaacaaccaattaaggcagattaattagtaggactactgtacatggtgtatacaatttattaatgttgttctaggatggatcatttgcatgaatggcagcaaataatgaattaatcccctagctagtagctagctagctgcctactccatgtatagtcttttatacggagtaacaaattaagatgacccctaatataatttttccgttaaaaataaccatcttttatatgaaaaacttgacataggtcccaacacaagctatatctacttaactgtcaagtactgttcatcagccaatatatcattgcatttaattatatatattcgtgatgtgtgtgtacctttaatttgacgaacgtatatatgttgctttctagttgatctcctcgccattagttatgattattgagatattttaaaactgcctttactttactgataacagagttaatctatattgtttatttctttactaactactatcttatgaatcatatttatttatagcagatctatatacagtatagatatcgactactagtagtatagtagtatagttgtatgtatttgttgtactgtattatgtctcgtctcaattctaagaattttttgaacggtgagaatatgcactttcagcacgatgatcactaaaataaacagggaaaatatgtagtgcaaaactaactatgtatcgaaaaaggacgttcaagattcgtccacaccaaatcctggacgtacatttttttgattcagcgtgaattttcagacttccacaacatatatagtttccaccatttttccaaataagcagatactcgtcagtaatgatgttttgatgattgatagataaagagagcaaaaggctagctacatccaattcgctagctagctagagtatatacacgcgtaccgcatttatatggatctgcaattaattctacatggagatggatgtaaatgagtgcttgatcagttacgttaccaaaacgatcttttgataccatttggcgaattaaattaaatggagcagatctaatttgagaatgtatatatgaatggtcgagggacatgcatgcatatcattgtctaaaataaagatggaggtagaagcggtctatctcgggcgccctctgcctctggtggacaaggacgatttgaattgatcgatcgattaattattgaacttttgtcatgactcgagacggcgacggaaaaattgatctgcaggtacggtatatgtatatatctcgtctcagaaaattaattaactaattaaccgcgtatctatatctcattcgatagagatatatatatcgcaaaagtacatgcaatttgtcagtcttgagtttacacttgactacacacgtatacgtgcaagcggtaaatggacgttgctctcagttagtgtatgtggcaacgtgacggccggtaatctagctagctgctttcttactagtactagtactactactttagctacaactttcacaagatagctaataagatagatagattcttctcacttgctcttgtgaaagggagaaactgaaggcatcgagcatgtacatacgttcagattgatccatacaaatacaagtacagctagcatgcatgtatacatatgtacagatcgatcaatataatgtaattaatgcgtatatatatgcatggcgatcgatcgagactgcagacaggccggcatgcctgccgatatccagcttacgactcaatggccagcagtgacaggttttgactatagagacgatggtcaggagagagtgactgtggcagtggtgcacgtaagcatgcggacaagtcatgtcgatcgagtcaaagctagatctatctcatgaaaatgccaacatgcatgcatgttcaaccgccgtatcaacacatagggaaaaatgtttctatctcccgcgacgtcgtatcatgcatgcatcttaataatattcgttaaaatatttaagaaatatcaagattaatatgtgatatatttttttctcaacaaacatatgcaataactataacttacacaaattgaatttaagcttcgtacgtttatagaataatatatctcatattaatttatatatattttatataaagatatgatacgtaaaataccaagagatgtgtctggagacatgcaaatctatctctgtatcgatcgtgcatattgatcgacgacgacgacggtgatgtgcactagctctagtgtactgtacatcatgtcgatcgatcgatcaatcggtagtctatatatatcgatccggaccatcatcctcctgtccactgccacgcgcgctagctacttgttgagtatatatccatcgatgatgcatgtatgataggagaaaattaaaagctactctaggtttgttgttatcctgcagtacgtttattggggatcgatcgatcgacaggccgccgcgcgtacacacatatactaactccttccttaaatgtttgacgccgttgacttttttaaacatgtttaactgttcgtcttattcaaaaaacttttgtgaaatatgtaaaactatatgtatatataaaagtatatttaacaatgaatcaaatggtaggaaaagaattaataattgcttaaattttttgaataagacgaacggtcaaacatattttaaaaagtcaacggtgtcaaacatttaggatggagggagtatatactccatcgatcgatcggtggcttggatatataggatggatgcatcatccatcgatcatgcatgcgcacctgggctagctgcatccagaagctactcatcgctttcatcctgcgggattcctgcccaagagtagctaggactcaactcatatataatttgttcaatttttaaattacataatatgatgctagtagtgatgtttgagtccgttccaacgccataattaaactcacatgtaggatcataagttccccacacgtgtatacttttgctttggatatgacatcatatacctaatcaactaactatactataaacttataacgtttgcttttg

SEQ ID NO: 8778 - DNA, 9633 bp, Oryza sativa
  unsure (1)..(9633): unsure at all n locations
tgtgaatataaatatatattggggaacaaaaggatgagctttttattttttttatttatctacgactaaggacagagctactgttttgtgagggcatcagcaatggcactaccacaaaagtacatgcaactcagtctttctccaaagaagcaggcagcagctgagttgtctagccattagggaaaaaatgattagccaatcctaatcttgtagccgttctcatgttttgttattgatgattcgtttcaaggcgttatgatgagaggattatattattgcagccggccatggaccgtagtctatggtgtaagggaaccgatcagtgatttgtctcaataattgataaagaatcttgcgttgctgcacctccacaacattatgaccctcttttttcttcctcacagaaaaggcagacgaaggaaagaatggtcatggtttgatcatggtgttcaagctttgcagagcccatctcatctggcccactatgttaacccacaatgatcacattttcttctttctttctcctctgaaatttacctttctttagaagagctttagtttagtttgctgatgtttatgtttgttttcactttgattctttaactgtggtaaaatgtttacacacccaatagagagatgaaaagcaggaagtatcagactatgagtaagttaggataagtgacttacatgatagtaatcgcagatgctattgaaattctacttctgcatttcagagtttgccgattgctcatccatgaagcctgctggtcttttgaatagaggattcaatctacccatgaattttatgaaatcatcattccgcacaagagttgatgaaatatctttggacatatacaaggaaacaatctccatctccaaacaaaacagggcttagctctgcactgtactgctgtgccagatcctgcacgaactcaacagtttgagatgcaacgaactgaacagacctcatcaagataatgagtccaggtgattgcaaaatcttagcctctctggacaacctaaaagtgaaggaacagtgatgaccaacgctgtcagatagatcacctcgtgggactgtgctagcaaaagattagccgatcgaagaacctttttctgtactcggtgacagagagcagaaaattgtgaacattactttttccttcagacatggaaacgacgtgttcctgcgatttcagagatgccattatctgcacaatgaaacgtagatcgaacgcatcatcaatcaaccacaaacagacagagacaccatcgataacggcactcgcaactcacctctgatgttacctcgagaggaagaaggttctcacggaggagcactcgccggcgccggccatcgcctaccaccacctccgacgccgatcgccggcgctccgccgccccaacgtaccggggaaaggtaaaaaggaaactgactactcgatctacgtgacaagtttaggtttcttctccctcgatctgaaccgcacaacgtcacctggacggtccctgacccttataacaggatataaacccagacaaagaagaagaagaagaagaatgttgtgtgatctgtagataatcataatcacatggcaaacttcaaagttacaagtgttcatcttctcaaaaagaaatgaagttacatgtattcatcgtacagaagattggagccatgcatgaactgcacaccagacaacttcagataattgtataggagatatcttgcacactctagtcaccctctgatttcatgaatccagcaaacccataaaagcaagagcatggacgaactgtttcagtattccactggttactgactatctgcattactacgttgcaagctttgacccaatggatcatacatttttacaatcgtcaggttcctcgcttcttctgccatggatcggaggattaacttggagaacaaaacttgaagcatatgaattgtaaaatatattataggacttaacaacaacctatacattatttatccaaggcagcaaatggctagctctaacatttattcaagtacagggcagggtattttgagctccaccattttcagttcaggaaaaaaacaaagagagaagagctcctagaaatctcaaagcatcctacagtatatcatataatttatcttctggtgcatggtttgggtgaacagagtgttcatgccttctcaccagtgaacttatcgaagtaggacaatatctccgaattcactctctcggcctgctcttgctggatgaaatggtgaccttcaatgatgacaacctcaagatttggaacgacggacttgaaagcaccgctcttgacaaagtgctcagttccaaaggacttgagaccagtgtccttgtcaccacaaatgaactttgtaggcaccataattttcgcgttttgccagggtgcagtaagcctccaattcctgcatttgccatatattactgtggagataaatcaaatagaatgcgcacatacaacaaaatgggtccaaattttacgtgtccatcatgcggtagtagttgatgggtcctgtgaacccagacttctgaaacttttccgcgtactggccaagttcttcctcggagatccatggaagcggtgtcgaacgtgcctcaagaaagtctatgatctccactccagggggtgcggtgaggtcatcgatttcaatggagaagaactttttcaggacagttgcaacatcataacgggcaaatgctctttcagctctccctggttcctgcaaaaggcggtttttaattatgttgatccattttgaacgcgtacggtgctgatgatctgctgctaataatacaaagctaattaaggtgcattctgatggcaccatggaagtgaaaaatgtgaatcttttgcaaattccaattgtcctctaaattgtcaaaatctccgatcctcttatgtgtatgaaataaaagatgacatgccatttgtgtattgagtagaagagacagtttcaaacttttttttttttttacaaaaaaaggaactatggagggctttcatgccagcctgaacatttattgctcaaaatttgaaaccttcacaatattgaatagaaggaataactaagttttacattgtgctagcattctatttttcatatcaacaagatcctgtggggtgaaactattaaagctgcagttagcccactgaaggagatcatcagcaaaacatctgcaggtttcacacattcagacttaaaaaaatgtcattcacaaaatttttgagtttcaacaagtctaagcaagtgtctatgaaaaatcaaatcaaagcatccttaacttaccacaggattggagcacactccatttcattacaaagaatttgtgttgtgtgcctatcttaaagcagttgctgtagttactagcaaaatgtccatcttattcagactagatcgaggtgatgcatttccttcatcaaattaaagcaccgtaaacatttcttcctttccattccatatgctgtccatttcacatcctcaattttgcaatacaatctttcattcatgtatgtagttaaatttaagagattgcaaacctggaactgcatgatgtagaggccatcgcgccctgcgaatgcctccgagagcgagctaggcccccgggggaagaaggggacgccgaggttgacgacggcgagcagcatgtccgggcggaagaggcagagatgccacgccacctgagctcccaagtcgtgccccaccaccatcaccttggggagggcgaggtgatcgaggagggcgacgaggtctccgacgatgtggaagacggtgtaggcggcggggtcgtcggggacggtggagtcgccgtagccgcggaggtcgggggcgagggcgcggaagccgcgggcggcgagggcggccatctggtggcgccacgacagccagagctccgggaagccatggatgaggagcaccggcgggccgtcggcggggccctgctcggcgacgtggagggagatgccgttcacgtcagcgttccagtgacgcaccacctctccccccattgctgcctctgctcagctccaacaaatatatactccattccaacaaatgtgtctgaaaattctgcctgtttgactttgaaatttacagctgaagatcaccaccacagtttaattctccgatgaaaatctatcaccacggttgaattatccaatgatgaaaattaaaagaatctacagagaggtcatcgtcacagttgaattatccaagaaaataagaggaaggtcggtccatcaggttggttccttgttagcgctgaatactgaattgagcactgtccataatttagtccagcgcatgcaacaattcacaaactctccttgttaccacgaatcaacaacaaattgctaaacgaacaagtagtgagtggagaaaataacgaagcccgtggctttgggtgccgtgcaaaggaaaacaaattcatgttgaaagccaacagagaaatgtttagatcgacataggagacatgagaggtggtaaccaatgaaaagaggaagattttgatgtaaaaagaagagatatatcaccataactgcaacttgacaactcttacgtactaatagatgagcaaaaacagacataatatgcagcagatgctggatttctgtggagacgaacacagaccgggaattgagaatcgacagaaaccgaacataaaacaaagcagattatggaaaaattaagtaatcaatcatttgcgcaagaatactactagtactgttccaataacgagcaacaattaattgcaaggctactcgtcgtcgtcgtcgtcgtcggtggcctcggtctcctcctcggcgtagccctgtttgacgtactggtcgatgaggagctgctcataatcgttcatcttgcgatcaatgaactttgcgatgccgtagagctggcgatatgacgcggaacaattggcgagctcctcgtcggagagaggctcggtagtagctcaagtagactccccgtagttagccggcgccgccccgaccgttgccgtcgctcgccgtgtgctcgccgccgtcgccgctcgagctccgtagcacccacacgtcgccagcctcgctcggcgtagctccgtccaatccgacgctagcatcgagttcccgacaccgcgtagatgctctcaccgccgggaatcggtccctcgtgacctcgtcggcgtttccctcttccctccccaccggttgtcgccgccgcgattcgccgccgtcgaactccctctggcgaatccgagccgttggctcgtctcccctcatcacgaacaaccgcccggtgtgctagcttttgcccgtatcgccgtggttcgctccgccgctcgccgccgccgcccgccgtccattcgcggccgggtcattgtctacctcccgccggcccgcgtggcagccacgtaggcgccacgtcggcgccagctcagcctagaccgggtcgagccgaccccggtcagtccctccccgtgcgcgcgttccaccgcgagccgtgaggctgcgcgtgggcccgctgcatccgcgtccaccgcgaaccgcgcgcgtgcaccgcgtccctcccccgcccgcgcgcatgagccgcgtactccctccgcacggtgagccgagccgctgacaagcgggtcccacccgggaccgcgcatggtgagcccggtccaccggctctctctctcctccctcccgcgcgcgtgcgtcttgggccgctctgggccaccttcttgggccggccggcccgttaagctcggccgagccgccctttctctcgggccgcgccctagccgcccgagggaagtctatattccctccctctcccctgttcttttcttttcttttccaaaaaaaagggatttaattaaatccttttcctttagaccaaaaatccaataatcttagaaattcaatatctttccaaccgtaaatccgtttgactccgttcaaattccaaaatttctcaaatctcgagatctatctaatggcacgcttagaggtcattaatagggctttattttcgccgtttgttgagttgtcccgttttgcgtgtagtttcggagcccgaagacccgcagtgcgaggatttcgaggatcaagctccagatctcgagcaaggcaagccacctttgaacatcttgagcctatatttgaaatctaattatattgcttgcaaaatattatgcattgataggattgcacttaatctgttgttccgtctgcaaggcagattggcagacctacctaacttgttgcatttgatccttccattgttaattgctataccatgtccccttgtaaccatccagttgcgcctcgatattcgtgcaccctgtgccagtatcgacggtcgccttcaaacttaaaatctgagtaacaacttgggtaaaactggagttttacaaaagacttggaaaacccaacacctgggtcggtgcttgtgaactaaatgaatttccaaaaccgcggaccggggaacgtaccgggtgtacggtttcccgctctcgcacttaaggaccgatttcttggaatttcatccaaacataagacaagtacgaccacatgggtggaatgggacacccctggctgagtaactagcttatcaggggagccttgatgccgagagacatgtggattcgccggggtggtgtcggggaggacccctgggcttcctggcacagtatggtctgggacctaacctgttgttggtctgggacccctctcgtcggcatatggtaaacctgtgtcggctttggaaatgccttgtcatgaaagcttggaggtctcccgacgtggctgatccccacgggctgggtgatccgggttagtaatgtcgtgtgggtaaagtgtaccccctctgcagaggttaacaaactgttcgaacagccgtgcccacggtcatgggcggatgtgaggtgattcctagcatagtttggtttgactactgcttgtgaaattgctgtgtgaaaaggggttcggtgtttgaaaaatctgtagctgatgggatcagctagggccgtttgaaaagttgttggcccgggtggccgtttgaaaagttgttggcccgggtggccgttgaaaaagctgttgatcgggtgccaaccttgtttaaattctaaagactgatacattgcacatactccgaccggacgagacgcactgtctcatccgtgtcgtttgagaagcactcacttagttgcttcagaaaagagttcaaataaaattaattgcaaaaacaccagcctttccttgaagcctgcattaaacacttacttcccatggcttgccgagtactcccgtactcacccttgctctatataaataatcccccccccagttgctgaagaagatgaagcggatcctgctgatgaggagttcttccaggagcaagccggctacgatgagttttagggtttcggcctagttcccaagtcgcgcctgtgttgattggtccaagtcctggcttccgctttccttttgtaatgcagttgtgagctcgggatctgtccgcagcccaacatgactgtacatctactctataataaagagacctctgttgctgtgatattctgtctccctgtgataccagcactgtttcctgggactggtatcgattaacaggttaatttggagcgtcacgggctagttccggtcgggactagttcggggcgtgacaatatgagagcatattagattagaccagagcctattgtaatttatggttaaaaaggaaaatagaagcaccaatgagcattttgatttagggatcgcaagttaatcaccatattatagtattctaaattaggctcgaatagctattagaataacacactttttattatttacagttctccctagtttccatataatgatctccagcatgatttcatatgtggatccatcacagaagaataaatcaaggcaatggcaaaggccgctagactagatgtttcttacagtcatgcgtctagcaggatgggttggcagacaagtagtaactgtaattggaaaaagataatcctaagggtataccagaggctaagcacgctgttcatacctttcactgcagcggtgtgaagatgagtgacatttccatttgagcgaacttgatgcagataagcgccatgatcaaggaggtatctgatgcaggcaggcagctccaggggtgtataacctagcaacaagcgcgcgcacacagttgaacaaataaaagctcgtcgagccaagcaagcatccaagacctgtgttttcaagggccaagtgaactaatcgggcatgattaccctgagcagtgtcaggcggtggcgtccattttgacctcctcgaccaaatactggtaggctgacacctcatagatggtgagtaaatagcctgtagtcatcagctcagatatgctagacagcctaatctccttgtaattttgttgcacgcaaaactaataaccataagcaaaataattatctagtggcatgaggccaaatgtaattagatccttctctcaggtaattaactggctacacagaaatgtttagatcgatccacataggagatatgaaatgtaaccgatgaacagaggaagactgaaaagaagagatgtcaccataactacaacttggcaactcttactaatagatgagcaaaacattcaatggtggtcctgaacagacataatgcaactaatgctgactttctgcagtgatggacacgaatgcaaaaacctgtaatggacaggatcggcaaatttcatacagaggaattgcccataattgattccctccaaatatgcagtgatggaatcaaacattctgatggccacacaagacaataaaatttcaattcattggcaatatgagatcaatccttagaaatgtgtgcactcttgcattggtgatggaacaacttacttatttgacgaggaaaacagaatcatgtaacagcttaggatggtaaagccaaattgattaacatggaccgagaagtgaaagagtagccagattcaaccgtacatacagaaacaaaacagattatgactagagtaaatcgtttgtgttatctgaccatcgagatgggggaatctcaactaagaatactagaattgttccaatcagcagcaattgtaaaactgtacttcactagcataaaacacatccattgactcattcattccaatacgatagctggttcaattagtatagcaaggtgtaatatcaggaaaatatatagctcaagtagcaaagcatgcagtagcaaataagatatgagatgataacacacaccaagaccagagtcattggcgagcagacacttcacttaggaaggaaggataggtggtggatcacacagacagacacagggacacgaagatactactccagtaagcaagcaagcgatattacttagggtagatggatcttgcaccacaacacagacaggttgctacttctgctcctcctcctcctcctcctcctcgtcggagatctccgcctcgtcgaacgcatagccatgtttgaggtactggtcgatgagggtctgctcgtgnngcaacatcttgccatcgatgaacattctgaggcggtggagctggcgatttgaggcagaacgtcgggccagctcctcctcggtgcactccgggtaggtgtaggg

SEQ ID NO: 8779 - DNA, 10074 bp, Oryza sativa
aacaaataattaagctgattaatatatatttgcgttgtatactactaattagttctgtgcgtacgtgcagctgagagatctcatcaggatatgtatatatgttgtgtacgtacgctgcccgaaaagaagagagagagataagatgattaggaaagcatttaattatgaagtggaaaaaaacctggagagagatcaggtaggtggctagctaggttaatgtctttataaattgatgatatgcgaatcagaagataatactaatatacggagtatatatattaccaactccaggtctccagcgatatatatggaaatggaaaaaaaaatcttatctctgcataactgcattattttgctagctagtggagtatatataaaatttaaactcgtcgattccgagcagagccatttaaatttcatatatataaaatttaggatatcgctcatccctgaaaatagaatatatttttctagctagtgcatttcatgtttcgtctccattcactggctagggtattgtactattaattgttatccaaatcatgcagatatatatggctttgttctaaatatatatacatatagatatatatggcttgttaaaaaggctaaccgagtttaaaaatatggtcatcccacgctctcttgtccacatgccaaaattgtcaagcgcagggtagttcattgacgaagtcattttacaatagttcgtatgcaaaccaccatttaatttttattatttttttaaaaaaatatactcctatctgaaatgcaggggaaggcatattttcactcgtggatcttgggtcatatatatatacagcctaggacggtaggacctatgttattctgttagaactcataaattaaatagtaccttatggatttaacttccagcttattgagtttatgcctaattttggttactaaaaagaacataactaaatgctacgtactgtaccaatgatattgatgtgtgcactaataataattaaagtatgcaagcttcacctgcactactactttcatttacctggcttttgttgacatgaagaaatataaataattaaataaagttgagctgtgatcttatggcggcatatacgtgcttaattagtacttcctccgaatttcctccgtttcatattataaaactttgtagcattgtctacatttatatatatgttgataaatttagacatatatgtgtgtctaaattcattaacatatatataaatatggacaattctagaaagtcttataacctgaaacggagatagtgctcacttaatcactcacttacgccaccctcgacgttaattactagctctctagcttgtcgccggatgacaaccaaatgcttaattaattaattagtaattaactagacaaggattagtgattgtttaagcgcaagatttgtcctgcgattattggctcgaggtctttaagctagcgcctgctgcatgctgattggattggattaggtagtaggagtatagattaaatctggggccagcagcatccagagatcgagttgatcatgcgtatattttacatgaccatgactactctgctcatggttagtgcagtactttgattaattagcttattatattcgtctccaccaattaatttaagggattcgtcatgatacgctgacgtgaccgattgatcgaatatgcatgtactccatgtatttgcagatgtcagtgtgtatttctttttacatatgtatatgtggacttataatttaattaattcatctcctttaattagtcggatcgatctgttcacgcattcattcgacgagatcttcccctgcttgtttttttctagtttattatataattcaaggcatcttgattttattggttaatgctagctagctgtatcgccaattaatcagttcttgaaaaaactgcatgaataaccaaagggatatggcacaagtagcttagctcatggttctcccaagcaaaaaatgttgggtgtgtttggctgcgtgttgcagtgctgtttggcagcccgctgctacttgcctactgcagctaatgaattactatactctgtcccataaaaacgtattctctccgtttcaaaatgtctgacgccgttgactttttagcacatatttgaccgttcgttttattcaaaaaaattaagtaattattaattttttttatcatttgattcattgttaaatatattttgatgtaggcatataattttacatatttcacaaaagtttttaaataagacgaacggttaaacatgtgctaaaaagtcaacggtgtcaaacatttcgaaacagagggagtaaactatatctactaatctgaacacgtatgtgtctaaatttatagttaggattagacttttttttttttaagacagaggagtagctctaaactatagcgcagcgctgtaacatgttgccgaacagttccattagtacatagtatgttactgtgagaactgaaaaagtaaccataaaagcctacaaattgccacatagtcgcaggacaaaagctgatatggacgtgagcggcctatatgctatacgcgtggcgcagctacatgcattagctagcaagatgattcacgtgcgccattgcatacatatatgattatttttagagatgtgcttctatgctaaaaaaaaaaaaaggttaattggatccgtgccaccgtaaatgtggcaaataaaaaaatgccacacatatttacgttattggctggatgccactgcaaatttttaaaataagaaccatgccactccgtcatgattttcgtccaatccatcacattttctgccgtctccgtcttcgtcctctcgtcgtcctcgtctcgacggcagcaccagcacggcagtacgaaggcgagcgcggatggcagcacggcgcacggcggcacggcagcacggtggtggatggcagcacggcaccggcgacggtcgtgcccgcgtccgctccccgcgcccctccgcgacctcctcgccgacttcctctctgcaccgttgcagccatcgtcgttgaccatctccgcggtggaccagccgccgtcgacctcatctgcgcgggagagctcgggagccgccgccgccgttgctgtcctcgtcgtggtcgtcgacgagccgcaccgcctccgcccagatctggcgaggagggctgctcgtcgttgctgccgatggaggaggcgtcgagcctcgaactccgccgccgttggccccaagctttgtcactggtgctgccgacgcccatctcctctctccacatgaccatcctcggcagcagctgcgccccctccgcgacctccccgggagcgtcctcgtcggcggcggcggcggcctcgctcgcgaccgtcctcgccggtagcggctatgcccgcgtccgcctccacggctgtcctcggcagcagctatgccccctccccgacctccccgcgagcgtcctcgccggcggcggctacgcccacgcccgcctccgtgaccttcctcggcggctgccatgcccctccgcgaccgtgctcgtcggtggcggcaaagatcgatggttatatgttgattggtttagttagctagctagctagcctcgcgcgctgcatctgtagcagctagctagctactacctgagcttgttgggtgtttctgcctgagctccgttccgccgaaccccgtcagacccggccgcgaccgcgccgggctgtcctccgcccgtgccagccgtcgcgccagctccccatcctcttctccgttttgtcgcgtgaagccgatgcgtttttgtcgcgtgcgcctcatcggcttcgactccggtggtcgagctgctcacacgcgtctgggggcagcagacgtgagagagagagaggaggatgacggcgtgagagagaggacggaaattgtgatggagtggcatggttctcattttaaaaatttgcagtggcatccagcggataacgcgaatatgtgtggcatttttttgatttgccacatttgcagtggcatggatccaattaaccaaaaaaaacttgcacgaaagttaaagctaatcagcggctgtgattagaagcgagattagcacttaattatcattagcgaggggtaatttcgtccaaagattttcgagcccatatccagcccagtccatctgaagcgatccccacccccaccggtctaccacggcgccgctcctcaaccgcaccgcctccactccctcctcccctcgcctcgccgccgctgctccgctcaacgccgccttgccgccccggcgctccgctctcttcttcccctagcccttaaagcgcgcactgcagccgcgggtcgaaccggcccagccgcgcctccagctccgcgagcggtcgatccacgcctccagctccgtcgtcgccgcgggcatcctccgcgccgtcgtcgccggggccgtcctccgcgccgtcgtcgccgcggcctcctccgcgccgtcgtctccggggaccgcctccgcgccgtcgtcgccggggccgtcctccgcgccgtcgtcgccggggaccgcctccgcgccgtcgtcgccggggccgtcctccgcgccgtcgtcgccgcggcctcctccgcgccgtcgtctccggggaccgcctccgcgccgtcgtcgccggggccgtcctctgcgccgtcgtcgccgcggcctcctccgcacggtcgtctccggggaccgcctccacgccgtcgtcgccggggaccgcccccacgccgtcgtcgccgtggaccgcaagccgtcgtcgccggggccctcctccgcaccatcgtcgccggggaccgcctccacgccgtcgtcgccgcggtcctccgtgctgtcgtcgctcgatttgggaggacattacaggatgtatgtcatttaaaggcattttgtggagggcatttctttaaaactgcctcaaatcatctctttcaaaggcaattttcataaaatgccacaaaaagtatttctatacatggcaaatttaattaatgccttcaatacttttatcattagaaggcgttttaaagaaaaacgcctcaaaaactctgtgctttcaaggcaatttcattagcgccttagaaaatctcctatttcagacgtaatcacggaacgccataaattttatattatttgggggcattttgcaaaatcgccagggtaacagatagaaggcacttttgagagaaatgcctcctaatctataccatatatgcaaaaagaatcctgaaagaatttaaggtataaaaattagtccttccaccacacgtatgctaccttatcagatccgaatcagaatagatcgatcagatcagatcgaaaaaaaaaaatctcacgcggctagcgagcgcgcgtgatcgactcccggccgccgcccggtgactcgccgccggcgaccgcccggcaccccgcgcgcccgcccatcgcccgtcgcgccatgccgccgtcgacggtcgaacgtcgcccattgcggcgtcgcccatctccgcatcggcgcatcgcgccgtagcgccgcccgttgacctagctcatagggagattcgccgccggtgagcgccctgcgtcccgcccgcctgctgcccatcgcggtgccgccatcgacgctcgaccgtcacccgttgcgccgcctcgctgcctccaccctccagcccacggcctcacgcgccccgagcccacgacgccgccgcccagaggtccagcttccacctacagacgaagccacgcgtgaattggtaactcttcccctcatccactgcctaaatgctaaatccagggatggttaggaacatttttggtttggaacttaggatttagttaatagttgaatttaggctctctcgatctattggtgatatgatttaaggtgtgtgaaatgagaattttagtagacatgttagtctccatctctacccatcacactactgtttgagcacgatgatatcttgaggtttgtgcttttccagttgggttgaatttacctcagtttttcatgcattgaaggtgtttgtagtaatgcctaagcgagtttttatggttcataactggttcggtacatatcattcatacagtgagctatagggaagcaatttcttacactgaaatagtgttccaattcattgtactgaaattgcagtgttcataacaagcttatgttctactacgtatttgcaactagtagtgaacttcagtgttctgcatgtcaaagtgttaggtgcagtaactctagcatccaaaattccaaacgagatgtttgttttatgtttctcagagactgttctgcacagttcaataatcttggtatggaagtaacgcacgagcgtaatactctattttctataaaattagagttagttttgttgtgaagcataagcatgattgaataggaactctattggcagttttatcacaagaaatcttggtggttataaccttataggaacaaaaatatactatggtttgtgatgtgatctgaacttagtgattcattatgtatgcgtgcttagttgcaggggtgccttttgaatagttgggactggatttattagtatattaattagtatatgactcagaaatgttaattaggcaacataactggtagtatattggatctgactggttagctgaatatatagttctttgcattatgagaggctcaacgactaattggatcatgtattttggatgaagccaccatattggatctgctcttttgttttctaaaacagtaacaatataaatccattggaaatgctactagaacctttatgttcactttaatcttgatccaaagattagaatgctagttttctgtgggatattctacacaagtttttcccccataaaatttatgcacagttataatttgggttataattttctgcatatgcctcactagatttctgtggtttgatgatatgtttgaactttgaagagttgagctgctatctgtcggactgtcacaagtgcaaattaacttcgattgattgatcatggataaagggtggatgaaaggagaacaatacatgatctaacatgcaaggataacataggacatgaagatgtacattctaggacaagtactcttggaaaagccagcgctggttccttaagtgctatcaagttcactaatagccaagtgctaacaacttcacggttctagcttatgaaagtaagtctcctatcccaagttcgaatgtcttttctcaagaccatggcaataactctgctgttacatgataagaaatagaactattggtctggatatattgtttcttactagtatttaagtggatttgcattgtaaaatgtagcaactcattttatggacaattataatttctgcagatacctcatttgacttgtattacagttattttcccctagatactttcatggtgcattccccaacaattatactatatatgtttaaatcttacggattcaggatatttttcatggtgcattccctaataattcaaaatattttgggcacctactaatgattatatttacttcagtgctggcctaagaatagtaatcctgagagcaatataggatagtatgttatggttggttagctgaggaacactgagacagtaagtatcatctctttgtgtctctttgtttgtttgcattatgttctgtttaaaagagtatgtagtcatgtagaatgcaatctgactcaaatcgatcaacaatttgttactttgattatgtgcactgtatatattgtgaatctaattcatgtaattctagacttattcaacttgcagcttgagagttaaatgttttgaactgatagaaaattggaacaccattatactgccacatcattatactgcaacatcatcaaaattggaacatcttgatgggacactaaaatctgtagttttgcaataaatgcattgctaaatcttgtattgatggaacattaaaatatgtagtcttaatgtatatttataatacattgctaaatttgtagtttttgcaatactgtgacttgcagctttttgataaatctagtgttataagcttggatttgttgttgtatgatttttgttttgtcctaatacttgcagtttcatgtaaagtacactaaatcaaatcttttttttttaaaaaaaaaactagttttactggaaactggctttggttatccattattttgtctgttaaccaaacagaccagcaattttccaagaccctgctagacctggtctctacaaaattcataacccaaacaacctaaatctttcctactgatttcatatgtgttgttgctatgcattatatcaaggcaaagcctctttttaggctggttgcctgattgtaatggtttgataatcttgtatactagacgtttctttttctttatacttttgtattctttaacagagcacaaaatataattggaacatcatttactatttttaccaccacccaccttctcaggttgtcatggagcacaaaatatctaacttttgctgtccatatcatacttcatcattttggttcttttagaaagaactttgctcaagttgtcccgtgtttattacagcatcatatagcataataaagcatatgtatcatcagatgtttgaggtatgagttatgaattatgtatctgcactgggaatcaaatcaatagttgatcatcattaatcttttaacaacattgatcattacgatgattaaagtgcaaaaatatttcatactctgcaggcaattattggatttcatttttggattaaagacatgtacgaagattatcgttatctggcaagtgttctgatgccatcagaaacaattagaagctatcacgtcaagatattcaacaactgcacatggccctttattgatttgtttgtcttttcctctcacttgtagccagtatataacttcagtgtaacagaatgttatttttttagttgtaaactgtgatgtgagaaatagttggaaagatatctaaaaaagatagcaaattgcaaatttttggtgttgaatgagcactaatattggtttgattgtaccaatatatcagtatgtaattggatgattcattggccacaatttaggtttttttattagatgtttttttcattggaggcattataaaaaatgccacaaagcaaagatgaaggcattttgaataatgccacagatacctaaaatggcattctggaaactgccctagtaagctctaacggcattcttgaaaacgccaggctagacactttttaaggcgtttgtaaaaattgccctggattgcttttcccgtcgggagtaaatgtggcatttttcaaactgcctctaaagaccattcaaggcgtttttttgactattcaaggcattccaaatcgcctcctaaagtgtgtcatcctgtagtgggagggggaaggcgtgggacccacgattggataggcgatcctggctggccaaagttggccagcgtgaggccgagtttagccagccaagccatccggctggccagtctgttggagtacatttttggcctaaaattactaaaatttagcttggagagtgagataagtagactgttggagatgctcttagcaggttggctgacaaattagtgacagtggtttcactatagcttggtacgcctttaatggtgcggccacgtgacaatgtcctcgtcagctggcccgtacatacataaattgtgatccactgcatcatcatcgatcgcctctgtatttggaccgacgcaacgtcagactagcgtgataaaacaacactgttatatgaggttagcaccgttgtttttatctcgcgtggcaaagaccgggcttaatttgtcacatactcctattaggttgacatacacggctagaaaaagcatttttcctaacgtaggggtctcatttttgcagacggacataccccttagaaccaaacgaccgcctaaaaaatatatatcgggatgaatgtgccggtccgcctgcgaaaatctattttcgcaggcggaccggcacattcatcccgatatatattttttaggcggtcgtttggttctaaggggtatgtccgtctgcaaaaatgagacccctacgttaggaaaaat

SEQ ID NO: 8780 - DNA, 13984 bp, Oryza sativa
attcctgcagccctttttcagctattcatatcttagctgctttatgagagacagcattataatcagacttgaattttgtggcatagaatgttatgatgtaaactcaaataattgactgcagattctccaccttgctcataacaaaccggagatagagcggagggtccatgctgtgattgacaaatttgcagaacgtggacttagatcgcttgctgtagcataccaggtgagaagggttacagtacaccatctatcataacctgattttcactgtgcagcagcgatggtatcatttcatgaacaggtttaaagtaattgtagattttagtaactaccaagtcttgtccatgcaaaccatgactttcctctttcactgtttactgcgtacgttatcttagtggtgtgttactctgttgttgaatgtaggaagtaccagaggggacgaaagaaagccctggtggcccatggcattttgttggtctcatgccactttttgatcctccaaggcacgacagtgctgaaacaattcggcgggcacttaatcttggtgtcaatgtcaagatgatcacaggtgcatgctcaaatattctgtattgtcagttttttttcaggcttatgcaggaatacagaattctggagactcgatttatacaatcaactttaaacaaaaaaaagaaaaggaaaataggattcacatgagaaccaaatagtacaatgtaagaacatggtcgtgagcacccagacctcaccaggaaattctgttctgctgttagctggccagatttttcaaccctagttctgtgctttccatgggatgatccaaattatccgtttgtctgtttggtcactttatttttacagtgaacatggttttgatgcagtcctattgataaatagaacataactcagattaaaaatagtatatttcctggaggtagccgttttcattacattcaaaagactgctatttgcgttcttttgtcctagtttattaattggtctcctaatgttcaggtgatcagctggcaattggaaaagaaacagggcgtcgcctgggaatgggtacaaacatgtacccttcatccgctttgctgggacagaacaaggatgagtccattgccgctttaccagttgatgatctcattgagaaagctgatggctttgctggtgtattcccaggtatggtgataaggagttattacactgcaaagattgagagttgggaaagatgaattgtttaattctaagttaactgagtgaatggcttttgtccagagcacaagtatgagattgtgaaacgtctgcaagcaagaaagcacatatgtggaatgactggtgatggtgtcaatgatgctccagccctaaagaaagctgacattggtattgctgttgctgatgcaactgatgcagccaggagtgcttcagatattgtgctcacagaacctggtcttagtgtgatcatcagtgctgtgcttacaagtcgtgcaattttccagcgtatgaagaactacactgtatgttaaagcggaatagtgttcaagtactcttttatatgtttattcccctaatttatctttctaatgcattttcatgttggcagatctatgctgtctcaatcaccattcgtatagtggtatgtttatcttgcttttacttctgaatgaaaacttttatatccatgcattttttaattatgtgatttaatgtgttggtatcaagctgcatcaagtctctgtatttatttatttatttgaacaattatccttgatgcgactgctagggattatttttttatgttattcagatcaagttacaaatactacgagatttcaatccataactgtccgctatgatatatatccatcttgaacactgaattgtgccagtgttctctatttgtgttacttctgagggattaattcactttgttaatttcaacagcttggatttatgctacttgcgctcatctggaaattcgatttccccccttttatggtcctaatcatagcaattctaaatgatggtaaatctctctctctctcacacacacacaccggcacacaaccactgcacatgttcacacttgctttttgacaatagaaattatgagcatataaagatattcaactatgtactgtgatcgataggtaccatcatgactatatcaaaggatcgggtaaaaccatctccactacctgacagctggaagctggctgagatttttacaactggagttgtcctcggtggatacttggcaatgatgacagtaatcttcttctgggctgcatataagacagactttttcccggtaaggagcactgtgttgagacttgagacatttgtttgtgatgatttttaagccagctatgcaagtattcttggctactaacgatggttaaattgttagtgaactacttttaggaccttatttgctttactcgctgaagcttattgtttataaaatttcagagaatatttcatgttgaaagccttgagaagacagctcaagatgatttccaaaaacttgcctctgctgtttacctccaagttagcaccatcagccaagctctcatctttgtcacaaggtcccgcagctggtcatttgttgagcgccctggatttctgctggtctttgctttcttggttgcacagctggtctgctcctactctctcactgtctccctcttatattttgcttcaggagttaaagccgcattgacgtaaacttttggtttaaacaaatacagattgctacactgattgctgtgtatgctgactgggcgttcacctcaatcaaaggcattgggtggggttgggctggtattgtgtggctctacaatctaatcttctacttcccactcgacattatcaagttcctcatcagatatgctttgagtgggaaagcatgggatcttgtcattgagcaaagggtaattaataatgcatgctacacaactgtcttggcccctcacacctattaagtttctgattctcactaatgtttgtctacctgcagatcgctttcacaaggaagaaggactttggtaaggaggagagggagctcaagtgggcacatgctcagaggaccctccatggactgcagccgcctgatgccaagatgttctcggagaaggctggctacaatgagctcaatcagatggctgaagaggcgaagaggagggcggagattgccaggtaggaggaccacactacacttgcaaaacatcatgctttcttgcgtatacgatttcttggatcctttagtattgttccacctgtccctttctccatcagtgcattgttactcatgaatccatttttgaatatgaaaagtagtatctttttttggcgccaataggcaggcaacagttacattgaacatataagttggttgataacgatgtgaagctaactttgggatgatttgttacaggcttagggagctccatacgctcaaggggcatgtagaatcggttgtgaagctcaaaggcctcgacattgagaccatccagcagtcttacaccgtgtgatccagcctgtccataaagaaagaaaaaagaggattattttttttccagattttcctgtttcgctttaacttgactgcaattctgcaatcacctacgtgtacttgaaccgaattgctgtaatctttgtccctcctgctccagctttctactacatggtagtgttatataatttttggtcacctgaaaatatataagtgtttgaggtgaagcacaatggcaatgccagagtttttttgctcggttactgagaagcatgttttcataatcaatcggtcaattgtatggacatattatagatgaatttggtaactgtttgtgtgggggcagctggcagtatgtaacatgtgggcttcaatgtatccaaccaagaggcaatgaatgaatgaatgaatagcggtgactctggtcctggactggaaacggatctgtttgttgttgggttccagccagatctgtagtgaggctctggctggctgatattgttgtctgccatgttgcctgtcaagtttgcaaaaactgtgggcacatcacatgagatgagttgagagcttttattttctaagctgcttgctgcgttgcatgcaggatctcgaatgatgcacgcttgcttgagctgtgcctgtaccaaatgtatgtagtactagattgtgtatgtactatgtattctccagctgccgtactgtgcacggataattggtttgtctcgtctggtctggtaaatagagaagtccaagtgttcaattcacagaatcttgttttgtagcaaaagtaatcaaatgtcatgagatttttcctttttcttgaataacaaatgtccgtcctagggacaatgtcacatcagtttggtatatgtagaagtgtagtaagaatcaatagattacagcacattcagaaacggtgatcccaacttaaaagaaggccacggcccacggcccacgacccactgaaatggcaaagcccaaagaggaccaaagaggcccaaataaagatgaggcccagaagcagaagcaaacaccatggttagctcagctggaggagagccaacaagcaaaaatgccgcagtggccgtcactccagctgcccgccgccgccgccgcccgccgcgccactcccttcgccttgtgcaggagctcgtcgtcctccgtttctgcgtcagcgtccaaccaggacctggtagcgtgttcttggcaaaaggaggatgaggccgaggcgcagtcgttggtggtggtgggcggaggcgccgccggggtgtacgcctccataagggccaagtccctggctccccacctcaacgtcctagtcttcgacaaaggaaggttcttgtccaaggtatagaaattctctttgtttgttttaatttctattttccatcaggcactacttcctttccaccgaatatatcattgttactgttgatttgttgccacttccgacgaggctgctgtaggtcaagatttctggtggtggccgatgcaatgtcaccaacgggcatcatctggagccattggtttgttcttgtccacactggatgcatatgctctatcctatcgtctcctttgttcactttcactgtaacagactgacagttgaattcttgttcaggggatggcaagaaattatcctaggggacacaaagaactcagaggatcgttcttcaaaaatcatggccctcaggatactatgcgttggttctcagatcatggtgtcgagcttaaggtatcatagtcatgacaccaagattattaaataaatcttttacatccattgatcatctattagtctgaacccacccggtcaagttattgatgtcgtggctgtttctattggttcgatttcatatcagacagaagatgatggtagagttttccctgtcactgacaattctgcatcgatagtagattgcctactgaatgaagcaaggcgacttggaggtatcttgtcctaattgactctgttgtttattcatttgtcatctgaaatttaaacaacaatcgaatggaagtttccctgcaggctggtaaagctgtgactggtgcatctgtcactgaaaatgggaagtttgttgtgaaggttgagaagcgtaccgttgattttgtggatcatgtaaacgctaaatatgtcttagttgctacagggagcagccagcaggtttgagaaaagatgtttggctcctcccttcttgttattgatgtataatacagcataaagttctcctcctttacatttttcttacctgcagggttattcaattgctgcacaatttggtcactctattattgctccagtgcccagccttttcacatttaaaattacagacaagcgattggctgacctctctggggtatttatccatgaatacctttgtggctcttatgttatgaagtagcaaccaagacttgtaaatctcgttttcatcactgttatgcttttgacaacaaaacaatcatgtattgcatatgaagagtctggagttaacatgtttttgtgtgcttccatggtctggtctaggttccatccgagtttaagcatctcatgtgcatatgtatcctgttttctgtctgatatctagtggaaatcacaaatcaagtggaagcatggaaaccctttcagaattcacgttagcttgctgcctcaatggatttttcatgtttctgtctgtgcttttcactagaattgcagtaaacattactatgaaacttaaaacacctctgagtttgctcctaaaaggaggaaagctgatattgtagattttttttttcaagtcaattggacaagagctattcaccccattatctcctgccatgtaggtcacattcccaatagtcaaagcaaaactgaagctagacggcattaagagaagtgctcctgaattaactcaggtgaacatgtcaacattcaattgtttcatagatgtttgcttacattaactgcttggtctttacagattggacctatgttagttacacactgggggcttagtgggcctgttgttcttcgtttgtccgcatggggagcacgtgaactgcatcagtacaactaccaaggtaagatgcaatggaactatgcaggaattgcactacattcgcagcctactggtaaatggcaacacaattttacttgccatgtctgtctgtttccgtacttgcacaagttgcattcagtagatccacaacagagcctttttcttatcagattgctgttttgctgggcatccttatgaggtcacttctatgtagaatgctaaagtcgctgagttattattcaatgagttacgcatggttgcaagtttcataacaaatgagactactggtatctcatattaggaatctttatgctgtcagtggatttggacaaacttaccttcatttgaaacacttctcttgctgtttgttctcttggatcatatgattcttcgatgtattgttctaacaaacagtaaacagctaaagaatggtctctccaccttctgagccaattagctttactgtttgactctttggcagctgcattgagaatttttatgtttcatcaagtatctgaaattttccactatgataatattttacaattatatgtaagacagaagtaaatgtctatattatccacttcactgatacccatacatttcttccaacacagcaaagctcaccgttgacttcatacccgacattcatattgaggacgtgaagcgcatccttttcctgcacaaagatcaccatgcggttcatttctcactcttgtgctattccctttacatgttctattttttttttataatctccttcacgcattcatctaaggatctgaatttctgatgactaacattacacttgattgtccttgctttaataattcagaacgtgtgtactaaaaatagacacgtgtacaaatctctgttctatttgacatattggggtgttttaatcaagactttagatggattctgtaatctgttgcagaaatattccttgtgttcctgtgaatgttctaattgctgaataaaaaaattgcaatgatgaagttgaattaacaagttttagtccttgcagaagcacaaaataaacaactcttttcccatggagttcgctctggtgaagagattttggaaattcttgctagaacaggaggtcataatattactgcggtgctctttactcattcctctattttaattgatggtttcatcactaaaatcttctcgcgcagagtttagatggtgatatgcactgggcgtccataccaaataataatctaaacacagtagcccttaggttaaagcaatggatgtttgaggttgtcgctaaggtatgtgatatcttaatataccaattgaaaacataatgagcgcaatcatttaggtaagaatattttttgtctgtccaaactcacagactgttatctcatcatcatttgtagggtcaattcaaagatgaatttgtcaccgccggaggtgttccactttcagaggttattagtcttaattggttgcagttttcatcaaaactgaatcaacttgcatatatatatgtctaatttgctgccctgttctaaagatatcgctgagcactatggaaagcaagaaacagcccaacctgttttttgcaggagaggtatacatttgttcctgaacttgcaacactctggatcagcaagagaacaattgaccttagcatgaccgtggtgcaggtacttaatgttgatggggtcactggcggattcaattttcaggtacgcattacaagttcccttaaagaatttcacctattttaaaagatcgaactgttcattagagacttggagatctttacatacgacaaagcaaatttcaatctcatcgatcaagtatagcacttgaaataatagaatattattttgattaaaaatgtttcacttattttcaagtagaaaacatggtttgtaactataatctattctacattctccacagaatgcatggaccggtgggtatatagctgggacaagcataggaacattggcatcaagcaacatgaggcagcaacagccatatttgcaactggacggatcatgaagtatcacactgcaaaaaggactcctgcctgttcttactactgaagactaacattgacaaatgacattgtagatgtacatagaggtcaatgatcgattgtagagatgtacccgtgaaacaatctcttgttattagttagcaaacaagttcagaagtagtggattgtgtactctgcacagctgtgagcaaatctagttgtcatttctccaacataaaatcagatataaagttacactcaaggttatctgttggcagtagcagctaacgagtcattcaagctcccagaaaaggttggaacagcaatggacgtgctggaacacgaaatgattctaattggctatcaattaagacaggataatctcacttaaaatgcaccaatgccatctctaaatgttatcacaaataagaggtttcaaagcataaggaatcaaagagaactacaacttagactacagaccaatctagacagatgcaccagatcatcattcttcccccaaaactgcaccctgtttagatgagtcccttatttctgactggaataacctcactagtcactagagtctctagagcagatgcatgcgctcaacataaggattgtgcagccacctattcagtggctccccacatccaacgaagcatccagtattgcctcgcgtggtgacgaacgggaattcgaagagatgtagcagcttctgaactgactgtctaaccaaggaagacccggttaccctgctcctcctgccccagccagtgacaatgtcaattctttcagggcatttgcccattgtcagaatctgcctgtggaaccaagccagtgtccttgacagcgcagtcactgcagtgccctccgacatcaggtgtaagttgatgagccaatatgatgggtccttctccctcacagaatccgggtacacattcctctgggcagcaacctcccatatgaagccagcctcctccttgaggccggacttgtgtaggaaatctatgacagcatccattaaaccccttttactctctctgtcctcactgtgcatcatgtccaagaaatatctggtgtgatccctcacattctggccgccaggttctgcatcgggcaaatataacaagaacatgtgggcagggtgtccagtgatcgccatgagctggcagcataaacccatctgtgcttgagcctcagtacaacaactgagcagcaaggtgtaggtctgcaaagatggaacgagcccctgagcaagcatgttttggagcacgctgtaggcatcttggaacctgtttatcttaagaaaagcactcagtagggaattgcaggtcggcacattgggctgcaaaccatcctgaagcattgcatgataccatcctagtgccttgtcaacattgccagctttgccccagaggtccaccaaaagaccatatacaggctcatcaggagcccagtcatgcctcatctcaatgaacacagcctcagcctcatccagatgaccacaatgaccaagaacttccatgacaatactgtatgttattttgtcaggacgaaacccggcaacctgcatgtccttgtacagcttcacaacattttcataatttcttgctttggcctgaagagcaatcattatgttgtatgtaactaggttaggtgtgcagccattttcaaccatctcacagaaaagcttataagcagctgccaggtgaccaccttttccaaggcaattaaccatggcactgtacgtgaaagtatctggtgacagccctacttcttgcatcctggtatataaatccattgcaaattccaggtatccacctttagcatggatatcaatcaatgtacaatatgtaacccgatctggctcataaccggctttctgcatctcctcgaatactttaacagcctctcttagataatttgcacgaccatatgcatgtattattctgttgtatgttacaacagttggtttgcagtgaacactgttcatctcatcaagaagtttcctcatcgtaccaaattgcctggcttgtccaaggatgcctatcatggttgtgtagctatgaccatcatgcttgaaacctggttgccgctttaaccactggaagaaaccaagtgcaatggtgtggtcatgaagcagcttgagtacttggtttgcctggaatgcatctatcttgcaatggagattatccagaacgtgttccgtcataggaccccatttcatttgctgcagtgtatggtagtactgttcaactgagcgcaatgacttcaatgatcttaagttagactgaggtcctccaccatgactctttattgttcccgcaagggcctgagatttgtgaccagaaccagtatacatagctggagctgacaagttttgggtttgaacttcatcccacctagcatctgtactgaaattgttagaatgataatttgtgtggcgctgaccaggatgtctttgattctttatttgcgatggtgaattagcaaccatagcaggaggtcctgaaaaactctggtttgattttgcatagccagatcttgatacacccttcccaagattattttgcacggaaggattataaggcatctttgcctcaggaagactatgctggttgtgtgacttgatattagaaggctgggcatccgacaagggctggtaagaatagctagtggccatctgtgaagcttgattggtgcctccattatttgatgtggacttgaggtttactaactcagtgtacacaccagctcctgcaattgcagaatgagaaatgcttctggcggtctgcttagaaggctgtacataatcatttcctagcacctgaggagttcgagggtggttgctagtgttgccagatgctggctctgtctcttgagatgagttggaaggaacaatatgaacagctggagcagggtaaccagtggcccgaccaatggatccaacaacatgttgtacagatggagtttgagcctttacagagggtctgcgagttgaatgaaacttctgctcgataccattagccgtctgcctttttggagcagaagtttcatcttcagggcatgtgcatgaagctccatcagtgctaccacaccttgacccattaacgtagaaggaccgtgcacactgggttagcgtgccgagttgctttgccctcaacatgaactgcaatattaagttcacacgatgttatcagctagaacaacctttatgttatgaatacatcatacatgagaggttctgcttgtgatgatgaagacagtataaaagatatatttgatgttgctttgtggccttgtgctcattttatatatatacccataactctttcctattatttctaaagataaaacaacaatgatgtgtattatgaagcatgttagtaacatatatacgaatagaaatgggtgtgcaggtgtcaactggaagaattgatggctatgatggctcatgctttagtttgtaacctaagttcatgtacaagcaagtctattaatgtgagaaaacacagtcaatgatataaggaggaagggacatactggttagttggttaataaatcaagctagaacttttgataatgtcagtgcgaacttctagcctccactgaactccatatggcccctcactggtaaacctgaaacaaaaatagagccaataaatatatgctgcttacaaagtattttgtttagctgtactaaccagtacgaagaagaaaaagaagaactcattcagaatactagatatgtataacaaagggggattctaagtgttaacttctgggcaactacacctatctaggcttattgatccaatctacataactggtgagtaaaatccaacgatcaaccttataggcactagttacaactgcaaagtagtaataataaagttaaatgatatgctcagaacgttcagttcgtcgaaaagccattatcttcttttggaaaaaaatgtcttttaaggcgcgcagaagcagcatgtcaaacagaaaggcagaaacaggattacagatgaagccaaacagattaatgtgcggcaactaagatgaaagaagcagcttggtgaacaatccaaaaattcgttgaagctttaggtctgcaagacgagatttttttgtttacagggaggcaattagggttgagttttctgagccacagcatgtcctttcctatcagaatcagagcattcaaaatttataattgggggctagattctacacagaactttattggattgaatttattacatcacattacaggataataattccaaaacaaaagaaagaaacccttgtttggcattgaagcagaagaagaggtaaaaggtgtccttaattaggataggctaaaataatcatccggtggcgaaaaggaaggaagggcctttgctgcgcaaaatccaaaatttgaccatggattgaggagcacgcgggcgttggggatagggcttggagaaggcatacctcgaatcgggtaccggagacggaggaacgaccgaaggggcctctttggtcgttccagccggcgggggcgcgctctcggttccaacgccagccgcgccacccagcaatcgcacggcgggagacccagctggacggcggcggtgttcggcaacccctcttctgcctcttcctcgtcctttctactaggagtagtacctagctagtagtactaggttccaaggagacatggagagcaaaggaggagcggcgtgaggaggaggagcaacaacaacgaagaagaagaaagatgcgatgcgatgcgatcccgtgtccctccctcccggagacgcggcagcggcggcgcacgggtggggtgggtggggattggggatgttccgtggcttgcgggagaatccaatcctccttcagagccagaggaaagagagcaaaccttttctctcagactcctggaacttgtcacgcaagaataataatctcaaccaatctaatctgttgttccgatttctgaatctttcattattagtatctttttattcaaaacaataaatactacagtttatcgggtttgaccgagtttagttaacaatcctgccgttagttcctcctcctaacccatttggatttggtgtttgttcgggtggattaaacctacaactactactccatataagatattttcttcttcttataagaagccgccccccctcccccacaccactaaattcatccaaaactaaacaatcctttcttcatattgcattttctttgactacatcagatattttattgaggttatacttcgtccgtttctaaatatttaacggccttgattttttaaaatatatttaaccattcgtcttattaaaaaatttaagtaattattaattcttttcctatcatttaattcattgttaaatatatttttatgtatgtatatagttttacatattttacataagt

SEQ ID NO: 8781 - DNA, 14372 bp, Oryza sativa
ttttgccatcaccatcaatgtatgtcaatgctgttcttttgtcagtaggattgaatggcaggaaatgaacttcttgaataccagcacgggcctgtgttaaaatgtaggcaaatagtcatttcacaacataaccaaggtgatatcagccaccatttcaaaaaccttcgacaaagcaatatacctcttttggatcagctagcatcccaactattgcagtatcaatagcatcctggttttctgttcgtgatgctctagcagccatgagaatcacttggtcctgagtgattcctctttcaaagacctggattaacaaattgatgctttttaacctagacatgaaagtgttaatagaatagagatttgttttttctcacatcaatgaggttcttgtccacggtgagcttattcaaggtcaaagttccagttttatcactgcaaagaacatccatgcccgccatctcctcaattgcagtcattctctttgtgatcgctccctgaatattttaagtggttagcacattatacaaaccaaaactgaaaagtgacatacataaagcaacagatgcaaacctgttgagacaagcggtgtgacccaattgccatagtcacagataagactgttggcatggctatgggaatgcctccaatgagaaggacaaggaggttgtcaatcccggggcggtatgccctgtgctggatagggtacattacaatgatctcaacaaacattcccacagcaattgagcaaatgcagaaattcccaatagccgtcaggacctgcgataatcagataataatatgagtgaattaccatgatagtttgatgaagaatacacacatgtgaggtgagcatttcaaactaaccttctggaaatgaccaacttggttagttgagtcaacaaggtgtgctgcttttccgaagaaagtgtgaacaccagtagcaatcactatggcttcgatctcaccttgcttgacagtcgaaccagaatagacaccatcaccaggacctttggtgacaggcaatgattctccagtcagggcagactacaacatgagagatagtgaggagaagccttgatggatcatcaaaaggtgaaggcaactttaagtcgagcaatgggaagaacctgatcgatcttcaaaggatctccctcaaggagacgcgcatctgcaggtataatgtctccaagtttaatacttacgatatcccctggtacaaggatggccgcctcttcctcagtccatcggccatcacgaagcacctgaagaacacaaaatatgtctcatggattcagaattgtgaatgggccttacaggcacatgaaacctgccttgagaacatagtgaacagcataaaaggtaaaaccttggcctttggtgcaagacgggccatgagtgcagcagcagcattgccagcattgttttcctcaatgaaactgattgtcgagttgataacaagaagagttatgataccaacaaagtcctgccaatccggtggcttcccctgatgatacaacacaagacaacaaatgtgttatgtaatcaactcctgaattctaaccaacaagctaggcaaaatcggaattggctcagatatctaactgccttacccctccattcgccagcgcaatggccatgatagctgcagcttccatgacccatgagagtggattccacatgaaccccaaaaacttgaggaacttgctctcctgccagtgccaccatcaaagtcccaactcttaagcattttcagacatctcagatgcatttttttctgaaacagtagataaggaacaaagcaaacctccttctcctcaagcttgttggggccaaagatttcgaggcgctgctgcgcctgctgagttgtgagaccctcgcggctgcatctcaggttctcaaacacttcctcgaggggaatattctcctgcaggaaaaaaacaaacaaacaagaattcaccaatccaactccatggacgaaaacggaaacacaagaagcatcagcccgcccaccgaattgtcagccgtcacctattaatgcatgcagccattgccactacaactactatttcgagaacggctgagccagaagcaaacaaggctggagctggagatgccaatgtcgccaccatggaattatttggcagaacgaaccgcagaaacccagatttacaagagcaaataaacgaattctcacagaacgaaaaagggaaagaaagaacggcagccatgcagggtgctaaagaaacgctagccagtcacaagaaacgccaagaaaacaggaaactcgtgagtgattgcaacccaagaaaccaggagcacatgcccgaattccgcggaacaggaaggagcaccaatctagtaaaagaacggaaaagagagcacaaagacgcaagattttggcgccgccggagtagagagtagagagttgagagtgagttccttaccaagtcgacggcctccttgaggacggcgtcgaggttgccctccttctcagccatggaggcacctcgcagatggatctcccaccactgccttctcacctctctctacctgtatcccacctgttcggctcccttccagatttatttatatgtgggataagcaaaggaaatcttgcttgcaaacgaatgaaagttagtatatggataatttacctgtgcaattgcaatctggatggaattggatgggggtaactgaaggtgaaggtgaaggagatgagatggttgtggagagtcacagggagaggagtggtaggagtgggactccactccacaaatgaatgaggaggtagagaggaatgtggaggaacagagaaacataaccttttcaaatacacatggaataaattgtggataaaaagccacatgaggaatgaaacagaaaaaaaaaagggatatttttctggaacagagtaagaaaagggggatttttatctcgtgctgcatttggatttagggtttgttggaaccatgccaccctatatttgtaaaatttgagatatgtcacccgtatctcaatgacatgtatgacccatatgagtcaatgacatgtgggtcagggtggcatatcacaaattttgcaaattttgtgtggcatgattcaaattgtcccttggattggatgggatttattgtagatttgtagcccttccgagaactcgtttgctaaaactccaacttctaaatttaacttaagaagttggatctggagtggagtcgtgaagcaacataaatctaactccacatttctagttcatgtataaaatcgttagcaacaagaacaaaaaattacttcatatgttagacattgctatcaaaattatatataaagttggtggcaataagaaaaaatatagtccactccctagcttaaaacattgtcgctagacgatgctcccacgtgtcagccttttaactacaattaataactcctaataatatgtggttttacctttattttttatttttgaactttcttgtttttctattttaaaaataaacattttagaaacttatttttaagatcaaccaaacaacaatatcacgtcagtctaaaataacctaaaataacctgagagcattacttagctagctgacgtggaagtgttatttgttcttactggcgtagcaaaacaaaactatcatgtccattgtgggtagcgtgacagtattattttgccacgtcaggtgagttggcgtagctaaaaagttcaaatttttggaaataagttttaaaagagtttatttttaaaacaacaaattaaaaaggttaaaaaaataatgaaaaaaactatttaattctgcttggttgtaacttaacttttaaccaagcccgaggaaaaaaaactaattttatccaaatggcatggtcaacatatcaacatctaagggacaaggtttgaattcttgtttagaaaaaaataaaaccgttgataaaattaaaaaagcatgttttgcaccccaaaaaaaacccagcattaccagtccatgaagcatcaaaaaaatggatgctaaaaatgcttgagcaccaacaaatcaatcaactcaacaatatgctattaattctgtgtaaatctctcttgatgttggtaatcatcgaggcaataggccatactttccattattaaactgaaaatgaacagggattctgcctagaactctgtgtatgtatacctaattaacaatctgaaggagattaggttaggtgagcaaacggtgtcaagtttcatcttagcaagtcagcatccagttgctgattgcatgactattgtcgtttccctgtacggatcgtacttgtgggttatcctgaaaatgaaccttccaatgcttgcttgggttacagctaatcccattttcacacatctgacctacttcctgaccatttctcatttgaaatctcacactagtttgtctgttcaactaaatgagctcaaaatgatcctacccttgttatttttcggttattttaaaattttgagaatgcaatcgcctttttttcccgaaggatatttggtcaatcacggtcttaataatcagtcagtcaagacaaaaattgttgtcaggtaaggttcggttgttacttggagactggagaggtgtaactttgtttcatctagaggtaaggttaggttaattaggtgactccgttcaactgtccatggaaaatgaatgtgcagtaaatttgcaggctccctacatttaatctggctgggtaaaacatcagcggattctgaatatatgaatcctcccagaaaaaagaatatattgtcccagcatcaaagctagctaatttcttttcgttctacatctgatccgttttatcaaaacatgcagctatgtcattttgacatcgttgtctcaatgatatgaaatgattacagagtggttcaccgaaagaaacctttccttcaattagattacctgtcaaacggaatgttgtgtgcgtgtcgagtgtttagcatgtttagatttgtacctgattgatatgactagaagagttggatgaaagaaaagggtcggtacgacatgtacgccataaacaaaatcacagagattgtgaaaagagctggacgattagaaataatgagatgccaataatttaagagagaacgaaataatttaaaagcaagcttcttctcgtgtgtcatttggaacctaatcactaattaatcagactcttaaggaaggaatcactgatgaaatctgagtactaattgaacaccatgcggcaagttgtccagttggagttcagaacaatttgatggttttttccatttggagtaattaggtaatccagatagaattgcttccaaatggcgggtaatcatactgagaactttaatcatcgagcacgtaatcatctgtgagaactgaagtgaaaatatatatatatatatatatatatatatatatatatatatatatatccttgggtctgccgctactttcatgcttattagcataaaaagtttctcttcaaagttgttcaccagaagcacaatagaccttctgttagcataaattatagaacgcatgcatgctggagtgctggatacatttccaatcacacaagtaataaaccaacaaatgaattagttatttgctggtcacagcacatcataatttgcaaggttgcatccacgatccaataaaaatactaagcaagaagggagaacaaacttggccaggctctgtccttgctttctttccctcttcttttcagaaaagcaagagcacaacttttccctttccttcttttcaaatagtagcaggataaaaatttccagaaagcaagaaccaaagatgaaactaaagataatctgctttaggtggtgcactcacagtcatgcgtgcaaaggaggtagcaatcttgggggtaccatttctgttttacttttgcaaccatgcattcattcttggtgacttggtctcatccttttcttttatttcaagttaaaccatttttcataatcctaattaattttatttatttcctctcagtgtcttgactaatgcaaaaggacacatactgttaaatgcctttctgaaacccaaagaaacattttgcctgaggtctaggagccaccaaaccaattaattccaactggctaatcaaacatgatatcaggactaagagtaataaccaaaaaggagtaagataaattttcaactttcaggcttctctcactaaaagaaagccaatactactatatgaaaatgaaccaaacatgtaacttgtgagcatacttttatgacaacaatgaagaggtggtaccggatatggaggttggcctttcagacagaaaaggtgaaataagggagttcagaaaggactctttactttgatggacagatcgcattaaattaaatgatgtaatttcagccaaagagtaggagagtacactttggaataaagcatcctattcctaactcatgtgttcgatttatgtaacaaacaaatcactgtctaaaaagtctaacaaataaataaaaggaaaaaaaatgaaggcataatgtttcagatcttggagctaggcatcttacacatgcacctgtgtacgtacacacactaaggctgcgttctttccacaagtttcccaacccctttccctcgttttccgcgtgcacgcttttcaaactgctaaatggtgtgtttttttgcaaaaagtttctatacgaaagttgctttaaaaaaacaaattaatccatttttgaaaaaaaattaactaatacttaattaatcacacgctaatggaccgctccgttttccgtgcggtggagttgggttcccaaccccaagtatcaaacacagcctaaggcagcttcaatttcacccaaaatctcctttagatgttccctagctagccaatcatcatcttaatgataataagattcaacctggatcacatggttctcgctgtcatcgagatgagatagcctaccaggccgatagagctcatattcatatcatcatatgaggatgatgaactatacggttggttgattgatcgatccattcataacactgggtatactatacatgcatgtgatgtgagcattatgtccaaatgtacaatcacctttagattctctaatagccagctactacaaatctcatgcaagcagtttggaatgcccacatggcactaaggcaacacgcggggaaaaattacgagatgaataaaaccacaaagattcagcaccaagcatcaaacaaatcacagcgggtcgccgatcaaactcccaccaaacgcaggatacgttcagtgggttcgtttgtttacggccagaaagaaaagacacaacaatatgaatgatagcgggcaacagccaacaggattccattcgcctaagcaaaggaccaatctacaaggtagtaagtgatattacatggatattcagatagatgtcagtggtgggcgccagcgttacacaaatttatcaggtccataagggtagagtacaatacttcaagagaaacatagcccaaaaacctacgcttctcaaactcctgactatctgctgacatcttcccatcctccgttgggtgatcaatagtaaggtaccaagaaatgcatccacaggtgtcgtccgggtcaacattcgccaccaggccaagcgtttcaccttgctcaagatcaaagtaaaggcacaggaaatctctagtcacattcataccgagaaccaatgcttcttcatgaagccagtggattacttgactagcaacctgaacagaaaaaacagtgagcacatcattctgacaaaatagacttaaaaagcaattgttgtgacatgggtaatattcatgggcagcacagtattacttggaaacaaatccttatgatgatccacttggattaaattaaatagcccatcaagacaaccaaagttgaacaatgacaggtctatcaaagcataaacatcttgctccctttctcgcactgtattcagtgctttcagttttatattacatgaatggccactgccttccagacctcttatgtgggacaatattaacctaaaaaaatgtggaagcatggcaaggcactagaatgtttgtactggtgtcctgttcaactcaacatgcatgccacattcattttgaactgttaagcaaactaatcctgtaggtcaataggcacaaatgaagatttcctcagggaaaaaaactaagaaaaatgcattaccattgtgcatttcacattcaaatgcaaggagtttatgttacacatttgcaatgcaagaaatagtctggctcattgcattatcaatggaccataatgaattccaatggtaataactttaataatttcataaacatgatctaccaagaaataatttaaatagtatcatcagaagtttacctgctgcagaagcattgttgggaggtcctccaagtcacaattgtagctatttaccaaatatccatcggagggcttcccagtcaatgatccagcaatgcttggggagccttcacccattagactaatttggctatctttcacgatcaccttagtattgaactgtgacctggatttgtacttaagttcatggttatcagaaggctttgcaatccgatctgcagcaaggataggctgaggaactttcaagcatagagaccaggaggaagttcgagaatgccaagtaggaagagaacgcaaatggagatatggaaccctgctgacctgcaatacagaaaggaaatttaaataatgatctacatgcaaatatgtagcatcaacaagcttataggagctataccacactctcaagctccacgagtactttgttagaaaatatcctgtgagccactgtcaagcagaaatgacctagcaggccataatcatcacctgcaacctgagcaggactttggtagcgaccaatgttaagggatttctccctgaccttcctaagaatgttctcatgaaacaattgtagcaagtaaatttccagacttctgggattaggaaaccctgtcacgtcttttcttaaagggtccagcttcccattcatagtgaccaacacaagatttgaggcatcctctgaattggcatggtcttcatggtctaccatttctgagtcactaccatctccagaatgagcaagcgagaggcacaatgaacattcctgaccaatagctaattggagaaaatcttcacgcattccagtcacattgatgccttgagattggacaaatgtctcacggatcaccatatcaaatacctacaaaggcatacactaagctaagccacagaacgatatacataaataaataatgataaacccggggagggaggggtggtggtggtgcaagatgtcatcacatgatatacaataattttccatgatgctatagttaaaacttaattaagagcattctatacaggaattcttagcatgccaagcaaacacttagctgacctgctcctcaaatattgacttgtggatgttgcgaagaatagaatgtgcatgtttgatggatttattgacatcatcattgtctgtttcagaggaagtgatgcttgagatgccatctttcagtttatgaccgtagttttccacaccattggcactgtcccctcgaaaattaagactcaagaaacggcaagatttttgagggacttgtacggacaaagtgcctgatgagtcttggtcaattggaatcaatggtaatgatgacagtcgaggcattgctgctgtgtccaattgagaagtgtcgatcagatcaaacatgaagccctcacttcctggaccacttccaccaaaccgttgccgcttcactttccagttctgctgcaatctgccaccaatccgcgagtaattcatggtgcaaacttgggtgaagtggtattgaaataacaactcaagttaagcaacaagacatgcctgattaatgagccatagaacctagactctttttggaactgctgctccattgttttggcagattgtttgaagtagcgtgacaaatgctgcgaggacacaaatgaagatcacaacaggaagcatgatagatgcaagacggaagaggaaagtggcaagcgattacagaaacaaattgagtttgttttaggttccattttgttccttagccgtgaattgaagtaatcaaacataggcagtagggtgacatacccgaacgcgctgaagcttggtggctgcagagactgcggtgtcaactaaggtttcggttggcagcgatttgggcttgagcatcccagcgactgccactgcatcattggcttcgacctgcattatcaagtaggattgtctcctctgtcaggaatacaaacaatcgcatgcaaatagaatggggtttgcagtattgtgtgtgggaaaactgacagtgaagatgaggtcaatgacgacggagagctcctgctgcgcctgctgcaggctctccatcatgccctgccacggccatgcctgctgctgctgctgctgggcggtgtccttcttgggcttcttggcgtccttgtcgatgacccaggagaagtcaatgcgccgattggcggagaggcgatgctcctcgctgctggtgtcgctgcggaatccgaatctcagtgaacgaagaaagatgggggttagggtttcaggggaaggcaaaaggttggtttggtttggtgcttacggcgggtagtgctcgttgccggcctcgtcgatggcgtggaggcgcttgatggggagcttgtcgaggtccacccgcacggcttcctccatggcgaaggcgaggcagcggcggcggagggcttaattagatcggagacaattttttgagtgaaggaggcactgccttggggctcacgagtcccgctcaagagcggaagggatccccccgcgggaagcagaagcggcggccggcggggtgggggcggccgccggcgaggtcgtcgggcggcggagtgaggaggagcgaattctcgatcgagtttgggtgctggactttggagtttcttctctggaagagagtatgatgggccttttttgactttgggccggcctaacaagtaaatgttgctgggctggcctggaccagttccagacttccactactccgaatgggccggagtttctttttttattttccatttctcaaggcccctcgggagcaggaattatctcctagcaatggtaaaacgaaggcttatatcagagagctttttcttatcaatgcctacaagacaacaaggcctgttcttctgttgttcgtccatggatcacaagtttcagggaacaaaactctctttggtgccggtggcaatgatattccaaactcaaccgcaagttgtgatcaatctgcaacgtatcagggacgacggatatttcacaaaataagtagtagtatgtcgattcttcagtccagcttctgaattccaggccttttgaagttgagcaagcaagtaaattcagataatctctctgcaaaccaactatacagtgagtgactgaatttctacttgcgcggatcgatgtgccagagcattgccaatcacagaaacaagttgcagatgagattgtcatactagcttacaatcaatgccaccatccgctcaaaactcacagcaatcaatcacaacctgaagaaacaatgaggacaaaccactgtccaccggatcgagttggcaaaacctggacgaccaagggggttcggagaataaaactccgacccctattcatgaaaaagaaaagcaccgcaaacaattcgtatcataattcttgcaggtaacaccgtaacaccataagtttgagagaaatgcgccaaatacaacaaatttggcgatttgtttgttttctctttttcaaaggtagcatatagatttgccttgataatagtatcaacagatgcagcgctataaccatatatactccatttcttctccattcccttgcttcattgatttatgacatactcagaaagactaaaataagcatcaatttcacacttcacaggcctgttgttcacaactactgagctgctgtgttattgtattgctactaatcaataccagcatctctttagaaaaatcattagcgatacacagcttacattttattggatatcactgtcattgtatcacatccactcctcccagatcaacatatgcaatcatcatgcctatgccagttttttgcatggtaaattctactactaccagtggcccagtgccatgtgatgtcaaccccaacagctttgtatattattaccccttattataaacgcatcatactcactattggggggaaaacatgatttttcatgctgctgcgagagggctagaaaaaagaagttgcagtcttaatatatcacacacgcagcatgagagcagtgacataataacggctacggactaccattcacaatagtttcaatcgttgctgccgaaatcgtcaaaacatctaatttatcattagctcgagattggcagctataattgatgacagcgacaaacagcatagacaataagacatctaactacggatggattagaataatccatgcggtagggggctaatgaggattactagcagtagcagaaggcccggtgagcatcttgtcaacttttgccaaaagcccctgcatttccccaagaaggttttctggcatttgctttgatccatctgatggagttgccttcttgacagatgaatggccagccagggatgagatcatcctctccaggtttttcctaatatccgtaaggggaggctttgaagctggcgaaggcacgctcaacttgattggaggaagataatgaagccttggtgtagcaaacgggggaccaaacataccaagagtttctgcgctgttgtaagccgcctcagcttcagcacttttcccaaacacaacacgagcgctatgggtatcttttacgatgtccgtctcagactcaatcacgagaccaaacttaccaaatgcagagagcaattcctctttggagggcagaacaacaccctttgcaaagtccaaaagaagggctgctgggtttccaaagtgctctgcaattttcttcttctttttcttaggagtagaataagctatatcagggaaagcactattggtagcttcaccagaggaatggtttacattagctccaggaaccatcttcttcaggctaggctgatcggccctctggccctcatctttgagggaattgcttgctgctgctacattagtgccattggcgacctccgctttcataagcatttccggcaccatcgcttcaagggaagcataagattcttggaccgtacgcacttcggcgcttgcatgttctttatttccatctgtcggctgagatagggatacgtcttcacttttaggaagaggtgcacttttgtcagtcacatctacagcagcattctgcccatctctgtgtagaggaatattagcttcagacttcactgcttccaccggaacacatctgacaggcacatctactacaatgccttgcacacctggatctgcttgaatgttggtatgcaactgtcttgcttccagcatacctgcatcattctgttttgcaggttggtcagataaattcttgcaagcattggctggggtcttcaaaacagatccaccatttgctttgtcctgctcctgtcctggttcttttgctaccttcgctgaagctaatgtagggctcttaaagtctggcttgatcttctcaagctgcacaccaactgccataccccttgcaccattctctggtttcgtcgggcttcttatgtcttctgccctcgcttgcctgataggaatagcaggggtaattgttacaccacagcctagggcagccgcaggagatttcttccccctcttctcggtcttggtcgaagaactcccaccctcattttgcccctgttttctggtcctcttcaaagcacacttgcctggtttcagagcagcacgtgaatttacaaaagaatcagatgtctccacagcagcatttgtaaaagcattctccgtagaacactcgtgtgctataaaggacttgtagtcagcatcctcgaccaacaatgaacttgtatacaaagaaaggaaggcatggacggccttcattgaccgtatcctatggaagacgtccagcccagtcctgcgcacaaaaagcaagacctcttgtggagaaacattctcctgcaatggctttggcaataccttgtattcatcatcttcagcggcagcgggtggcgatggctttggcgaatcagacgccttctggacaagggcaatcccgcccaagttggtgtagggcggcgacagatatttgctcttcttgcgctcgcgcttgttggacttggagatggtggtagcgctgtcctggtggtgtggcgtagccttgtcatcgtcattgtccatgagctcggcgacgctgcgct

SEQ ID NO: 8782 - DNA, 27931 bp, Oryza sativa
  unsure (1)..(27931): unsure at all n locations
ggggcggaggcgcaggggcaggtgaggtgggcgtggaggagagcggcggcctgagcctgggcgtgttggacggcggcgacgaaggcgcgggtggtggtggcgcgggccatgaggtcggcgtcggggtgggcgaagggcctgaggtcggaggcgcggcgaggggcgtggtcggggtcggggtcggcgaggtaggagacgaggccgtcggggaggaggtgggcgggccaccagggtcggcgcttggacttggcccagacgaggtccccggcggctagggtttggggggttagggtttccgccatggcgcggaggagcggagaggagatcagggatcgcgggtgggaaggaatgggagtagactccgtttgtttgtcgtggaatggaaatggaacggaaggcggcggggcggcgagcggcgcggcgggcggcgggcggcggcgggatcacctaccgctcggagcggtgcggcggtggcaactgacactgactcacactcacactcgtctctctctcagctcaatcaaccgccgcttactaggctttgtggttgggccaaattctaatcacggcccaaaagttcctgtacactcactcgacttgactggatttccttactaggcttttcttttctttttcttgacaggcctctgttccagtagagcttgggcttctcctacgattgtcatatgggccgttggagtttgggcttctccaatgcaatccaacggcctcttctccctcttatctctgcaactttaaaacacagagtcatctttctttcatatgttttattctcaatcatcatttcagtacatttctatttatatagccctgcctcgttacgaacattacaaattacattatagtatgttcttatttgtatgcaaattagggccatattaccggtactataataatataagaaagcaaagagaaagaaagagagacaagtgttgtttggttcacttgagttgggttgcacaccatgccatatatacgtggattagtagcactcaccaaattcaatcatttgcagcatccatacatgtaagcttacaatacaatatttatttgaccgagcacgtacgcaaatgcactctttgacaaattaagcaagatccgagtgatcgaccatgttttccggaggacttaactgaagtagatagatattcagatactccatctaactactactagatgatactatatgcgtacgtcactcagtcaatgggacgatcgactagattaaattattactttcaccatcctaattaatcctatcttagtataaaattatcccccactaactccttaagcttaacatgcaaagatgtcacatcatcatccactaacaatcatcacatttaaatatcatgcaaacatgctatatctttatagtttttataatttaagagatttcaaatacaaacatgttaaattatcatccaacataatttacataatgtttcaatgtatatctttattatgttttatgatatcctatatagttttatagttcatccttatttagttagtgcttaaatgattaatctatggtccaaattatctttctcattttttcatctaattaagtcatatcacatcaattatttttaacctttagatgattaatctactttccaaaccatctccttatttttcttcttccaaaaagtcataccaccttactttttacatttgaatcaccattgtacatactatttaaatttaaattatcataaaccacattaacttacttcttaaactgatgttatctagctatcttacaggttatttttattgtttccatactaaattttccacagcaatacgcgggatttcacctagttaatgagatatgcataccacaatcgttcaattcagtcatatttttactatcaatcacttattaatccattcattttaaattactaatcgttacgttatatattagtttaaatcaaacattttaatctttaacgttaatttctataaactcatacagtttaacatcataaaatttatatttttatataccatagaaataatttcataatatatgaatcacatgctaaacaacacatatttttaaaattggcatatatgtagtgctacataatatttatagttttcatagaaatattacttgtcgcatgtacttctagcaggttttcgggaggaatctagaaattaatggtaccactgtacgacaataaataaataaataatgctattgataggccactcggccagatgtcaaaaacctaacgctactcttgatacatgtgggaatatgtgtacatgcataaaatatttcacgcgagcttcaaataatattttatcctaaacaacttatctagcgcccgtttcgtcatggcgcctagtgggaaaactatctcttaaaaatcctaaatgcaaaaattgtttccttgattattgtccagtgtccgtgccattccagatctcaaatctccaatccatcgtcgaatccaaaccctaatctcaaatatgtcctaaatcaaatcctctcgaaaagtctactttgcctcccttgagtctgtgggccgatctcttctccccggcccatttcctctcagcccatctctccctcctcctccatccttgcccgcacgtgcgaggcacgtgcgacgctcgggcgctgagcacgagagagagctcgctctctctttctcttctccttccctctctgctcccgctaccgcttcctgccgacgccgcccaaatcgccgcgccgttgcttcccgcgcgcgtgcgcgcgccatggtggccgacaggccagtcgccgccgccgtcagcgcctgccgcgcctgagcccgcgcctgccgccctgtagccgcgccctttcaaaccggccccgccgtcatcgccgtcgtcacgacccgggcccaccaccaccgcgcatgcttccaagggttggaggcagagctcctcctcccactgtctcgtcgccctctctctccttccttcttttcccaaagtggcaagaggcaagtctcctttccctctttcctttcttctttttctcccccgccggcgtcatcctccctgtcgccgttttggccgctagccggagcgctagctcgctggcttgaccgcccaatgtcggttccgccctcccaaaccgacattgtcgcccctataaatccgagcccctttccccattccaaactcccttgttttcgccttccgtctccaccgcaccattgtcgctccgccctacttgcacctccgccattcgttgccaaagcaccgggagagccggcgcgtgcgaagnacgcgtgaaggggactccgcgcgctcgtcttcttcctcttccccggcccgaggccggagagatcactcccgtgccgtcggcctctcatcacagcgccccgcctcgtctcggtagggcatccctccgttctccctcctcgctccatctcttccccttagctttgagtagcagctcgagtagtaccccagtagctagttggcgccgccccaagccgcgccgccgctcgcagtaagctcgccgccatcgcacccgcgctcggtagtagccgcccgtcgccggccttcctcggcgatgacccgtccaatccgacgctaaaaacggattcccggagtcacgtagatgctctaactcgcccgaatcgatctcccgtcatgccgtcgccgtttcccccttctctcgccgccggttgccgccgccgcaacccgccgccgtcgagccccctccggcgaatccgagccgttggctcgtctccctttgtcccgtgcaacctcccggtgcgctcgcccatgcctgcatcgctgtagatcgccccgccgctcgccgccgccgtccgccatccgttccggccgacgtcgtcgtcttcctctcaccagcccacgtggctgccacgaaggcggcacgtcggtgccacctcggccgcgaccgggtcaagcagacctcggtccgccgctcccctccgccccgctcgcgcacgcggtccaccgcgagccgtgaggctgcgcgtgggcccgccgcatccgcacccaccgcgagccgcgcgcgtgcatcgcgccccgctccaaaccctagcgccgcgtcgcgtgctcctcgctcacggtgagccgagccgccgacaagcaggtcccactcgggatcacgcgaggtgagcccggtccaccgactccctctctcctcccctcccgcgtgcctttgggccgccttctcgggccggccggcccattagctcggccgagtcgcgcctcttctctcgggccgcgccctagccgcccgagggaagtctgtttcccctccctctttcgttgctaattcaaaaagggtttaaataaatccttttcttttagtccaaaaatccgatgatcttagaaattcaatatcttttcaaccatacatccgtttgactccgttcaacttccaaaattcctcaaatctcgagatctatctaatggcacgcttagaggtcaataatagggctttaatttcgccgtttgttgagtcatctcgttcgcgtgtagcttcagagcccgaagacccggagtgcgcggatttcgaggatcaagctcaagatctcgagcaaggcaagtcaactttgatcatcttgcacctataatttaaagggacaattcgaaccatgccacacaaattttgcaaaatttgtgatatgccaccctgacccacatgtcattgactcatgtgtgtcctacatgtcattgagatacgggtggcatatctcaaattttgcaaatatagggtggcatggttccaacaaaccctaatttaaatctaagtatttcttttccacaaatattgcatgaataggattaacacaagtaaatcggccgcggcttgcgagatagcctgccggcccaaccctaattgttgcaattaccctccttgaattattgaacacttaaacctcctttgtcgactgttgtgcttcgatgcacgggacttcgggcacgcgcatcgggacacctcccctcaaatttaaaatatccaacgatgggtaaaacttggggttttacaaaagacttggaaaaacccgacacctgggtcggtgcttgcgaactaaatgaatttccaaaatcgcggatcgaggaacgtaccgggagtacggtttcccgctcttgcacttaaggaccgttttccttggaatttcatccgaacataaggcaagtgcgaccacatgggtggaatgggatgcccctggctgagtaattagctaatcgaggcagccattatgccaagagacatgtggattcaacggggtggtgccagggagaacccccgggcttcctggcacagtatggtctgggacctaacctaatgtcggtttgggacccctctcgttggcatatggtgaacctgtgtcagctttcgaaatgccttgtcatgaaagcctcaaggtctctagacgtggccgttctgcacgggctgggtgatccgggttagtaatgtcgtgtgggtaaagtgtaccccctctgcagaggttattaaactattcgaacagtcatgcccacggtcatgggcggatgtgaggtgattcctagcgtagttttgtttgactactgcttgtgaaattactgttgtggaatgggttcgatgtttggaaaatctgcggctgatgggatcagccaggcccgggtgcccgtttgaaagccgttggccgggtgccaaccttgaatcaattcaaagactgatacattgcacatactccgaccggacgagacgcactacctcatccgtgtcgtttgagaagcactcacttagttgtttcaaaaaggagtttaaataaaatcaattgcaaaaacaacagtctttccttgaagcctgcattaaacacttaattcccatggcttgctgagtactcctgtactcacccttgctctatataaataattcccccccagttgctgaagaagatgaagtggatcccgctgatgaggagttcttccaggagcaagtcggctacgatgagttttagggtttcggtctagttcccaagtcgcgcctgtgatgattggtccaagtcttggcttccgctttcccttttgtaatgcagttgtgagctcgggatctgtccgcagcccaacatgactttactcctactctgtaataaagagacctctgttgctgtgatattctatcttcctgtgataccagcagtgtttcctgggactggtattgattaacaggttaatttggagtgtcacgggctagttccgttcggggcccttgctctatataaataattctcccccagttgctgaagaagatgaagtggatcccgctgacgaggagttcttccaggagcaagtcggctacgatgagttttagggtttcggtctagttcccaagtcgcgcctgtgatgattggtccaagtcttggcttccgctttcccttttgtaatgcagttgtgagctcgggatctgtccgcagcccaacatgactgtacttctactctgtaataaagagacctctgttgctgtgatattctgtcttcctgtgataccagcactgtttcctgagactggtatcgattaacaggttaatttggagcgtcacgggctagttccgttcggggcgtgacaacttatccaatctatgatccaataacactgttatactcattgcaattaaatgtttgcaacaaggtactatagttaattctttacatatatattctaattaaaaaaatacatgtttttatcatttaggtcggatgtttcacacttcaaactgaaatctttcaactggtctgttactatgttgcacattttaattttgttttataatatgtctttcttaatgttgcatatgaaattatttggatgttttaataagtgcttttcccatgtgttactagttcatttgaaaacattacatggtaattatattttagttaaaatatacatgtttcaattatttgaggtcggatgtttcacacttcaaactgaaatgtttcaactggtccactactgtgttgcacattttaattttgttttcataatataaattttctaatgttgcaaatgattttcttggatgttttaataagagttttctcatgttttaccagttcatttgcaaatattacatagtgttgtttgaatgtttcagcagatattttgtgatgttcttgatctttcacgctttatataaaaatattttaactacaattataatgatatactatttttctccagaacataatcatatgaggtcttactgtaatcatttaattgcaacaaacaaacgatggaatcgatcacataacaaataagtagtttacaagaaaatatattgatacaaataaccgtaataatcaagaggtccatatatgatatatggtccataccaagtaaatatatcacacgactatatatatccctagcagccacgaacacacttcaactaggttattgggatcaagatacttaatgtgttgggcttttttttttccaaacaattatagaatcagttcgtaggatcaaagatactaattttatcaagtatatgatttatgtaaaatttgcaatattgtaaagtttgaagatgataatattagtttggtagggatcgagctaataaccttgagtccaactgcgagctactaaggagtactccctccggttctataataattgacgttttggacaaggttgagatcaaactttaataactttgaccatcaataacttcaaaaatatttagtttgaagaaactagaacaacatatatagatttatctttcaaaacactataataaaagtaaacatgcatttatttattatgtatattataatagaaaaataagttcaatggtatattttgtagaccgtgtcattgttcaaaacgtcaattaaaatgaaacagggagtacttattaatcgtgacgaatatttgcatgtaacagtaacaaccaattaaggcagattaattagtaggactactgtacatggtgtatacaatttattaatgttgttctaggatggatcatttgcatgaatggcagcaaataatgaattaatcccctagctagtagctagctagctgcctactccatgtatagtcttttatacggagtaacaaattaagatgacccctaatataatttttccgttaaaaataaccatcttttatatgaaaaacttgacataggtcccaacacaagctatatctacttaactgtcaagtactgttcatcagccaatatatcattgcatttaattatatatattcgtgatgtgtgtgtacctttaatttgacgaacgtatatatgttgctttctagttgatctcctcgccattagttatgattattgagatattttaaaactgcctttactttactgataacagagttaatctatattgtttatttctttactaactactatcttatgaatcatatttatttatagcagatctatatacagtatagatatcgactactagtagtatagtagtatagttgtatgtatttgttgtactgtattatgtctcgtctcaattctaagaattttttgaacggtgagaatatgcactttcagcacgatgatcactaaaataaacagggaaaatatgtagtgcaaaactaactatgtatcgaaaaaggacgttcaagattcgtccacaccaaatcctggacgtacatttttttgattcagcgtgaattttcagacttccacaacatatatagtttccaccatttttccaaataagcagatactcgtcagtaatgatgttttgatgattgatagataaagagagcaaaaggctagctacatccaattcgctagctagctagagtatatacacgcgtaccgcatttatatggatctgcaattaattctacatggagatggatgtaaatgagtgcttgatcagttacgttaccaaaacgatcttttgataccatttggcgaattaaattaaatggagcagatctaatttgagaatgtatatatgaatggtcgagggacatgcatgcatatcattgtctaaaataaagatggaggtagaagcggtctatctcgggcgccctctgcctctggtggacaaggacgatttgaattgatcgatcgattaattattgaacttttgtcatgactcgagacggcgacggaaaaattgatctgcaggtacggtatatgtatatatctcgtctcagaaaattaattaactaattaaccgcgtatctatatctcattcgatagagatatatatatcgcaaaagtacatgcaatttgtcagtcttgagtttacacttgactacacacgtatacgtgcaagcggtaaatggacgttgctctcagttagtgtatgtggcaacgtgacggccggtaatctagctagctgctttcttactagtactagtactactactttagctacaactttcacaagatagctaataagatagatagattcttctcacttgctcttgtgaaagggagaaactgaaggcatcgagcatgtacatacgttcagattgatccatacaaatacaagtacagctagcatgcatgtatacatatgtacagatcgatcaatataatgtaattaatgcgtatatatatgcatggcgatcgatcgagactgcagacaggccggcatgcctgccgatatccagcttacgactcaatggccagcagtgacaggttttgactatagagacgatggtcaggagagagtgactgtggcagtggtgcacgtaagcatgcggacaagtcatgtcgatcgagtcaaagctagatctatctcatgaaaatgccaacatgcatgcatgttcaaccgccgtatcaacacatagggaaaaatgtttctatctcccgcgacgtcgtatcatgcatgcatcttaataatattcgttaaaatatttaagaaatatcaagattaatatgtgatatatttttttctcaacaaacatatgcaataactataacttacacaaattgaatttaagcttcgtacgtttatagaataatatatctcatattaatttatatatattttatataaagatatgatacgtaaaataccaagagatgtgtctggagacatgcaaatctatctctgtatcgatcgtgcatattgatcgacgacgacgacggtgatgtgcactagctctagtgtactgtacatcatgtcgatcgatcgatcaatcggtagtctatatatatcgatccggaccatcatcctcctgtccactgccacgcgcgctagctacttgttgagtatatatccatcgatgatgcatgtatgataggagaaaattaaaagctactctaggtttgttgttatcctgcagtacgtttattggggatcgatcgatcgacaggccgccgcgcgtacacacatatactaactccttccttaaatgtttgacgccgttgacttttttaaacatgtttaactgttcgtcttattcaaaaaacttttgtgaaatatgtaaaactatatgtatatataaaagtatatttaacaatgaatcaaatggtaggaaaagaattaataattgcttaaattttttgaataagacgaacggtcaaacatattttaaaaagtcaacggtgtcaaacatttaggatggagggagtatatactccatcgatcgatcggtggcttggatatataggatggatgcatcatccatcgatcatgcatgcgcacctgggctagctgcatccagaagctactcatcgctttcatcctgcgggattcctgcccaagagtagctaggactcaactcatatataatttgttcaatttttaaattacataatatgatgctagtagtgatgtttgagtccgttccaacgccataattaaactcacatgtaggatcataagttccccacacgtgtatacttttgctttggatatgacatcatatacctaatcaactaactatactataaacttataacgtttgcttttgctttatcacttataatatttatttctctcaaaaaaaatataatatttgttttgcaacatacatggcctttagctagtataggatgaaggagacaagccaaggacgccccatatcgatctctctaactcggtggtacgtgtcacactacacaaaccatttttctacacacacccatttatatttacaaacaaaacgtataatgacatgacaattataataaactttacaggcaagactcttaatatatctgcataaaaaataacttattttcctaggtgggcttcattcttctttattcaagatagtccatgtatcacaaacccacacaaacctcgaaaaaatgttaagtcatattggaggacatgtggcttcttcatgggcaatggggaatggggaccttggttcccaggtcatcaactttaaattttctgaaaatatcaagtgttcttctgttgtaatcaaataagtatatatcttctgttcttttaagtatatatatattaagttgataaatggctatagcgattgagatgtatctttccattttatcgactaacttttatagcacgcatgatataaattactactcaatcaagagttccgtagaattcttcacctcaaattttgtttgtaattggcaaatataaagaggaagaagtactgtagcagtatataattaagttaggaaggagaggactcatcggatcgatcgatgaccatcgagtcgcgtcgatggatggatcagctagcgtcagacttaattcggccgccgcatatatatgcatgcgacaaacttaatagctactccatccgtttcaaaatatttaacaccgttgactttttagtacgggtttgactattcatcttattcaaaaaatttaagtaattatttattcttttcatatcatttgatttattgttaaatatactttcgtgtacacatatagttttacatatttcacaatatttttttgaaaaagatgaacgatcaaacatatatcaaaaagttaatggtgttaaacattttgaaacggaggagagtactatccagttgcactgtatactccatatatagtggcagtgctagcaaagtcaaactaatttaattaattattaagaagcactcgtatgtatatatacgtacagttgccgcgctcgctgcagcaagttgatgatatcgactagctaagctacccagttagcagccggcaggaccgatatatccgcaggcggctaaagactggagtaattagcaagccagtttgagtagtaactagagtaactaataaacacatgtgcagaaactgagattttgtaatgagtagaagtatgtatctagcttcacgagcaagctaatttaattaaggtagcgtccatttttttttaaaaaaaaagaaatcgtagctagagaaggaccggccgggaaaacaaaatcagctgattaattgacagtatatacagtatagctactgtagtaaattgctttgcattgacgttgaaatctgaaagcagaataatctgcagtccatcggtactctctagctagtctgtacgtagtaatatctctctctgtctactactagtactgcaacttgttttgactgtcattgctggagtatactatatatgattgataataggagtagtaattaataaataatgtacacttgccgccggaatacatccatccctacgtactattcaccagctgcggtcatcttgactccacacttgatcagtagcactcatactcaaactaaccaccatttgctagtacttcctctgtttcacaatgtaaattattttagcatttttcacattcatattgatgttaacgaatctagacatatacatctatctagatttattaacatcaatatgaatataagaaatgttagaatgacttacattgtgaaacggaggaagtaccaattaagccttcttttcctttggtcaaataaagttaactgaaaatgacgttgtacacatacacatccatatacagtttccggccaaaaaattactaacaccgttttgactaatctatgtgtatatcctgatactggccgacatcaacttaattacatcatatcgacccccctgcccaaactatcggacgaactaagctagagtgtagcaaaatcacacggtacagctaccatatattagcttgatccacaagctccccaaattcccattaattaattaacctgcagcctcaattatttggtctctgactcgtgcttaagtatacactatcatgcgcaggaagacagatttacaggtggatggatgatttgtgatgattattcgtgatttgcgataaatggtccctggtaattaattatttgagagtacagacgaaggaatgaattaaaattattaattatccaaaaaaagtagtatttgtaagaaactcatgcatgaaaagtctttttaaaagaaaaatggcaccattatttaagtacttttgcagtgagcatatggtacttaattgagcactgtgcatgtggaaggaaggcaatctcacaacaattaaattacactctgttcatgcagttcagtcgacgttatacatgcccttgaatcgaatcaatatctttgtgtctgtctgtctcttgctggactctgcttctgctaagcttatttataggcctccactcactcatctctccttgcactcctccctgcatgcaagctcctctatctagctagctactctactctactcgatcaagatcaagatctatcatggacgcagcagcagccatggagaagcagcagcagccgggcgagaagaagatcaccggcggcgaggaggaggaggaggaggaggtgatcagcagcgtccggtaccgaggatggaagtcgatgccatacgtgatagggaacgagacgttcgagaagctgggcaccatcggcaccaccgccaacctgctggtgtacctcaccaccgtctaccacctccccagcgtccgcgccgccaccctcctcaacttcttctccggcaccaccaacctcgcccccctcctcggcgccttcctctccgacaccttcctcggccgctacaccaccatcgccgccgcctccctcgcctcctgcctcggcatgcttgtgcttaccctcaccgccgccatcccatctctccaccccccaccttgcactgcctcctcttcctcgtcgtcgtgccagggccccacacacggccagctcgccgctctcctcgccgccttcgccttcctcgtcgtcggcgccggcggcatccgcccctgcaacctcgccttcggcgccgaccagttcgacccgcgcaccgactccggccgccgcggcattgccagcttcttcaactggtactacttcaccttcaccgtcgccatgatgctctccgccaccctcatcatctacctccagagcaacgtcagctgggcgatcggactcgccgtccccgccgccctcatggccatctcctgcgcgctcttcttcatgggcacccgcctctacgtccgcgtccgccccgagggcagccccttcaccagcttcgcccgggtcatcgtcgccgccgtccgcaagcgccgcgtccccgcaccggcctccgccgacgacctgttcgacccgccgcaccagagcaagctggtggccaagatcgcgtacacggaccagttccggtgcctggacaaggccgccgtggtgacgccggagtcgagatcgagcccgtggcggctgtgcacggtgcagcaggtggaggaggtgaagtgcctggcgcggatcatcccggtgtggtcggcggggatcgtgtacttcatcgtggtaacgcagctgggcacgttcgtggtgctccaggcgctgcagatggaccggcggctgacgaggtggtgggcgttcgaggtgccggcggggtcgatggtggtgttcaacatgatggcgatgacggtgtggatcccggtgtacgaccgggtggtggtgccggcgctgcggcgggtgacggggaaggagggcgggatcagccagctgcagcgcatcggggtggggctggtgctgtcggtggcgacgatggtggtggcggcggcggtggagcagcggcggcgccggctgggcgcggtgggagtgaagatgtcgttcctgtggctggtgccgcagcaggtggcggcggggatgtcggaggcgttcgcggcgatcgggcagacggagctgtactacaggcagttcccggagaacatgaggagcgtggcgggggcgctcttcttcctggcgttcgcgctggccaactacgcgagcggcttcatggtggcggcggtgcaccggaccacggggtggctggcgcaggatctgaaccacgcccgcctcgacctcttctacctaaccgtcgcggccatcgcggcggccaacgtctgctacttcctcctctgcgcccgctggtacaggttcaagaacaccaccatcgccgaccacgtcgagctgccggattatcatcatcatcagcccggaaccgccaacaccatagcctccaaggtttaattaattttattatcacaatcgatcactctactgtagatggtagatagatttagaggtacgtcatcgatcgatgcatcaccatacacagtaggagtataatatctgtatgtatcagacgcaaaaacactataatctcttcttcctcctcactctcacgcgttccacggcaagccaatagcccaatactacgtacaatcgccttcctattttatgttaacaagaaaaatgttactaactcactttataggaaaaaaccggaaaataattctaaagcgaggagaaccataaaaacaactatatggagagaaaaacagagaaaaaaaactctgatggcatcaagtccaccactactgcaagcagatatttccaatggcttttcgtagacctgccacaaacgccaacagccaatctatctatctattatattattaaagaaatagaaaaaagagcctccacgttcgctctcatggcctagaaattctcacattaatcggagaaaaagaaaaagcagagtctatatagaaatacaatttaaaaataacgaaaattcggaattaaaaaaataaggaatattagaagaggagactagagtagttattacacattagtagtttcgtaaagttattgcaaaatttaaaattatgttgtcattgtaatatattttaataatataatgagaaaacatatatgctattatatgagagaaaatataatgatgttagccgagcaatctgcgcgggccaccatgctagttatctttggatatcacaattttttacaagcgtgcaccttaaccacgcgtataaaaaatgatttttcatacgacctccttaataaggcgaaaaaatcgatttttttcaagcatgtacttaaagacttaaaacaattgactacacaagatatttgagagtcccattggtcggtctaataagctaaagaaaaactaaaatttaaattttttaacttgattttaagatatttttaacgtaattttttttagcactgactcttaagtcgctaccaataaatatacaaaagttttacctacaaattaaattttattccctattaaatgttttggcttattagagaatatgggcaaccgatgagacactgaaagaaatggtaaaagaaaaaagtgttttggcctcgatcctcatttgcaaaatacaatgataaagtcatcgtcgttgccacgacaatctagtgtcgtggttggatcccccaagccctgtcgggactggcggaactgccaggtcatcatcgtttcgccggtcccaacgaccgtggtagattgaactgcttcctaggcccacgaccattaattcgccgcctcccaagcatgtcgccaccatcgattcgcggcacttggcgaccgccgacgtagtatccatcaggctctgctgcgcctgtcatcgatccaccacttcccaagccggcctccatcgatctatcgcacctggcctccgaggacgttggatgcgccactcccaggtcccatggatgcctcctcttcatatcaccaaccgatccgtaggttagagagaggagaggggagaggtggttgctcctattgttgagattgacatttgagacggatgggggggagctagtgaggagaggagagggagagaggaccggtggattcgatgtgtgggagagggctggggatttggtgcgtgtcactacccttgcgtgcacctagcccgattttatatcaatagttgtttatttctagcaggcagacgtgtattttcacgtgttgttgtctaagagacccgcatgtaaaaatggatctatttttacaggtggtcctcgtaagacgaacacctacaagaaattattttcactagcgggtcttgacagggatcccctatgtatttttgcaggtggatttgctttttttaaaaaaaaacacatcaactttattaagcaagaatagaattaggggataaaccctgttacataaccaaggataaaaattgaaagcaaaagagccacccctgagaagggagggttaactgaactacagaagcaatcttcctgaaataacctaacagcagaaaaaggagcaagtcaacagggatctgtggcgaagccgcgacgactgctatcctgggcctcaaaagatgtgcactccgcttggcaaaccgttaatccccatcggctgcatctacggaaacggcacaagactgaggtttgttgctgagccgtagattttggtgtgtgcgtcaccggactcagcgaaggatccccatgaggctcatcattgaatctaaggagctctaacatcgaccctgtcaaccgaaattgcgcaggtggtccgagctcaacccgaatgacaaacccggtatggtttcttctgttagggaacaacaggaagggtgaatccgaagagcaaccaaccttcaacgatggagcacttgaatggctgcaaatcaacttctgtcttgctgagatgatggagatggttgaggaagaggtggatttgctttcagcccgcgtgcaaaagtcaagagatcatcgggtgtccgcgaaaaccatttgttatagtgtattaagacccgacatagatcatcactgcaccaagctcatcacaatagacaagcaactctaacttattatgacggacaactgtctcaaaccacccaaatatcccaaccgtggagtagaaacttcaaagtgaagtccaccttccatagagaatacaaaaaaaaaaagagaatacaacatcgatctaggatgctggcaacacccgaacactgaacctgttatttacccgaagagagaaccaggccacttaaaactcctccatcatcgctaacaccagtcagagactgggaaaagctagctttcacccgcctaccacaattgcttcgtctgaagtgtagcaataatatgtccctgtttggttaactgatcagtgccaaactttgtctcgatcacgtgtgactagctagcaagtttgatcaatcgaattgaagttaattagcgtttcatgtaacagatacgatgtgccacacggtcttaggctgcgtttgacgtaacgatttggtagagtaacttggtggcacgtgaaataagataaattgttagtatataattaattgagcattaattattattaacttaacaataaactattttttttaaaaaaaatgcatcatgtcgtttagcggtttggaaaacatactatcagaaaggaagtaagttgtcgttttgtgtagctggaaagaactcggtcttatccaataggctcatacgtcgtagacacgttgctttgacgcaacttaacacgagtgtcttggcacattatacagaagtttgtgtggcaaagtgtggagatgtcattaaagcagagtcctaatcttgggatcgatggaatatatatggcgatgagatcgactagctagtgacaccatcttgcagtgaatgaccgatggtgatcttcatcaaagatcacaattgggaccaagatactgtggtccgaaattaagcaggaaaatcacttgccaacggacaaattattttatttaagcaagaaatttcaatccattcctgcctaacaactccacccaacactgcaatctgcacttatgcagtggagatgcgacgtggctgcaatcataaagctttattgtagctaggggtcagctttgtgattaagcccatggttgtctgtagcatgggcacaccatggttgctaggatgggactcaactattcattccccttttgcgtcaaaaagaaaaaaaaatccagtcaaatacttggaccacaataaagtgtacatgaatataaaaaatggatttttcttttacactttaaagtgtaaaaactccaagtatttgaaatactaactactactagtaaagtgtaaacactttatataattaaaaaagagaaaaagaaaaagaataatgggcagtagacgggcccctttggttggcccagtccagtagtacaggtagaaactaaagcccattccattgaacaagaaggagtagaaaagcaaaattgaaggagaaacgtacgagcgtgcgaattggatgcagctgagaaggtgttcgtccgctgcatccgcatccaatccttcccggcgaccgaataccggccgggaaacctccaaaatcgagctggccggcaaggccgaatttcgctacatcggtttcatctatttaagttgagtaagagggaatcatgcgctggactttgaactatgtaatgaacttcattatcattattatgacgatgaactttaaggttgtggagtatgtaggactttagatctgatcgttgttgatggctaaacatatagtttctcaatatttattcatcaggacaatatttcgttagaatattctactagtgaaaaattttagtcttctcaactgttcattagtaccaactaggaaggtggcccgcgcgtatgcgcgggcacttatattattgaaaggtaagatttttattgtttgttcaaagattttgtctcatagattaagggaaaactaaagttcggataatgtaattttataataatttaaggtttctatttttcttaaagtatcttaaaaatccattcacaaatttttaagtaggagatggattaagtacttacgacttttgaatcatgttattttctcgagtaaataataaactatatattgcttgtagtatggctacaaattaaaaatgtgagagcaagatactcaaaattcttgtgattaaatcgtctcatgaaggcgcatgatatagtaagaaagagagggaagcgtatacatgaagaaaagaagaaagggaaaaatgataaaagggaggggaagcataggtacccacgcgtacgtaggtgcgtatcgaaggtggagaggtgggaccttgtagtatttagtttcttctaagatcaatttaatctaatggtttataatattgaacccaccgatttaagtgaaaatcaagtaatagataatttgctttttttcttagaatttctaatatgttctctaatttattagagcaccaagtggtagcttgagggtatttgaaattttaatggacttaccacatgtaatgagaatattaacatgtaatatatatgtatgggatatatgttaatattcattctagctttgtccatgtttatatacatgtagagagaaattaaatatgttgctagcaaaccattagatgtctaattaatagcaaataattttgacacatatttgcaattgttcatagtagctcttaagattcatgttaccactttgattattcgttgatcaccatgattcgcacgaaaaaaatatgtactacttagggtttaggacaacagaaattgatgaattatctgatttatgtgatagctatttgagattataaacaaatgaattaacttctaaatagttaaaaagtcgtttaagaaaagcaccatttataaacttggaaaagcgtggagcgtgcaaatgaaaatgcaaaagatggaatcaataaaaaaaatagggccttaaaactcccttattactcttatcctagtacgaattctattaatatgtgttaatattatgctgaaaatagggaggagattggagaggaatgaatagcatacaactcgagccagagatgggttggcagtgtaacagtgttatgcacatgtgattggagagggaggtggaggggacattgtttttctaatgtttctaaataatgtaggtgagaactcgttgttttctcattctaaaaatctttaacagttgacatatatgtggtggcttaagattttttattaacaaaagcggtagcgttgcagcgatcgtgatcacctaagatgcctcagacacgatgctttgtcacacgtgcgaaaggcaaaggtgtagacgtgcattgtgcagcggaccaaaaagagaactttggacactttagttattaacaatagatatgttgatttaaataatgggtccaccggttctagtgtaaatgtaaattagttaatatatattttaaattgttaatttaatgggtacacaatatgatggtgtagaatttattttaaaatagtacattatttgagaataatagtccaaattaataaaaaaaaagatcccatgatttaaataatgggtccatctgtttaagtgcacgtataattagttaatatagatcttaaattatttatttgataagtacacattataattgtgtaaactttattttaaaatagtgtattatttgaaaataatagtacaaattaatgagtacaccggtttaattggaaattatattgatttaatgggtaaacatataatggtgtaaattttattttcaaagattgtagagctaatttagttaactgtgtttataaagaattatatgatggtatattctttgtttgtaaattatgtttatttagaatatatatatcaattatataaatggaaaaaagaagagagaaaaaggaagaaataattggagggaggcgtacatactacataccaaaataattggaaggaggcgtacgtactgcatacccatgtacgtacgtgagttaggtgggacccatagtatttggtttattttaggatcaattttatctaacggtgtataatattggacccaccaatttaagtgaaaatcaaggggtagatgttttgcttttttcttagaatttacaggattttctctaatttattagagcgccatgtggtaacttgagagcgtttgtaggaagtttaatggacttttagtatataataatagaagatagataatagatagatagattctacctccgtcctaaaataatttaaaataagtacagtgggtatccgtatctaacgtttgaccgttcgttttatttaaataatttgtagaaaaactaaaaaaattagtcacacataaaataatattcatattttatcatctaataacaataaaaatactaattataaaaaaattttaaataagacgaacggttaaacgttgcacattaaccgtgtaaaattacacttattttaaaacggaaggagtactggtcctaatgaacagttgagaagactaaaaacaatctgctacattctctcattcaaagctagcagtgtattcatttatgattatgaggtggagtagctacctacagtttatagaatattgtccatatatattgaaattttcttaactaagggtgcatttgggaggaaaagctcataacttttattttctcatttttcatgtgcacatttttaaactattaaacattacttttttaaaaaaaatatagtaaagttgctttaaaaataattttaatttttttttattttttagctaatacttaattaattgtgtgttaatgtgtcgctttgttttatatggggaagaagttttcaaactttacatttgaacacagcctaaggcggctgtgatctaaagagaagctggggtgagatactctatcattttttgtgagcatactttttaaactgctaaacagtatatttttaataaaaaatatacaaaagttttgacaaatcaaatttccaagtttacaatagctaatactccatttaattaattatgcttgttttcgacgttaacaaaagcgcagccccaacctccattttaaacgtattgtatactaatttagtataggttgaccggcggttggtgtactaatattgcttgtttcaccggtgaaaaataacaggcaaaggtcgcaaccgtcacagcaacctatatatgaaatgaatgcatatatatatatatcgtggaaaatgttaagaaatgcactctataaactaaagtgagtggagtgaagtgacaagcagctagcccatgcgttggttcataaattaatattgcggccccgagggccacgagctgcggactccacacgaaaatgaaagtgatgcatgcatgatatctcactcagattcagaatgcatgcatggcagctaacctagctaagaaattaatctttctttaatttagacaacaaaagaaagagtgaaggagctgaacaaaacaaagaaaacgatcgaggagcaatatttgcagtgacaaagaaaatccaaggtggttgttaattaagaaagtggaaactacatataattgaagagagatcatatctagtggtaggaaggaattgaaggtcgccataagcaggcagttggttagttggggatacgtacaggtacacacacttccttccttgaatcatgcaagtatggcaactacagatgtacctctgcttccgggaaaaaacgagcaattgccaggtcaatcagcaattacaatcgcaaatatatgaaagcattgaattgatgtcaaatggattagcaagtcatcaggatcggagtacagtagcagtatgtaatgggtagttaatcatcatacatatgtgtcaacgttgtcatctcacattaacatcctgcaaatatggagggtttgcctctgtcctattttaagtgcagttgatcttatttaaatttttttattaatatttttattattattggatgataaaatatgactagtattctatgtgtggcttattttttaaaatttgtttataaattttttaaataagacgaacggtcaaatattaaaaaaaaacccacaatcatacttaaaattagactgatggaacagcatcttgttggctacgccctcctactcctgccggccttcaattatttgtccatgagttcctgagtagcattgctaaattactgttactcctctactgtaggtagatcctctgctcgtctattcattcccattcatgtcatgcccccataaatacttgtatacgtacgtacgtacgtggcacactcgtatacatacatatacgtacgcacgcatatatcatacgtgaaattatttggatttggaggtgagatatactagtccagtaggtttgtaagtttgtagttgtagtatataaatggcaggtggaggcagggatgagccggcgcccggccggccggagacctcttcttcttcatccatcctttctttctttctttctttcctaggcctaatcttacataaattattcacacggacaaatctagctaagcacaaggtatgccgccggcgccgtcgcaggagcaaactaagctggcgccggagaagcagcagcacatctccggccatggcgagcaagccgtccggtaccatggatggaaggtcatgccgtacgtcataggtatgtactactgtatcttctagctcctccatggttatatatatatatatatatatcctcccggcctccctagctcttaattagctcctcaccctcagctctgttcttctcctttaactctctccggtttggatcctactcttctcttctttgagcatgcatgtactgtatgtttttattttgaacacaaaaaaaagtaagatggaaatggacatccaacatggctgcagctagctatagcagatgatgacctcctgtagtttagtgaagtgcatagtctcctacatcactagctagatctcttccttttagttagttgctggctccaaatctcagctatcaattcatacgcaatttgtgcgcatatatgcttcagctcgctggatttgcattattgcttcatccatacaccaaagtacacacttcctcttttttttccatctcttttttcccaattaaacgtcaatgaaaaaataaaagcttagtagagaagttagatggtaaatgtggtgaagttatacaatcaaggaagcaagttagtccaaaggcaaccgatgaagcaggcagatggagaggagccatggaggtagaaagaagaagaaaagaagaagaagaaagcaagaaagaagatagacaagatagaagcactgtgcactgcagctgcacatgcctgatggcaccaccaacaatcaattgcattaaagttacccaactgcactacgctagggaagtgtcctcttctcagcccagcccagcgtggtagtaccaatctcagcacctctctctttttcgttttgctttttcaaccacctactggtttcaaactgatttttcttttctttccccccattgaaaccgtttcaattccagtagaagtagggaaagggttcatatgcgttccaaagcacccccaaaaaattatcatctgcacggtgcagtttttaagaccttggaaaacaattatcatttgcatagaggagtatttctctactattatgtcatccatatttaagttggtttttaagttttttcgtttttggaaatacatatccgtgtttgagttgtattttaagtttgttttctttaattgaagatgttttttgtggtattttggtatgccatctgtatttgagccggtttttaagcttgtttccttttggaagcataaaaggtgtcgtataacaaatcttttaaaaaaacttgcatgctaacttgagatgaaatatggactaataattgcaactcatgattttctgaaaaaatatcaagagaattcctaaagtaaattttatcctaactaaaacgtatagcaataataaaattttaaaaaaatatttacatgttgtaatgcacggacattttttctagtcaaacatatataaaagaattactgacaactccctattcttttaaaattatttaccggattatgaaataaattattcgctgcacacttcaatttttctataaacttttttctactgcattatttagaccacttattactaaacggaggagtattttgttaagtttatttattacaatatttcatccatccaaataataagtaaataatgtgcgataattaattaatccactcactaatctatatcaaatggggcctttaagatgatgccatgtctagtagatcttataataccattttgcaaataataatttgtaaataaaaaaagagaaaagtacgaattacccctgaactattggatgagtatgaataacaccactaaactcgaaaatcaaacatcgctcaccccgaactttcaataccggacaagaaaccccctagcactattgcgagcagtttagagttcgtatagcacacgtggcagtccagttagtaatttttttctaaaaaaaatagcgggcccacttgtcagaatccccacatctatttctctctcttctccctctcgttctaaagagcgcggcggcggtgggccggccacgcgtttctgaaggagagggggaagagaaagagggtgtggattctgtcaagttggcatgctattttttagaaaaatattgctgagtggactgtgccacgtgtaatattcgaactccaaaccgctcgcaacattgttcccggggagggtgggggaggggggtttcttgttcggttttgaaagtttgaggtgagcgatgtgtggttttcaactttagaggtgttattcgtactcacccaatagttagggggtaattcttacttttctcttaaaaaaaagggatggagtttgacacgagacgatggatcagggaacgagacatgcgaaaggctggggacgatcggcacgacggcgaacctgctggtgtacctcaccaccgtcttccacatccccagcgccgccgccgccaccctcctcaacgtcttctccggtacctccaacctcgcccctctcctcggcgccttcctctgcgacgcctacctcggccgctacgccaccctcgccgccgcctccatcgcctccttcctcggcatgcttgtgctcaccctcaccgccgccatcccatctctccaccccccaccttgtgcctcctcctcgtccacgtcgtgccagggccccacgcaccgccagctcgccgcgctcctcgcctccttcgccttcctcgtcgtcggcgccggcggcatccgcccctgcaacctcgccttcggcgccgaccagttcgacccggccaccgccgcgggccgccgcggcatcgccagcttcttcaactggtactacttcaccttcaccatcgccatgatggtgtccgccacgctcatcatctacctccagagcaacatcaactgggccatcggcctcgccgtgcccaccgcgctcatggccctctcctgcgcgctcttcttcatgggcacccgcctctacgtccgcgtccgccccgagggcagccccttcaccagcttcgcccaggtgctcgtcgccgccgcccgcaagaggcgcctccctgccccggcgtctcctgccgacgacctgttcgatccgccgcaccggagcaagctggtggccaagatcaagcacacggaccagttccggtggctggacaaggccgcggtggtgacggcggaggacgcggtggtggacggcatgagcgcggcggcggcgacccgtggcggctgtgcacggtgcagcaggtggaggaggtgaaggtgcttgcgcggatgatcccggtgtggtcgtcgtcgatcgtgtactacgtgatgctgacgcagctgggcacgtacacggtgttccaggtgatgcagtcgga

SEQ ID NO: 8783 - DNA, 9591 bp, Oryza sativa
cccagcccaattctactggggtccacacactcgggttggtacaagctgttgggccgcttttcacgtgtcgatcgccgcaacaagggttgctttgaatcttgtctcctgccttgctcttcgccttcctgagatggtcctgaagtagtgcatgccatgacattcccccttccttgaaacgaagctgttcccaagcttttgtctgaggaaaacgttgttgtagttcttgtagattttcccatgtcaccacagcagagtctggacctgaccatcggattagaacctgctccaccatcttagcacctttatgcacagatcgacgatctatcacctgctgaggaacaggagtaacagcatctgcatcatccaggattggcaatttggaatgaacttgatctgatggagctactgccttattgagttgtgagacatgaatcaccggatgaataagacaggaagggggtagatcaagacggtaggccactgatcccaccttagcaagcacctggaatggtccatagaaacgaaatgacaacttcctattggtgcaagtgaccacagactgctgcacaaaaggttggagtttcatatatacccagtcaccaacagcaaacgaacgctcggaatgcttggtatccgcctgatgcttcatgcgcatttgtgctcttagtaaatgctcacgaataagagtctgcatcttgtctctctcatgaagccaatctgataattccggtgcagaacatgcagcagaggccgtcaacccaaaataacgaggtttatgaccataaagaacttcaaatggagtagtacccagcgaagagtggaaagatgtattataccaatattccgcgagggctaaccaacggctccattgtgaaggactagcatgcacaaagcatctcaaaaaggttttgagacactgattcatcctttcagtttgcctatcggattgtggatggtaagaggaactcattctcaactgagtgcctgcaagtctgaacaaagtagtccacaggttactagtgaagatacggtcctgatcagagatgatagcctcaggcaatccatgtaatcgatgaatgtgttgcatatatgcctcagcaacctccaaagttgtaaatgggtgtgccaaagccacaaagtgtgcatacttcgagaatttatccaccactaccaagatgcaattaaaggtagaagaccgaggcaaaccttcaatgaagtctaaagagacaatttgccaagattgctctggaaccggtaatggctgcaacatcccaggatacttcacatgctctcctttggcctgttgacatatggtacaatgttgaatgaacttcactacatcagatcgcagaccaatccaagcaaataactgtttaatcctttgataagtcatagtaatgccagaatgtcccccaatggcagctgtatgcaagtttgctaaaatctttcgctggacaataggattatttcctatccacattttatccttaaaatagagaagaccatttttcaaagtgaaatctgggattgcagaattattgatacataaggtttgaaccttactaagagagtcagagtcctgggcatagccttcaatcacttcttgagtccattctggaatacaaactgagagagctgacagcaccacagtttctttatcaggataccgagacaaggcatcagctgcactattttcagaacctttcttatagagaattttgtactgaagaccaagcagtttggtgagtgctttgtgttgccaaggtgtagtgagacgctgttcatctaagaaagccaagctgcggtggtcagtacgaattgaaaactcggcatgttgcaagtacggtctccaatgatcgattgctagcataattgccaaactttccttctcataagtggacaatcccaaatgtcgaggacccaacgccttactaaggaaagccacaggatgatttctttgcattaaaactgcacctattcccttatccgatgcatcagtttcaaccacaaaaggaatagagaaatctggcagtgcaaggaccggtgccgacacaagtgtgtgcttaagggtgaggaaagcttcattagtcattgaggtccaagcaaacaactgacctttacgcaaaagattagtaagaggcttactgatgatgccgaaattcttgacaaatttgcggtagtaccctgccaagcccagaaaactgcgcaactccttgaccgattgcggtgtaggccaatctctaactgctgcaattttgtcagtttctgtggccactccatttggaccaatgctatgccccaagtacgataacttttgttgggcaaatgagcatttactctgtttaaccttcaaaccatgtttgttcagaatctgaaaaactgcccgaagatgatggatatgatcttctagagttctgctgtagatcaatatgtcatcgacaaaaaccaacacacaacgtcgaagtaatgttgacaggatgctattcattattccctgaaatgttgctggtgcactggtcagtccgaacggtagcactctaaactcgaagtgcccatggtgagtacggaaggcagtcttatgctcatcctctactttcattctgatttgatgatatacagcgcgtaaatctaactttgtaaaccattgtgcacctgacagttcatccaacaactcatcaattattggcaaagggcatttgttcttcactgtgatggcgtttaggtgtctgtaatccacacaaaaatgccaagatccgtctttcttcttcactagtaagactggagaggcaaagggactagtgttgtgttgtatgatgccattttgcaacatttcagtgacctgagcttctatttcatcctttttgtgccggtgtgtaacgatatggtctcacattgatcggttgtgccccaggtagcaatggtatagagtgatcaaagggtcttgtgggaggtaacccttttggttcagcaaaaactgtagtaaactcctgcattagttcctgtacaggaactggaatggtctcaggctcaacatcatccgtgattgaacaaagttgaaccatatgtgccacagccttgcgttgttggaactgttgcatttcatttgccgaaagaattttgcaatgagccaattctgaatgcaccccttgcagtgtgacggtagttccctgcaagcttaaagtgatagttttcagagaccaatccactgacattggactgtgtttcattagccaatccattcccaagatcatgtcatagctggttataggtaaaacccttagagttgtctgaaatttatgaccctgcacttgccattcacagtttggaataattgctccacaacacaatgtctctccattcgccactcggactgacaaccttctagagagaggctgtattcctgtcaatccttcagctatctgtgaactaatgaagctgacagaactgccggaatccactaaaaccaataactccttaccctgtaattgccccaacattcgcatggttccatctggttcagtcccttgtactgcttgtaaggaaatggccataagttccctagtcaaagaaccattctgtccagcattctctgattcaacatgactgtcttcttctaagaacagacatagtaactcttgtaccacattcaattgcactgatgaagcacacttatgatttggagaccacttctcagcacagacataacacaacccttgagctcgccgataagatttcagagcagacactttttcagttaggcttgtcggactgcgaacagtatctgaactgcgtctctcatctgcacgattactgacaggcactccccctccttttcctggtggtaatggtaatggccaagccccttttccattaatcttcagagaagagcttccatctgatttcttaaactctctgacagtggtaggtggagaattttccatcacttcttcctgcaacaaggcaacagcaagggcagactcgaggtccttgggacgttgtaacaaaactgcatttctaatctccctccttaaccctttagtaaatctatgagtcaagtactttgagctaagagttgggtcataaactaacagttgattcatcaattcatcaaagcgttcataaaactcccaaactgtaccattctgttttatgctatccatttgcctaatcaaattctcatgttgatccctatcaaattttgcagaaacagcagcacaaaaatcttcccacattggaaatctcaaatgagctctagaagatctcaaccaagatgctgctcgtcctaggaagtaaatggttgctatcctcacccataaccccgggaaagtattgttaacatcaaaatagtgctcacacttcatcctccactcctgagagtctgaaccatcaaattttgggaagtctaacttaggcacccgatgattgtactgtctatcaccatgctcagaatcaaattccccagactcccaacctcccccatcaaatttagaagtaaaattcggggtgaaatcaatcgtacccttgcccggggctggaccctgagtcgaactgaccaccggtgtccttccccggaaattcatctgaacgtggtggcctgcagcccatttgcttcctccttcggctgcggcgagttgggtggaagtcggcggcgtcggaagccgcgccgccttcgcctccgatggagtcggcagcagcggcgccttcctttcctcacccgtcgatgggactcaaggggaagacgcagccggtgcagattgctgagatttgccgacgaggtcgagttactgacgaagttcgctgacttcctcgcgcaacccctgaattgctgattccacttgaggtctccatccactcactcccgcatccaacttcaccacggctgcttgcgtctccgcctgcttggtgttgagcgatgcgagggattcctggatgtcgccgaggattttgccgaagtccagattctgcttttccatcgcctccacttgcaattgcaacctagatgtatagcgtggcttctccaggatgattgctctgataccaaattgttacgtctctgaagaatttgtgccacaacaagggaagaaattgaggatttagggagagaattgagagtttggggaagaacagctaagaacaggtagaggcagcaatagaacagggagagatttgaattgatttccgaatatttgtttctacaatgtttgattcgttctcttccctgccggtctcttatagcgatgagctatggacctctctccctcactgtggcccagcccaattctactgggtccacacactcggttggtacaagctgttgggccgcttttcacgtgtcgatcgccgcaacaagggttgctttgaatcttgtctcctgccttgctcttcgccttcctgagatggtcctgaagtagtgcatgccgtgacaataatactttaaaaaatcaaataaaatctatttttaaaaatttcaataattaatatttagttaataatcatgtttctcgttttaggtacagttaatcggtaaaaataatctacaaaagaagtcggccttagaatgatttacatactggagtactagtagtaattctgctgttaggaggcccaaggtgtgtttagtttgagaaaagaaaatttttgagtgccacatcggatgtttgatcggatgtcggaagtggtttttggacacgaatgaaaaaactaatttcatatctcgcctggaaactgcgaggaatttattaagcctaaataatccgtcattagtacatatgggttattgtagcacttatgactaatcataaactaattagactcaaaagattcctctcgcgatttccatgtaaactgtgtaattaaattttttaatctatatttaatgctgcatgtatgtgtttaaagattcgatgcgacttttttagaaaaaaaaattgggaactactcaaggcccagtttgtttatctgtatggaggttattgatgcagggttgcagacgacttgtcttttatttatctctcaccaccaagcaaaaatcaaagatctgaaatactttttacagttttactccactgctagtgtggtgtgcaggatgaacaagcaagaagccaagaagaggataggagaggagaagaaggcaaagacatggaaaaagatggggagaatcggagcagaaaaaagccggggattgggggctgccatgtcgacccgccattgctccacttcctctgcctctgcgtctgggagtgggaccccactcgatcgatcacttcccgcctcctcgcctctctctctctctctctttctctgctctctctgcacttgcagagttgcagcagagaagcgcttcttcttcttcttcttcttcttcttcaattcttggaccattcttcccttctctcctcctttccccaacccaaacacaacccagccgcagcagcaacaaacgaaaccctagcctagccaggacggcatcatgtcgctgcccgacctcttcgagaagcttctcggcgacggtattgcgctgcattcatcatgtcttcttctcttcattctttattcttaatctaatctcttcctcctcctcctcgatccctttgcctgccattcacgcgcagatcaggacagctggcccgcggaggccaacttgctcctcgccgcccacgacggcaacctccgccgcatcaagggtacacttctcttcctcgccacccctgaacacctgtacttgtacatgcaagaaaacaaaacaaaaaaaaaaatctttttttaaaatctttttcgggcttcttgattccgctcatggaagtgatagaacgagacttgcttgcttgctgttgtgctcaatcagagatcgccgcgacgctggacgacgacggggaggggatcgcggccaccgtggcgcgcacggccttccacggcatgaacgcgctgcacgccgccagaagcctgcacgtctaccgctacttgctcgaggtggccaacatggacgtcaacaagccggacaccactccaggtgcatgtcaagattcatcctcctcttctgcttccttttgtcctcttcgccagctaggagtactagctagctatttcagctggatgtctcactgttattgtgaatctggttttcattgccttgccacgctaggtaggaagactcccctcgagcgagccattgccggtggggacctgccctctgtcaggtatctcattgatcatggtgctgatatccatcatgaacgtgaaggaaacatcacttttcttcattcagctgcaaagaaaggtataaacaggggaaaccaatcctcagatttagttcaacttcttctttttctttttttgtttttattacaaaagaacaatctgagttatgctgtactacccggcatactatgtgtcattcggaatactgcttcaacccaatcccgttcagtggaacagcattatgcccttggatttattaggggaatatcctatcttcttgtaggattccctgctacatccaatctgcattctgtcatgatgagcagccttacgttgaatgtggagaaaaatgcagacaatactgtaagggcctcattgtttgccctatggcttataagctaaagccaaaatctgaactttaaaacttgatttttaatttgattttgatgttttttttttcaacatagtttttttttcagctttgacttttaagtcgctaagaatatatatacaaaagtttttttcgcacaacattttttaattgctaataagccgttacggcttataataagttgtaagcaactgatggggaccttagcgtctagcaaatgtacaacaaagcaagcctaatgcagcatttcctgacgcattttgtttttacaggtgttgtttaagtgatatagaccttgctgatgtacacttttcatgttcatcagcctatacatattaattcatcataagaaaatgttaaaatatatcattcacatcatcatagattatctgcactttaccattcatcctagtataactgttggactgtttctacttcataaacctcatatttatttatcaacctgctgccagggtttctttttgtgtgtgtgtgttttgttctagccactgaaacatgttcctccaagagtgaactgctctttttgtgtgttatttaggactggtttgtctttttcttttattatcctccagttaagcagttaagtgttaaattgcctctttgctctggcttctcaaacttgtctgcccccaaattgtttctctcatacatcagtgaccttcaatttttttatgtgattgttcagggaggactgaaatagtaaaattgctgctttctagaggagctcatgttgatggcaaatcagatcatgggacacctctgcattttgctgctattaaaggatatgaaagtactgtgaagattttgttggagcaccaagcagatgtacgatgcttatacttttcttatgttggggcttactatttcctcccactgttccatccttactctcattttggttattgatgtgtgagcactgagctagcccaggtctggctgagccgtgatccacacattaacaactactccactgaataatcaataggaacaacggaagaaacacaaacaactttcttaaattatctctttctctaggaactgtcaaatgtatgataatacatttctttcttttccagcccaacaaggttatgccttcttctcaagcaacacctttatctgcggcgttattcactacttccttaccttgtgtgaagctattgatccaggtacaatattttctcctttggactgctgcaataggataaggctaaataactgatactatatatggctagagctgttataatcatcaagttatgtgaagaaaatgtataatcattttgtattatacataaacatttgtaggctggagctgatgtaaatgctacaaacaaccccctggcgagagctgcagggagtggattaactgaagctataaagttgttgttgaaggctggagcaaacccaaattgtcctgacacggtgagccttctgttttgcttatcacaccatcactatcagcagattgagtttgtagcttcaatgattttaggcctgtggcattgatatgcatcactagtatggaacaatgaaatgtattcctgaaaattcacatatgtggcacacgcttatttgtaaaagatactaggcaaaattggttatagagcatcgaaagttcacagtttttggttataggaaattcttttttctttcggaaacaagattatgcaaaagatttggagcatttgagcatcagttgaatagtgtgatttgatttgtgagacatgtgtacaccattctgtggtgtgtttcgcagaccactatcatctgcttctagagttgacacaagcctgctaaattccctgttttcattttcatttagctttttttgttggtcaggtgcatagagataattaatagtcggtgagcataatgctaattggtcttttctaatggcaacatgtttaaaaagtttaggacaacaagaactgatggtagcaattttgaaaaaattattgataaaacaagtactattccatatt

SEQ ID NO: 8784 - DNA, 16681 bp, Oryza sativa
tctcaacgaaagcattttgattattctttttggattcttttgttttttgttcttgttgtgatcggctggctgccacatcttcttcatctgattgagctcaactgcttgagcatccatggccatggcggctgatggtgatcactgccgcctccccgacgactccctcttcctcggcttcgattgctccacgcagtaaccaatttactcccaaccaaatctaatcctaatcctgtgcttgctaatgctaattctagttctaatgctaatggtggtaggtcgctgaaagccacggtgctggacgccggcctcaccgccgtcgcccacgacgccgtccacttcgactccgacctgccgcactacgccacccatggcggcgtcctccgggacccatccggcggcgacccgggccgcgtcgtgtcgccgccgctcatgtgggccgaggcgctggacctgctgctcgccaggctcgcgcccagggtggactacgcccgcgtcgccgccgtctccggcggcgcgcagcagcacggcagcgtctactggaagcgcggcgcggcggcggtgctcgcgtccctcgacccggccaggggcctggcaccgcagctcgccgcggcgctcgccacgacggagtcgccggtgtggatggacagcagcacggcggcgcagtgccgggaggtggaggcggcggtcggcggcgcgctggagctggccaggatgaccgggtgccgcgcgcacgagcggtgcacaggcccgcagatcaggaagatgtaccaggcgaggcggcgcgtgtacgacgacaccgagaggatctcgctcgtgagctcgttcatggcgtcgctgctcgtcggcggctacgcctgcatcgacgagaccgacggcgcggggatgaacttgatggacatcaccacgcgcgagttgcgcagggacgcccttgaggtttgctgcttgcaacacacacattttcagactgagaaatgcaatctttttttttttgtttttggcaactgcttctgatgcatttcaatttacaagtttgtaggctactgctcctgatttagaagacaagattgggaagctagcaccggcgcatgctgttgcaggaactttatctccttatttcgttcagaggtagccattgatcaatctgttttcctccccttttacagtgtctgctaaactggtgtttgaaaaaggagttatgttatagtgaacaacatcatcaaactacaagattgaattattatatgtataaactaacttcagacacttttgcattggggtctgactcgacgaattactgatatgaatatgcttcatttttcatcagatttcagttttcaagcaactgtctagttgttcagtggtcaggggacaaccccaacagccttgcaggtatataagttctcccaattttcctactaatatcttacaacatatggcatgtctgtttggtcaaatcaaaagatgatctgattcaaagcatatgccagaaactttggtcaaaagaatattttcggatcactcctatgtgattatgcaggtttaactttgagcgatcctggtgatctagcaatcagtcttgggacaagtgatacagtaatcatctatcaccttgtttttacaaaatctgctccatttgttttcaagggcaatggtaccaacaatgtctgggaacagatacattagaacctagttcttatctaccaataaggcaataacactaactgctgattgaaccttgttttacttgtacttacactgaatacaggattcacaaataaaaaacaactcacaacacaaagttgttctgtacatctatgaaccatcgggccctgtttggcaaatgagttatgggaggttggattgggaaacagaaataataaatgaggcgaaaagaaagaatggctaggattgaattttaccctttggtgtggtgggaaatcttttcccaaacccatttgccaaacaagcccttgttgcttattctgatgcctttatggtccttcaggtttttgggataactgatttacctgaaccatccctggatgggaacatcctccctaacccagtggaccccaagacatatatggttatgctttgctacaaaaatggctctctaacacgggaaggtaccatttggattctttttatctcactgtttaccattactaatgcctatatttttgtttttgaaactataaatgcttatatttttcaccagatgtccgcaatcgttatgctgacgggtcatgggatgtgttcaacaagcatttggagaatacagctcctttaaatggtacaccaatatagttattctttcctttctattttactaaaaggatgccagcccatatatttctagaacaaacaggctagctgattggcactagaaatcacaaacagcataaggatattaaactctgttttataaagcttgtacattttggcaagatgataagccagtataattatgctttaaatcccatcaatgtttttttttgaactgtagatcatccaattgatgtttagccagttactatcacacagttgcctttcctcccattcatgatagttacttgcgttgaccacataaaggtagctttcctgaggattcttgaatccccctttttctttctttgtaccaggaagaaaattgggatattactacaatgagcctgagattctgccaccacttccaggttatttctgaccttacatttcatttcccttcaacgtgtagtttttatgtcattactcatgtgctatgcttataaatctgtagttgggtttcaccgttacgttgtcagctcctcagccagtggatctttagatgagatggtggagcatcagataaaccagtttgatcctccttcagaagtacggggacttccataactggtcgttaaacgatctaataaactttccttcaggctgttcactaacagttgtgatataggtccgtgcaataatagaagggcagttcctgtccatgaggggccatgctgaaaggtgtggtctgccagtgcctccaaagcggattatagcgaccggtggagcatcgtcgaaccagatcattctcaagacgatggcatccatttttggctgctcggtttacaccgtccaaagaccaggtatatataagacatgtgcatcacatatggattcgaattaatctgctgttatcatgttttccatctggttgtgagcataattgtgtcctttacatagcaatgctcaattgatacagactctgcctcactgggtgctgctcttagagcagcccatgggtggatttgcaaccagaaaggcaagtttgtgcctgtttcatgtctgcactcggacagactgaatagaacatcactaagcattaagctggctgctccatttggagactcggaggaggacattgaccttctgaacaactacacgttgttgatgaagaaaaggctggagattgaacagaagcttgtcgagaagtttggtcgacattcatgaagcatttgtgtatttgtgctagaacttaatgcggcggtcccaaagtctcaacagtggactgttctccagcagagtagttcggcatttctccgattattgtcgccttataaacaaaacaaatagaaaacaatgggctactgtaaacagagattgaatcaaaagtaaagtagttgtacaatatagataccaggttacagttgtcatgaaaattatgagttaggtcagcagtcacattttgtgaagtgtttttattcaatatccaatggatcgtcaaattcagaccaaattctgaatcagatgttgcctctcttactctttttggaaatgctgtccttgtacttccccattccagtggagaaccatacttagcactgtcctgaacaatatcacctttgtcgatatgtagtctgactatgggttgaaaacttgaaatccaatgagtatgtttcttgaccttttcttgtcttactgttgataaatcaccaagtcaaatggcatgcatgttctgctggtgaatggcatcctactcaacatgaacatggtgaggctacaccaaggatggccaccaaatttgcaaaatctactagtgagctactgctatttaacactgcatgcacttgtgccacttactgaattagtggattcttcttatagacaccacagtccagcatacgtggccactatgtatggttaatgatataaaggctctagcaagcttagatacctatggcaccaagttcttgcaacttgctagcaaacactttttttcttttaacatattgttgcctgtactattttctgctttttttttcctttgttatgatatgcctgtttatgaaagggtaccttagggcagagcacaatctgatctgaagtattatgaaaattccctatttttttcagaaaagaaggtaagaaatttgagtttctctaagacattagaattgccataaattgagtgattacatgcacattctttacagaaaagggacttctggttgtgggattccataatctggctacaaaatcatgtaagctatatgaaaatgaagcaatgaaagtgacaccaatagttttgagacatcctgtgattggcatatagatgaaaagattaaaaaaaatgtggtatatccttttagctttactctttagtgctttaagctttttcccttgaaatggcactgtaccataaagtgcttcttggtaaccaaaagcataactgagggttttgtttgttttgcatgaaagaattttatttttatttgtcatataatgaaaaataaaatctctcgctctctctctgccccaaggaaccattattatttttattgtgtgtaactttatttaaatatatgagagataacaacttttcatacgcttcttaagatttctttttaagtaatttgatgtctcattatgccagaattttggcacgtggattacaagattagtgacttggatgccacagtggcactaatcatgaacctattataaatttataataggctgagtcaacttccatggcactcgtacgctaatcattcccttgtatcatgcaaatatgcaatgcactcactgccacgtcactgttggggccccacaaacagaatctaactaccttttcaactgcacatgtacactacacttgcggccaaaaacttcttccatgaatgaattttcctcagctgaaaaaaggaaaaaaaaggggactcgttatcatcttagctttagttcagaaattttaatcccttgagaaaatgttatttaaagaattatgaaaatttagaaaaaaaatgataagatagatttttgatatgtcactcaacaaacatataagtttaaattcaatccacaagttgtaacaaagggaacataataaacttgtactagcatacatgtgctcacaatcgtatttttttaaaaaaaaatatagaattcaaatttaaacttatgtgtttgtgaagtgatatactgcatattaatccaacttgttagatattttttcataactatttgtaaaacataccaaaaaagagggagcatctccttgagagattaaaagagtttcccttcagttcatgctccacgctgtcacctcactcactcagcaaaaacaaaaggttggagaggaaaacaaagaaagaaatgaaaaggtctccatcgatgcaaagagaaaggaacatttcaaagctgaatgcactaattaatatatagtatatatatttgcatccatgtatacatatatttgatatatatatttttatattggtccatccactgagagcatcagattctgcttaaacaccaagcagtatatgtgaatggtacgtgacccaaacccaaaaaaacaaaaaggcagctacgactctacaaatactagccatatatatcccctagtgcaagagcgaacaacctttgcaacttgcctcttatgattctatctacataattagtattattacatgtaaatataattagtagtaattaatattttccccctaattaattagttggagctagctagctcatgaacaatctctcttcttgcttatgatcactagctactaatccggccggataattacacagtacgtttgcacgcattagctagattaaagatgattattacagctttggctcgccggaggagtccttcttgttggcggcgtccttggcggtccggccggcggcggggccggcctcggcgagcatctgcacgacgtcggccatggtggggcggaggccggggatgctgcaggtgcagcggacggcgacgcggagagcctgcaccatctcctccttgaaggggctccactcgagccgcttgtccagcgcctcgccctcgccgccggcggccaccttgccggagacccactgcacgatgtccctcgtgtcgccgaactccggctcgatcggcttcttccccgtcgccagctccattagcaccaccccgaagctgtacacgtcgcactttgtcgtcgcctttgacgagtaggcgtactctgtatgcatgcaccaatcagttcaactcaaaattttaaccaaaaagtttaaaccgataagaatacatatacatatgtatatccatcaatcagtttaaccgaaaagattaaactgatatgaaaagacaaacaactgatcagaggttaaactgataagaaaagattaacagctcaatctaaaagtttaagctgatgagaaaagacggacaattgatggatgtgttacctggagcgaggtagccgtaggtgccggcgatggtggtggtggaggcgtcgcgatcgccgcgggcctggaggaccttggcgatgccgaagtcggcgaccttgggctcgaagtcggcgtcgaggaggatgttggaggacttgatgtcgcggtggacgatggggaagaggaggtcgtggtggaggtaggcgaggccctgggcgacgccgagcgcgacgcggtggcgcgtcggccagtccaggaagccgaagccccacccgccgccgccgtggagcgcgtcccataggttgccgttgggcatgtactcgtacaccagcaggttgctgtcggcgccggagtagcagcagtagagcttcacgatgttcttgtgccggatgctgcccagcgtctccacctccgtccgcagctcgcggtcgaggcaccccccgccgccgccatggccgtgctcctgcttggaccgccgcgacacccacagcttcttcacggcgaccagctcgccgttgctcagctcgatcttgtacaccgtgccggagccgccgtggccgacgatgttcttgtcgatcagcgcctccacgatctcgtgctggtcgaagctcagcttgtggaagctcgtcacgtcgtacgacgagctcgacgccggcgacgtcgggagcccgtcgtgctccccgtcctgccgcgcccgcagcacccaccgcctcgccagcgccagcgtcgccaccacgcacaccagcgcgcacaccgccaccacccacacgctcccggcgagcccccgcatccgcagcctcgccggcttggggcacagcggcagcgccgggtcggtgaggttcagccggaacgccacgcacagccccgggttgccggcgacgctctccaggagcccctccctgatcagctgcagcggcaccggcccggacaggttgttgttggagaagtccagcgagttgggcagcagcgtgcacagcgcctccgggatctcgccggcgagcgcattgtacgacaggttcagcacgttcaggctgtggaggtcggcgagcgtcgccgggatggagccgttcagccggttgccctgcagcgacagctggttcagccggctcagccgccccaccgcctccgggatcgccccgccgatctggttgttgctcaggtcgatcttgaccagcgtcgccgcgccggcgatctccggcggcaggacccccgacatgcggttgttcgacgcgaacagcgacgtcaggttggtggcgccggcgatggtggccggcactggcccggtgaggtggttgtaggagaggtcgatgatggaggcgtgcgggagcgcgaagatgcccgcggggacgtcgccgtcgaggtggttgttgctgacgcggaagcggagcagcggccggcacgcggcgtacgacgccgggatggcgccggtgaggaggttgctgagcacgaggatgtactggagctggccgttggcgcaggcgtacggcggcagcgggccggtgagctggttctccgacacctccagcacgttgaagccggagtagcggccgaggtcggcggggagctcgccggtgagctggttgcggtagacggacaggatgcggagctgcgtggagttgccgagcacggccgggatggcgccggtgagcttgttggtgtacatctggagcacgcggaggcgaggcagcgcgcagatggactccgggatgccgccggtgaggttgttctcggagaggtcgatgtcggtgagctgcgtgaggttgccgagctcggcggggacgacgccctcaagcaggttgtagtagagctcgagcagctgcaggtttgggaggcgcgccagcgacagcgggatgtggccggtgaggaggttgccgctgagttccaggtcggtgagcgacgtcatgttcccgagccacgccgggacgccgccgtgcatgcacgtcgtcgacaggatgagcacgcggaggcgccgcagcgccatcagcgactccggcggccaccagatgtcgaacccggggttctcgttgaagttggccacctcgagcgtggtgacgttggcgatcgacgtcgggaacgcgccggagaagtagttgttggacacgtcgagcacccgcagcgccggcatccgcgacaggtccggcacggcgcccgacacgccggagcagctgaggttgagcacctccagcgacgtgcagttcaccagcccgccggggaacccgccgcggatgtcgttgtacccgagccggacctcccggagcgccgggagcgcctcgcacacgccgccggggagcctaccgctcagcctccacgacgtgacgtcgatggccgtcacgttgccggaggcgtcgcacccgacaccctggaacttgcagtagtccacggccggcgccgagaagtcccacctcgccatggccggcccggcgaactcctgcttcatctgggacaggtacgccgcctgagcatccaatgccgcctccgccaccaccgcgccgccatcgccggccacgaagaagacgacaacacaccacaagaagaacaacaagaagattggaggagaagagagattgatcaccatagcatgcacagatcagatggtggcttaatttgctccttctttttgcctcttcttgtgttgttgttcttgagatgtagtatatgtatatgatcaccaactccaagtgtagtgtagtgtagtgttattatgttagattgagaatatgtgtgtgtttgtgtgtgtgtgatgtggtagaatagaatggttcataatattgtgatgagaaatggagggagtatataagtggagggagaatctgtggtgatgatataaagagtggggccccacaccagagagatgcatggctttagcttaaagaccctttctttcttggctttattttgcattggggatatatgcccaaacacttacacaagctctgctagctgattatcactcactcatgcaatgatgcaatatgcagtgacaaccttctccagcctcttcttctcttcaggaccagtcaaaccaattgtgacatcttctggaactgtggatgggcctcacctggcccaaactagctgtaggcccggtatccacctaggcccggcatccgcataggcccggaccgaacccggtctctcactttcagttgtagccaagtcagaaagccatgcccattcagcactttctcatcagacaagccatttctcaatgatgaccacacacataattatgacataatgcagtaagcattgcattttctcctctttttgctgaaatggatggcattgttactgctaggctctagattcttcactaacactaacactactactgcaattgagttgctgcatatacaggggagctaagattgcacaaatctgattgatagacagttactgtagctaatcctgcaaactctatggggaacaaaggaactgcaagttggtgcctgtcccaatcattgccaacactttaggaggagatgaagcaaggagctgacaaatctgaggcccttttcttcctaaaaaacaattcagtagtaactaacaaacagtcagtgatcagtgatcacacacctgcatcagaaagtaggagtagtagtagcaactaagcagctactgcatatctgtgcttagtggcctgaatgatgatgtgtagctcattaacaatggtcgcatacgccaatctgcatctttttccgtttagtgtgtacttgctcataaattaatcatgggggtctccatctagttttattatattcacaaaagtagaggagtaaagcctgaaagcatgcatgttcgggagatatgtaagaaatcttttgagggggaattttacttcagagagatttgggaatttcattcaaagtcacatagtcaacattcttcttttgcaacatggaatgtgtaaaaatgtaaaagaagtaatttgatttatccactcttaacattagtgctacctagatcatttctagaagtttggcacatattctgcacagttattaaaaatctcacttgaacaacacaagcatatgtatgaaggcacacgtgtgctccactctgttcttttatcttccatctttccttggtaggaatataggtatttggatagcaccgaataaaatgagtaaatgacatttcccattatattgatgtgtacaaacatttgaaggaatttcacatatatttaaaaaattcaaaaatgagtttctccacttacttttttggtgaaaaatgaacaggaacaatcctttttgtgtggcagtgggtccatttggaggaatccatagtggataagcaggtatgttatgtgtgccatggtgtcatggtaaggtggatgaacacacatagatgctcactcaaaagggagcatttgtgattagataaaaaaactcaccattgtggggaggtggaaaaggagattttgacatgccaaaaaaatccccattttttcacatacacactcatgtgtttcttgcttcaattgattgctattgacattagttagttaggtccagaaccacatcaggccactaattctctgttaaacatagataagcaacacggttcgccacatatggaaaaaagttggctagtttgttaatcttgatgatgactgactgacctctaaacaaggttactattaatctattatatatgaatacaggagctaattgcatgcccaaattaatgcagtgtttttgtggatgctgacaaggcatgttgtacaagtgatgaagtggtgagaagaattgactgataggaacagtaattttcttattgacgagaacagtaaaattgctatccaataaagcatgaattataagttgtaatgtggaggactgtgtgtttgcaatcaattaaaaacaatacataatcttcaattgcacttgtatatatgggactcttgaatttgtatgcttcaggtttttggtggtgcttgtcaaagttgccagcaatctctggaagctgagtagatatacttagtggtgtgtgagtgtgcttattgtgtgacatgaagattattacagcacatggtgaaaacggcagagttaggtatacatggtaaaacccttttaattttaccctttttcaccgtggaaataatggtgttaattaatcaacaagttataaaatgttctagtaaagaagcttaggggaatgaatgatggtgtggtggccattaacaaggcgaggtgaaaacacctcacatagcattacctattgtagtggatagagaatgagaactccttttgaagactaggcaagcacaaaagttgcatcaattcgaacgatcatcctaattaacaagtcaatgttgaagtcttgcaaaaaataccaaagaaacctgaagtgtgcggtttagtgcctacattcatccatcctttttgcaacagctggagcatctaatcctgcaagctactagtataattatgagtttaatttgcactacacgtcagtcatccaatgcatttttcccatatattaaaggggggcaatggtgttttttcccaactttgaagctcaattgtgattttgccctgtttattttaaactgaagctacagtttgtccctagtttactttaaacttctgttagttggagctagattaaaagaattactaaaagaaaacgttgaaaaattgttgattgactaaactacacatgccttatctctgccatatatagcctctcatcgtttgctcaacagttgataagcctcggaaaaatgaacgaagcaacaaaaaataatttatagataagaattttatatttgtgttatatgtgattggttgccatatactccctccgttttttaaatatttgacaccattgactttttaagtacatgtttgaccattcgtcttattaaaaacttttgtgaaatatgtaaaactatatatatatatatatatatacatataagtatatttaactatgaatcaaatgataggaaaagaattaataatctattatatactaaaagtccattaaatttcctacaaacgctcccaagccgtcacgtggcgctctaataaattagagaaatccaaaaaaatctgagaaaaaagcaaaacatccaaccgttaattttcacttaagatggtggacccattattcttcaccattagatctatcttaaaaaaatcctaaaacccaatccataatctcctcccaccccaaccccaccacctcacgtacgtacatgacctcctctccccttcacgtacgtacgtacatacgtctctccctctcatgtccttcctttcgtcttgccatttacctttcaatcacccaattttctacctagcaaaattcaatatgtaaataaaagcaaattatctaaatgattataatttttacaatatatttaatttatctgcattggccatgtttggatatacaagaatatatcatttggaaaaaaaactcctatcttttacatgaaaaataaaaagtaattaaatattaaattaataacatatatctgatcttcgctcctctctctccttgctcactttctcctccctattttttagctcgcaactcagtatacaaacaaaaagagtaaatttcacaatactatatctatctatctatcatatactctctccgtcccagaatgtaacaacctaggatgggatgagacctatgctaggacaatgtatatggatatgagctaggatggatctcatcctatcctaggttgttacattctaggacggaggcagtactaaaattctattaaacttcctacaaatgatactaagccaccacgtggcgctctaataaattagataaatccaaaaaattatgagagaaaagcaaaatatccgagatgaaccaccaaacctaaggcagctaaggtgatttaccaaggtcatcacgagtgtcgcagcagtactgatttgccaaggtgaagatgaatcaaattatcagtgtataatggtttgttttgttaataacatgaaaacaaattgaaggtgtggtgatagaaaaaaaagaatcaagcaccgaggtttgaaccattggatccatccttttgttttcttatgttagtgaaaaaaaccacatctttccgactctcttcggtttatcacgttatctatgtacatatatatatacacacacacacgtacatcggtacgtgtattgacatccctacaccatcctaattatgcaagtctctccttctgttctatctcttatttttatgcaatattaattatctcttattttcatgcaatattagttagacgattagaccaacttttataagaaaacaaatccctttcacctccaccattctccgtattgtcacgaccattattttttagaaatttctttactttttaatttatttaaattgttacttaatttataattaaagcaacctatattgctcatatttttgctatatatgaaaatacgtcatatgacctagaacatatcctttatataacaaccaaatagtaatgaaatatcaatctatatattaaatactaaaagtctatgaaacttgctacaaacgctcttagtggattcctgcaaaaactttttctccctgcacggaaaatgaggtagctcatcaacgcatgattagttaagtattagcttaagaaaacttgaaaatggattagtatgaatttttacgataacttttatatataattcttttgtaaaaaatgcaccatttaacaatttggaaagcgtgcatgtgaaaaataagggagtagatgttgggaaattggagaaagaacacagtggccaccacgtggcactctaataaattagtgtaattccaagaaattttgagagagaaacaaaagtctaaccgtcggttttcatttaatctggtgaacccatttattttcaaccatgaatcattttgtaaaatacccttatcccctgctggccctacaaatgctcacatactcggtttgaaaaaaaaatatgcacatattctgttatcatggcgcaacacacctcttctcttctgtaaggtggttaattgagatagaaacctaccatttaatatttcttggatgaatgagaaatattaggcacatgccttcgtgtggcttccaccacacatgcaaagaaacgcaagtatgtaatccaatccctccgtgactcccacccgtgccctctaatccccttccaaattcttaatagataaccgattagaaggagacctagcttaatggtataaataaaacacattatcagtaatagtagttttccatgatttacttaaaaaaagagaccctaaacattcgacaaaaacaataacacttcaattttaatttacacttaatttattaaaaattatttcttaataaaataagtcgaccttctttctcgataacgtggacagataattactcgtagggatgaattaaatattttgttgcataaaacaaacaaatagcttataaaaattatcaaagcaatatcgttgaaaaacattcatagagaaatactacttttgaaatttgaagcgtagcatgtactatctggttaatatttcaatcttataagtttctttaacacatattacgatacatacccgcgcatacgcgcgggctaccttcctagttacttaaatttgtttgaataagacgaacggtcaaacatatttaaaaaagtaaacgtcgtcaagtatttagaaacggagggagtatgatttttgctcgaacatgtacgcaagttgtttcgaaatgttcccagcagttatttttttacttcttagtccgagatgaagtcaagaaagatacacaggtgctcttctagtcatttatcttcctaatagacacaagccaggtcaaataactgcgaatatgactttgaattgagccttctcgtgtattttgaatgatgctaaagggtatatgaattagtcaatggttgtcaaatctccaatcaagaagatatgtgcattgaaggaagcacaaagatgagtgccaaagttcagtgggtcacactttatgtacttagattccaatttaaagatcacttcagaatatctcattttcccttgctcattgtgacatgctaaagctcatttgagagctcaatcaagttcattagacgttaagaataaaagtggttctaaacttaacttttcactgcaaggacatagatctctgtactctactacttcaccgtaataaacattgtcctaaaaagtttatgacttgacttccactcaaattagcttagatctctaaagaaacacgtgaattctggctttgtgctacaaatttcatgagtattaatcttgggctaaaaaaaggtttgaatattactttatccaaaatttcgtgattttaaacctttggcctaaaaattcttgattttaggctttggctaaaaaacacccataaaggattagccttagtcataaaagagcgtgattattagacttttgctcaaaatttcatgattataaacatttggcctaaaaattcattacttttagacttcggcccaaaacataccggtatttatttagcgttggactaaaaaaaatcatgagtactgggcccaaacgagagtgaatattactctcctgtccgaaaatgaatctttatcttcggcccaaaaaaatcatgcatattaaccaagagttgaaaaatacatgtgtattgaccttgggtcttaaaaaggcatgaatatcagggtccgctaaaaaattcgtgattattaacctttcacctaaaaattcatgcattttagactttggtgctaaaaacatatgagtatataacgccctgtttggggagcttaaaattatgagaagcagctactgagaagctagctggtgagcagtggcggatctagaaaaaaatagtagtgggggctgaataaactacatcagcataaatcgaacctccagtccccacatcctatagatctatggaaaaaaaattagtgggggcttaggggggtctccactgtctcgggggcggtagtgggg

SEQ ID NO: 8785 - DNA, 57150 bp, Oryza sativa
  unsure (1)..(57150): unsure at all n locations
cagcttcttcaactggtactacttcaccttcaccatcgccatgatggtgtccgccacgctcatcatctacctccagagcaacatcaactgggccatcggcctcgccgtgcccaccgcgctcatggccctctcctgcgcgctcttcttcatgggcacccgcctctacgtccgcgtccgccccgagggcagccccttcaccagcttcgcccaggtgctcgtcgccgccgcccgcaagaggcgcctccctgccccggcgtctcctgccgacgacctgttcgatccgccgcaccggagcaagctggtggccaagatcaagcacacggaccagttccggtggctggacaaggccgcggtggtgacggcggaggacgcggtggtggacggcatgagcgcggcggcggcgaacccgtggcggctgtgcacggtgcagcaggtggaggaggtgaaggtgcttgcgcggatgatcccggtgtggtcgtcgtcgatcgtgtactacgtgatgctgacgcagctgggcacgtacacggtgttccaggtgatgcagtcggaccggcgggtggggaggtcggggttcgaggtgccggcggggtcgatggtggtgttcaacatggtggcgctcacggcgtggctgccggtgtacgaccgcgcggtggtgccggcgctgcggcgggtgacggggcgtgaggaggggatcagccagctgcagcgcatcgggatcgggctggcgctgtcggtggcgacgatggcggtggcggtggcggtggagcagaggcggcgcggggcgggaggagggtcgtcgtcgtcgtgggcgtggatggtgccgcagcaggcgatggcggggctgtcggaggcgttcgcggcgatcgggctgaacgagctgtgctacaaggagtcgccggagagcatgaggagcgtggcgggggcgctgtcgccgctggcgctggcggtggcgagctacgcgagcggggcgatggtgacggcggtggagcgggcgacggggtggctggcgcaggacatcgataagggccgcgtcgacctcttctaccttgtggtgggcgccatgtcggccgccaacctggcttacttcgtggtctgcgcgctctggtacaggtccaagaacatcgccgaccacggcggcgttgagcttcttcagaccagctccaagcacaacgccgacgcgccgccggccatggcggtctgacgacactgacagctactacacacgtacgctgacttttcatacttactatatactacttgatgcatatgcatgtgtccactccatgatgaacacaacagagacagaaagaagagagatgatacttgtacgatccagtttggaattggactacattaattacattagggatgaatgaatgtaattgtaaatctgtattatgaatgtatgggccggcccatatcatttcttcttagggctgaaacgagcccaccgaaagcccaaaatcgccccgtaacgaagggactcatgtcggcaacactgacaggagcaaaacaacacgtttgggagagctgtaactctaagataatgagaatttccgttccaatctttgcttcaaataagctacaacctttgcagtcaacataacttttaattgcaaagcacaatttaatgaaaaacgagagaactaactgaaacactagcctaaagacagataattgctaaaccttcaccctgattgacaaaatgctacttacataaacaacatttagtttttgtcatccacaaacctttatagcaaggtctcaaagttaaagcccaagttctgaaaattgaattcaaaggtgcaagtagactcaccgaaatttaagcctaaccgttcagtcgaccagatctcgcgcgcaccaaccctcgataaaattgtcttcgagccgtgtgaaacatattactctctctatttctaaatatccgacactgttgattttttatacatgtttgatcattcgtcttattcaaaaacttatgtgaaatatgtaaaactatacgtatacataaaatgtatatttaacaatgaatcaaatgataggaaaaaaataattacttaaattttttgaataagacaaacggtaaaacatgtttaaaaaaaattaacgaagtcaaatatttagaaacggagggagtatcaaaaagtaactactaactgcaaggcaatgtctctcttcaccggggagagggagaattggatggtgtcgatcgccggcacgacctaacgagtacacgacacactaaggtgtttgaaactaatgaagataaataaatttatttgatattttaaagcaacttttatataaaaagttttcacattagcagttagaaaaatgcgctaacataaactgaaagaaaatcttatttgatagtgtagatgagtaagatgaccgcaggaggtcaccactgctgcactgcatgcaacggcccaagctaggacggtaacgaggagtagtagctaatggtaatacgtactgtataccccttgtgatgattaatccaacaaaacattggattctactagcagtaacgaagaatttaatactcctgacgatgcgtggtgcatctagtacggctctcactgcacctgcgtttgtcttgttgttgcaaaatttaacgttgggctcagatgagtttcaggacagatcgatcttgtttgaacttattttattttaaaaagggtgtatgtggatcgaatcgaattggagttggtatgggcgtgtctgtggttttgaaacattcatcaaatgatcaacaagttattgtttgttcttcagctactgtttcaagtttacacgtactagtagtattgaagtagcaactcaacgggattgtgttggtggtggtgggccatcgtcattccattatcaacggctactccagttgctaacattatttttgtcattttgtattttgttgtctctgtcttgctgttccctcgatcttgcacacaccaaagttaagttaatgcatgcaaggagtactatacttacatggtgctcatcttgttagtacaggcaggttactatgctagtgatgctcatgtagtaattatcttcaatggcaatgcagcagtatttgcagtcagctagctgtctgtattttttgacaatccggcctttcctcctgatcctcatcgtataccatcgcacaaccaacaagcttacgtaccgtagctcacatatttacatctccaacgttacgtacctacctggcttgtagtatctgtatctacgtatttaagtctgtctttacatacctacatacgtgtatttgtatgtatatacaggcggtacaatttgtctgtactgtacatacaggaggagtgctgaagaaagaaaaagaaaggaaagcaaaattcagtgtagcttgcgcgtgcgaccagtgtcgtgtttggcggcttttggagtagaaaattgctacggctaccaccacacatccttactcgccgacatgtgggcccgggagtcaggctggagtcccacatgtcagatgacagcagctcagactagtcctcggctcgctcgctacctttcaaaatccaaccagcaaaagcctccctcaccctcactctcactcccactacactctagagagagagagagagagagagagagagagaccaagccaaggccaccatggacagcacaagcaacaagatgaagaagatggagccgacgagcggcggccgccacgggactccggggcaggtggtgggcctgtgcgctgccctcgtcaccgccatggctgcctcactgctctgctccacctccatggccctcaccccggacggtaccctctctctctctgcgctgcactacgcatccatggatggatggatggatggatgagagaacgcttcctccaatctggctgtctcaccggggtagttgtgttttttctgctccttgcagggcaggcattgctggagctcaagctctccttcaatggcagcagccagcggctgacgacctggaagcccaccgaccctaacccctgcggctgggagggcatctcctgctccttccccgacctcagggtccaatccatgtccgtctccaatttatctctatctttccttccttgcatttctccattttgcacccagattaattagccttatctttcatttttcttttcccttttgcatctctctctcaagtctcaagcaaaatgtttcatggctcggctacccatgtgctcattggattcctcgccccctgaataatctcttctttcatgttttccttttctaccagaaatctcccttacatgcagcttgggggcatcatttcacctaacattgggaagctcgacaagctgcagagaatgtaacattttttcttcttcaccacttttgtgcaacacttcccatttcaacaccatcttcatttacactatccgcattggtctttctttaatttctaaccccttttgttcagagcattgcaccagaacagcttgcatggcccaatcccttctgagatcaagaactgcaccgagctcagagcgatgtatgtatgctgctacgatctagtacttgtttggttccatctccatctgtctgctaatgactttgtagagctgaaatgcggaggtttaatttactctgtgtgtgtgcagttacttgagagccaactacctacaaggaggcatcccttcagagattggcgagctcattcacctcacaatcttgtaggttcttagcaaaataccctgatctgattcactgcttattcttggtctaatgcgtgccatctgcagggacttgtccagcaacctgttgaggggcacaataccggcgtccattggaagccttactcaccttcgtttcctgtaagtttcttgctgtataaatttccttatgccatcttgtcggcattgctaaaaccagacgagtaaatgctgttgcaaatctctgaaagaacatatgcttatttgcattgcaggaatctgtccaccaatttcttttctggagaaatcccaaatgttggtgtccttggaaccttcaaaagcagctcgtaagcttttagatttgggcccatcttcctttctactttctttgatgtgtcattgctctttatgatgtgggagcataactgtagcaaacatgaacaaatttgtgcatttctgctacttcttgagcacaacctgtattcaatgccatggtgcatttcttcacatgacaattcaatggcatttgcaggttcgttgggaatttggagctttgtggactgcccatccagaaggcttgccgtggaaccctcgggtttcctgccgtgttgccgcattctgatcccctctcctcagctggcaagtcttccatttctaagccatcttctcagtgttgaagctcttctcaccaaatttggtgcaatgtgtgtgtgactaactgatggtttcatctctctgtcgcaaacaggcgtttcaccaatcaacaacaacaaaacatcgcacttcctgaatggcattgtgattggctcaatgtcaaccatggctcttgcattgatcgcggtactaggcttcctctggatatgtcttctgtccaggaagaagagcattggtggaagctatgttaaaatggacaagcaaactatcccagatggtaataaagtcgacacagctgctatcactcgttccggcctgtccaggccctcacttaatggaaactaattgctatctgtggtgttctgacttaggtgcgaagctcgtgacataccagtggaaccttccgtactcatcaggtgagatcatcagaaggttggagctgcttgatgaagaggatgtggtcggttgtggcggttttggtaccgtgtacaagatggtgatggatgatggcacggcatttgctgtcaagaggattgatctcaaccgtgaagggcgcgataggaccttcgagaaggagcttgagattctgggcagcattaggcacattaaccttgtcaatctgcgaggatactgccgtcttcctacagccaaactactcatatatgatttcttggagctgggcagtttggattgctaccttcatggtaagcctattgtctttcttgcatcttgctgcatattgtttcatcatcatggttacaactgcttcaattgtgcaaaaacttcttacattacctgatgctcaaaaacgccttgtccctgatttcaggagatgctcaggatgatcaaccattgaactggaatgcacgtatgaagattgccctgggctctgctcgagggctggcgtatttgcaccacgattgctcacccgtgattgtgcacagggacatcaaagccagtaacatccttctggacagaagcttggaaccccgcgtatcagattttggccttgcaaggctgcttgtagataatgatgcccacgttaccactgttgtcgcgggtacttttggatacctagcaccaggtacttattctctattccacactgtgatgctttcaatcaaaacaaaagatcatgctgtcctgcataattactgctcccccttttgtattgtacagagtacagactaacagtagaagcttatgactgttaagcactttctccgtcctaaaatatagtaacctaatattcgattagacaccacctagtactaaatccagattcgtagtagtttgtactactttgtagtcaagctactggagataaatcgagacaaatcatgcttttttaagacaacaccaatgctgcctgtttaaatctgtgttgagcaccttccatccagactgacattggtcatttttaactttatatggacagaatacctgcaaaatggccatgctactgaaaaatctgatgtgtatagctttggagtgcttttgctcgagttggtgaccggaaagaggcctacagatgcatgcttcctcaagaagggactgaacattgttggctgggtaagaagaacctctctatattccctccctcctatgaatcttacaagtgacaaaagtaatctgaattgccaactttcttctgcagctcaacaccctgacgggggagcatcggctggaggagatcattgatgagaactgcggtgatgtggaagtggaagcagtcgaggcgatcctcgacattgctgcgatgtgcaccgatgcagacccaggccagcgtccatcgatgagcgctgtcctgaagatgctggaggaggagatcctgtctccctgcatgagtgagctctactacgagcagcacctggaactctgagtgagtacctcctataatggttgctactactcatgattgcagtgacaagcaacaaattttgtagatacatgatgatgaaccgtgtaggagtgtagctggacaagtgcagcttcacatcttcttcttttgtgcccagctggttctttgggcagaaccaaatcactgtggtggtctgtacatagtggagaccttctgttcatctttttttttctcatttatctgtctggctgctgcaaatccacttaaaccaaaccacagaaaaaatgctgtcaactagctaggtactgatgcaagccaaagtgataagttaacaacactattttggaacaagaaaatcacagacagcactaaattagttaataaataacttgaggatcatcagttgtgtagtatagtaacatacaacagctgggtgagtagctccaaatattccaggcttgcatggcaatccaatcttggttcttggtagatgtggcactagttaccagctgcaaacaaacaagatatacagtcaagcaagcacgggtgcaaaacttgcacaatgctccaggaattgaagaaggtgaaatgaaagaaaatatactactgggatggcaagaactagtggagttttgcacgcttccattcttccatggcacttgagaagtgagccaggcgggcctcatcaaaatctccatccctttcgaaagctttcacaacagactgactagaataatgaggagcatcgtatcatccttcttctttaatccctaatatatgcagattaatggttgagatctgaaccctgtcaatgtgctactagcatggtaatagtatagtagcttttcaagtaactaggtactcaaggatcaagatcaagcatgcgaaatctaatctttcagaatcagagcaatgttaaaatccaatctttcagaaccagagcaatgtgaaatcgctcagatagaagctaataagaaaaaaaaaggaaaagaaaaatgtgcattgtcattgccattttgccatgacattatggtggagccacccagtacatgtcataccgtgtttagtaaagcgctaataaagcctttcaaaaggctggcctgaagtgacaaatgcttccagacactggtatggtagcaaaacacaacacatgcatacttttacatgcatctatcagctgctgatgctgcatgctactacagcactgcactgatcatcactagtggatggtagtagtgagagaacactgtaatggcatgaattttttcttctttttttatcaaaggaatggagggacaacgctctccatttctattagagaaaaaacaattttacgattcttgagaaggtatcattttttctattctaaatttaatacctattgatatctaggtactataagataacaaattttacattaaatttttgataccttctcaagtactgtaaaattacttttatagaaatggtaagcttgtacggtacaaaagagtctttgcctgagacaagtccatggtagcacacacccttgaggctagttatggtagagacgagagatggggacatggggtacatgtacagtaataatattgcacagagagagagagagagagagagagagagagggcatgcatactccattttactcccacgagttaaaattgttggagtggtccacatgtcgatggcctttgctgtgttgacagcctggtaactggaaaaagggtagtacagtaagcaggcagagtaactgtagttcagattttgggacccacaatctgaattgtgaagcgaggcatgagacacgcgtgaaagaatgattggacggaccacatactaattgtcactagctagggtgtgttattcttcacttcttagtggagtactatgaaatactcataacttctatcgtcggtttattgtattaggagggatcacatccccttctagaatacattttctttaggcggagggtttagaactttaaattagaaagcaattcatacaggcatgatgagtattaattccacataaaaaaatcaagggacagaattgatactactactaacttctcgttcaataaaagaacaacttttagaagcgattgtaggacgagtttgtataagcatttgtttagatttgtctgttaataaagttgatttttttttcgctaaagcacgattaaaagagctataaggaatcaggccaaccatgcactgacctgaccttggtaaagcactcttgcagttgcccttgctgtcgtgccggaggcgtcgatagttggtcgccggcgtgatctaagcctaatagggttagagtcaaactgagttgtgatgtgtttgtgttggactggttcgtcatgggctggacgtatgtgcgctagctttggtgggcctgcagccgaccaaggcccggcccactatgtacgttgtgtttcaactgcctggtactactagtatagataggtgtacatttactgcaaccgcgagatcagcggagttcgtttctcaatgtcgatcatctaatctcatcgatggagataagaagatgaaattcagcccttccttcaccgaaaagaaagaaaccaatcatataatatactgtatcttcgtcgttaattaattcgttatctccatatctctctctctatatatatactcgcagccctatgctctgcccgcgcactgtaaacaaattactaatagattctccgacgatcgtagttgattgttcgtcaccgagatccgacaaacgccatccatgggtcgcggcggccgcggtggaggttagattcttcgatcgaccttaattttgttcttcgatcgatcagtcgtgcattatttggtagatccggccgaccgatcactgggtcaatatatcgctaataagtagtagcaacagcttaacttttgtgaattaaattattagtataattaagctagccagtaactaaattgaattaattaattggtgcgtacgtgcaggaggaggagggaggtcaagcttccgcggcagcagcacgggcacgaaagcagtaccccgtgctgctccggcgaccacgccggcggcgaagagcacaggcacagctccggccaccaagaatacttcctccggcagcaatgactccgtcataggatccatcggatctgctttctttgatggtcagttagttattcaatttgcttactaaggctctattcactttgttgcaaaaaaaacattatcaaattttggtattttagcatagttgccaaaattttagtaatttgtcaaaattttggcatgatttcttatatagttatcaaaatttggcagcaaattaaatgtagccattttttttgataactttatcaaaatttagtaaggttgaaaatgcatcaaagtgaacagaccctaaatttctagctagctccacaatgctatatactgctatatatacacttgctctccatgcatagatgcaaattaatctactagccaaataccgtgctttaatttgctaccgattaaacaaagtaatagtaattttttttagaataatttcatttatattgtataatactgatgaaatgtgatagaatcgtacatgtgcagagattattttataacattaaagtacattattaggtagttaatggaaaatatgattgagtaggtgataaataaaaaaaatactatactaaatggagtatagatatttgaccttagtttttttaatcagatttttgtcactggattatttgcttcgtgcttctgagaaatatgcatgatttatcaaaatacttttgtacctattgtattggtcgtacacctaccacttaattgcgaaatttattttccataatattaatttttcatgttaataagtaaataatcgagccgctctcaaactggacggcataatcatgaagtgaaaatgcagggtggggatggggcacgggttacgggatggtgcagagggggatggacgccgtcttcggccctcgcaccgtcaacgtcgtcgacgccacgtccacttcgtcttctccggcgccggcggccgccgctgcggctcatccaatgttggatgcgtgcggcgcccacaagaaggcgttccaggaatgcgtcgcccagcaagggatccacgtcagcagatgccagccctacctcgacatgctcaacgactgccgccgggactccgccgcctccgccgccgtcggcgttgccaccaccaccagaattctctgatggatggatcgcctgccagcctgatgcatcatatccatgatagcaatgcaatccatcgattgattaaattagtttgattgcttgtttatttatatccgttttgcagccacacgtaataataataatcatgcgacgctgtatgctactgcatggatggaccttaataagttaagttaatttatttgcttcgatcagcttgaaccaacgaagtaggattacgtaggctaaaactactacaccgacccctctgtttctcctttttaatggtgcattcttattctactgctactatcgttttctttctagtgtttgttcctttttgtttaattagatcaccttgaataaatgaactattacactagtttcgattatgaccgtatatatcaaccattactgttggcagtcaaattgagagtcatagcttctgagattagtattgtgttatctgacttgtcttgatggatgagctggaccgatggacatcatttgtgatggatagatggatgatgcagaaatgtcaaacgtacagcaattaaactggacaacttaaaagaaaataccggaggataacgtttacagatgcatgatcgagggggttcggagattaaaactccgaacccctctggaatctggatattcttttctttttaacactgtgtgttactctctcttttttttttcctcatgttcgtcgcgtgtcgaaacacttcattggcaactggcaagcgctaaccagctgacagacaactagcaatattcactgaaatcttaatttgttggcctttggtaaaaccattcagctaattcagtgtgcctatgctttgagcctacttactactcagttagcatttctttttgataaaaacatacaactattcctttcaaaaagataaaacatacaactcgaccagtagacggcaatgtcatctgatcatgcatatttatcgtcctactcggtcccctgaatcagacattcattcaattagatatctgatcatccgattaaagcacataccaaacacttttagaacaattcttggactgcatgtgaagttgggcctcggaattatttagtcggctcatgcatgcattctccttagggtttagtcaccagggatgtgtgagttgtatccctacttctgatcttgtgttattggttttgtcattgatggccttatgatgcgaaatgacatacaacaattaagcacgattaagtggaactgaagagaaaatagctgcgataacgcttgcagaagcaaggttgaggggttcggagattaaaacgacgaccctttgtttcttgttttttaacggcacattttctactatatattctctttattttttctcatgttccttgctttcaatcgccttgaatgaactattactagtttatgcaattatgaccggagcaatgaaccttgagtgaactagtattattttctttaccttttttttccttctatcttaatactaacatgcatttggatattgtctgggtaaaagaccgtatcaatggccatgtattaatggaaaattattgcaagcaaaatgagagtagcttgtgattggcttgtcttttttatgggctggacctggacaaatgtgatggatgatgcagaaaggtcaaacaatgattaacctggacaaatgaagagaaaatactgaggataaggcttacatgagcagcatcgataggttctgcgattaaaacgccgacccctctggatcttatgcagttttgttttgttttgtttgtccttatatatatgttcctcgcatgacgaaacacttacaagcagatagtcactggcagtgagctagcgatattcactgatatcttagttggcctttggtaaaatacttgtactaaaattgttcagctaaatattaagtgtgccaaggctgctagcctttaaagcctactgcccaattaccgttgatactcaatgaggttacgaaccgggactaaaaacgatttctccaccagtgttatttcgtcttaaaggatttagctcgatagatagcgacaataacttccatttattactagccacgtagttatgttttgcgtgacttttaatcccgtttaacaagttctgtatctgatctattagtttatctcagcttttaagaaagttataacattagcacagtatcaattagtctagcaaattataaatttagctaagttatacttatagatatatgagagaaatcactataaacctctttttttttcattatcttcgtctcctctctctttatatcatctgtccagtagacagcagaaacctctagagatacatgttcagcctatttatgattttttattatctatatacccttttatccaactatcagtaatttcttttgcgagaaatgctcagtattgtttacacaaactttctattcggctcatatggttttggtaaaattggttatataacattaaaagttcacgttttttttatagcaccaaaaaataccggttcactttagtagttatccgttctaatttttaacacttccgtcaattctcgatcatttttcatccgccttgatcgctattgatctagccacacacgcgatataatatttttactcacaagcacaggtagaatgcagaatgcatggcaataagagataaaaacgtcgtatcttgaaaaaaaaaagtttattactactctactttcacgcgcgttcgacatcacactacactgctgcctggaatcatggcgcatggagccaaatcccaaccttttgtaagcttttttttttctcttcctcctgtagcagcacgtgcatcaagaccaaactaatcagctcactttttccctttcaacttaataataataattcagtctcatatactgttcctagtcctagaataacagaaaattaagctaccggtcaaatcactgagacaattaaatataaatcaatcaaatactactcgtcagcttgtttaactacatttcatgcattgcctagtacattagaattagctactcctagattgcactgggttactgacatcttgctctgttttggccctcgcagcatgcattttgttgttaaaaaataagctattcgatcctacttcttgtatacttttactgttaatcacatcctttttatccaccacatctcccacgcgcatgctgtaagtgttcactttcattggactactttccaactgatatcctatactcagatgtggctgcctacccaaacttttgaactaattaacttaattaactgcattttttagcctcacctcaaaggcaatctaaacgggagagagaagaaactaaaattgtactgctacggtacctcttgtacgcttcccactcttggatcaaagttactgcatctgttctaaaacgtaaaagatttttatggttagacatggttactttaaaaaataggtgaaattaaaaagaaaaaatattataattggatgaaaagcaaagtaggtgaaaaaaatgaaatgatggagggctataattaattgggaagataatattgatagagatattgttatttttttcgtgaacacgcaaaatgattgcacgtcaatatattagaaggaaaaaaggtatttttttacacaacgcaatcagtcagaccggcttatgccaggggaaggaagaaaaaacaaaataaaagctgtagctaggaagaaaaactactacagcagctatacgtaactccgatcagcaggaagaggcggtgccacactacactcccaagaaatctttaaaagcaacaatgccagttaaagaccacagatggccctccgagcggatggactccagaaccactgagaccgaaggaagtgcggagttgaaaaccctggagttctattccttccacagctgccaagtggccaggagaactagggagtcgaagccgacatggagatgctcagataaacaggccctagagattggctaccagtcctggatccatctcagcgccacgtcaactggtgctgaatgttgtgccaccgcggatgggaggctagtcggcgtgccaatgtgcattcagcgccgtgttattcggtgctaaggtgtctaagttcagcgccacaaaaggttcgtattttaaataagttttggccacgattcatttgtaaaattagtttttgtaaagggttaaattgtcaaaatttgtgttgttgaagagactttctaccgtcttcaaaactgtcttaactttttttacaaagtagtgcaacatttttttttgagaactaggttatatcatccggatccgggaggcaatcacacgacgtgtctaggagtagtatattcctatctacgtactccccttgtcgtcgtgtacaaacatttactgtaccagctagcgctccagtccagcctccaaccggccatgcccatggcggcggcggcggccttcgcggcgcatgtgctgcgaggccggtggttcatggcgtacggctccttcctcattatgtcggcggcgggggcgacgtacatcttcgccatctactccaaggacatcaagtccaccctcggctacactcaggagcagctcaacaccgtcggcttcttcaaggacgtcggcgccaacgtcggcatccacgccggcctcatcgccgaggtcacgtcgccatggttcatcctcgccatcggcgccgccatgaatctcgggggatacctcatgctctacctctccgtcaccggccgtgtcggggccaagaccccgctctggctcgtctgcctctacatcgccgtcggcgccaactcgcaggccttcgccaacaccggcgcgctcgtcacctgcgtcaagaacttccccgagagccgcggcgtcatactcggcttgctcaaaggattcgtcggcctcagcggcgccatcttcacgcagctctacctcgccttctacggcggcggcaacaccaagccgctcatccttctcgtcggctggctgccggccgccgtctccctggcgttcctcggcaccatccggatcatacgcacgccgcgctcgccagccgcggcgcgccgcgaataccgcgcgttctgtggcttcctctacgtgtcgctcgcgctcgccgcctacctcatggtcgccatcatcctccagaagaggctccgcttcacccgcgccgagtacggcgtcagcgccgccgtcgtgttcgccatgctcctcctccccttcaccattgtagtgcgcgaggaggctgctctgttcaagaataagtcgcctgaagaagaggaagccgacgacgtcccgcgggcgctgtccgtggtgaccgcgcccgcgaagccggcggcacagccttcgcctgaatcccagagaccgacgacggcgacggcgaggatcctccaggcactgaggccgccgccgcgcggcgaggactacacgatcctgcaagccctggtgagcgtggacatggtgctgctgttcacggcgacggtgttcggcgtgggcgggacgctgacggcgatcgacaacatggggcagatcggcgagtcgctggggtacccgcagcgcagcgtcgccaccttcgtgtcgctcatcagcatctggaactacctggggcgcgtcgccgccgggttcgcgtcggaggcgctcctggcgcggcaccggctgccgcggccgctcatcctcgccgtggtgctcctgctcaccgctccggggcacctcctgatcgcgttcggcgtgccggggtcgctgtacgcggcgtcggtggtggtggggttctgcttcggcgccgcgcagccgctgatcctggcgagcgtgtcggagctgtttggcttcaagtactactcgacgctctacaacttctgcggcacggcgagccccgtcgggtcgtacatcctcaacgtccgcgtcgccggccggatgtacgaccgggaggcggcgcggcagggacatggggtggccgcggccgcggggaagaaggcgttgacttgcatcggcgtgaggtgctacagggagtcgttcttggtgatgacggcggtgacggtggcggcggcggcggtggcggcggtgctggcgtggaggacgcgggtgttctacgcgggagacatctacgccaagttcaaggacggaaaaacggagctcggagtggacagcaatggcagtggcactgccaaggaataatatactaggatactgtactcgtatttgtttgaggaaaccaaggaatatactgtacatattacaaactttatggaataatggtcctgtgtgtcgtcttccttcctggaagggacgactcaccactctggccggccgttctgttttggtctagtctgttctctcctccattccggtccatgtgtctatggcgatcggccttccagcctgagtgatcaaggccattaataagaagcgtcgcgccttcttgtggacgggcatggactcggctcacggtgggcagtgccggttttcttggacgaatgtctgttgtcccagagctttcggtgggttgggaattcatgaccttaggttggcaggtttttccctgcgtgttcgctggctttggctccagcgctcagcgcatccctactgggacggcctgaaggccccagccgagcaagccgtctcttacatgtttgaggcgttcaccttcttcataccatgtgatggtgagacaattcttttctggtctgaccaattgatctgcggccgctcggtagcttccttggctccggatctcctcttcgttgtgcccccgcgtctgtgtggttcgcgcacggttgcttctggcctggcaaacaacgcctggatttctgacatccacggcgccctcactgtcccggtcatctcccaatttctccttgtttgggatgcggtactccacattcagcttatgccgggtgtcggggatcatcttgtctggcgttggacgagtgaccagcgctactcgacgcattcggcgtaccaggcgttcttctttgaccagcactcctttgcttgtgccgattttctctggcacgcgaagggccctgctaagtgcaaattcttcctctggtttgcatttcagcagcgctgttagacggctgatctccttcagaagcgcggcattgatagccactcggcctgccccttttgcgctcaagagcttgagacgacgaaccacatcctccttgactgcgtgttcgctcgttaggtctgatgacgggtgttgtcgtctcctggctgggctgtcctctctcccctccgtggcagctggctgcaggattggtggccatcttctagggcatgtttaccttatcatctccgtgccagcttcaactccctagtcctcctagtctcatagcaactgttgaaggaacgtaactccagggtctttgactctgtgttctcttcggtcacagtagtcgtagagtccatcctttcggaggaccggctgtggtcgttagcggccgttgcttcctttggggaattgttgggagcgtagagtggctctaccccctccccctgtttggagtagagttaccgtcgtttcgagtttttttcctttcctttctttgtttttcttccttccttggcataggccggtctggctgagtgcgttgtgtatcaaaactctatttttctaatatattgacgtgcaatccttttgcgcgttcgtgaaaaaatgttcatttttgcacaaattatttacacagtttttttttagtgtagtacgtagaagattaagtatatcacaaactcatcaagtggatttttaagcttggggatttgaatttgtgtaactttaagctccaaaatttaaccatgcaactaaaaaactgcaactttgtagacagggggaaagggaaaatgctgcatagtccactgggataatatgaagttgatactgtcaaatcacaacagtatctcccaaagaagtggtcttcggacttactaaatggcattgttagggattgagatcctctaacttctcggtttcaaaaataaaagtttcatgtcaaccctctactcaatgatctcacatacccacataccagtgactcaaagttagagggaagtaagtaagagaatcctctctcaattgttagatggtgcgatctcattgaggcctctttagagcgtaggatagaaaaacagctgaacagaaaaaaaaatgcagaaatcaaagtgacatgttttttttatgatacagaaactgagaacacaagaagagaaaccttttgattgcatcacgggaaaattgaaccacagaaaaatttaagactaccaaatcttttgttttttccctttaaattctaccataggaatacaatccaatagagaacattctattgttttgctatgaatgaaagacgtcttttggagaaattcataaggaaattgatcgttgaaaagaagtcctccaacaatccttcattttaaataggccctgaaatggagcaaactcactcaagattcccagctttcgctctctgttattttagttcaagttggaaatttcaagttttcaacgccaagttgatactactacgtgttagttgtatcccatgagtaatgtacgagtacaaccccaagagatgagcacaagtgcacaacagtaacacaaccaactcaattgacagcgagctgtacacaacgtccacatgcatatctgcttgcttgcaagcgacaaatttgacagcctattataggtcatcggacacatccaagattcatatgcatacagtatgcaacccaaagctaaccatcaattgaactagtatatccaagttgtcaaacaagaagaagatccaagaagaagaagaagaaattgggtgttgcaatgttttttagaggggaggccagatggcccagctttttatagaaagcataagtcttacaaaccgttttacataatactggggctgccagttttcaattaaaggcattaccatcaggcatcagaacataagcatccaaagaaggatgactctaagaagaaggatgactctaagaaagggtaaaggataaaggttatctagcagaacagagacgaaaactaaacagatgggagcagaattatccaatcccagctcttcgtaaggacaccagtactccttgcatagcttgagtcttcatttccaggtcatgggccttctccggctttaatagaatcttccactgtaaaagaaaaccaatcaagcggaaagagataatcaggggtgaggagattagtttgtttctaaaaatcatatcattgcgagcagaccaaagagtccaaatcaaagcagccaaaatcatggtattaagtctagaggttttagaagtatcaaaaccatagagtctaaagaagtcctcaaaattaaaagggatccttccccagtccaaagcatcccgacatacacaccaagcaaaagtcgcaataggacagttaaaacagatatgaactgcatcttcacttctatcacacagttgacagaattcagagccttcccaattaaatttcttcagttgaacagccgattgaatctttccccttatagccagccataaaaagtgtttttgttttggaggaatcgggctagcccagataagttgaaaatgtgggtcaattatccctctaaatgtgggtgttgcaatgttgtagtatagcacttcttaaaaactaaaagaacagttataaagaaaaaaggagtcctttttgctcctctatctctcagatcttctgatcgagcagcagaattgcagctcaggtgctcgtcggcgtcatcaccgccttctcctccttggattccaccttctcatcttctccggcgccggtgccattgccagcgccaccgccaccggcagccgcctcctccctgaagcgcgcgtagatgtccccggcgtagaacttcctggtccgccacgcgagcgccgccatcaccaccgccgcggccaccgtcaccccggcgacgatcaagaaggaatccttgtagcacttcaccccaatgcacgtcagctccttcttccccgccgccacggccaccgccccctgccgcctcgcctcccggtcgtacatcctgccggcgacgcggacgttgaggatgtaggaccccacggggcacgccacgttccccacgttgtacagcgtcgagtagtacttgagcccgaacacctccgagatgatggccaggatcatcgggtacgccgccccgaagcagaacccgatcagcaccgacgccgcgtatagcgaccccggcacgccgaacgccaccagcaggtgccccgccaccgtgagcagcagcacgccggtgaccaccaccggccgcgagatgccgtaccgcgacagcagcgcgtccgacgcgaaccccgccgacacgcgccccaggtagttccagatgctgatcagcgacaccagggtggcgatgctgcgctgcgggtaccccagcgactccccgatctgccccatgttgtcgatcgccgtcagcgtcccgcccacgccgaacaccgtcgccgtgaacagcagcaccatgtccacgctcaccagggcttgcaggatcgtgtagtcctcgccgcgcggcggcggcctcagcgcgcggaccaccctctccatcgccgtcgctggtggcgtctcggcggccgcgggcgatggtttcgtggccgcggacagcgccgggacgtcgtcggcttcctccttggggggcgtcttcctgaacagggcggcctcctcgcggaggacgatggcgaagggggcgaggagagccgcgaacacgacggcggcgctgacggcgtactcggcgcgggtgaacttgaaccgcttctggaggacgatgaccaccaggaggtaggcggcgagagcgagcgacacgtacaggaagccgcagaacgcgcggtactcgcggcgcgccgcggtcggcgagcgcggtgcgcgtatgatccggatggtgccgaggaaggcgacggagatggcggccgggagccagccgacgagcaggatgagcggcttggtgttgctgccgccgccgccgtagaaggagaggtagagctgcgtgaagatggcgccgctgaggccgacgaaccccttgagcaagccgagcatgacgccgcggctctcggggaagttcttgacgcaggtgacgagcgcgccggtgttggcgaaggcctgcgagttggcgccgacggcgatgtagaggcagacgagccagagcggggtcctggcgccgacgcggccggtgacggagaggtagagcatgaggtaacccccgagattcatggcggcgccgatggcgaggacgaaccatggcggcgtgacctcggcgatgaggccggcgtggatgccgatgttggcgccgacgtccttgaagaagccgacggtgttgagctgctcctgggtgtagccgagggtggacttgatgtccttggagtagatggcgaagatgtacgtcgcccccgccgccgacatgatgaggaaggagccgtacgccatgaaccaccgcccccgcagcacctgcgccgcgaaggccgccgccgccgcgcccgccattgccgccgtctaccaagctcctcgcttaattagcttgttggatagataggagtgtgtacggtcggtgagatcgcattaattgcagacttgtagcagtaggaggagaggaaaatcgttgaagatgcatgtgactcactcaagtccacttcactgattgagtacacggtttgagataattttgacaaaagttttggttcagcgtcaaattgccagcatgatattgacctttgctgcgatggtttgtcccaaagtctgatgatcctatccaaatccccaattcccaaaatctcatcttttatgatggatattcttcagcattgaggaactctgctgtcttgccagttgctactgtctgaaaaatgcagataattcactaatctgattctgttctattccggaaatccggatttgatacttatctgttccagtctcttactcctatcaacattgacatacagattatgccaaaactaaagaaaagatcaactctttcttcagacggtatggcaccaatttgttcaagctggtagggataggaccagcggcagcaaggcagcaagcaggacagtttttgttgactttggtaatgctacttcattattgcacctctagtttgtggaagtgcaactataactgaaaatttatgtcggtaatgaagaaaaggttgaaggggcagctaaagagtactcctctgttcaaaaaaaaaaaacacaatcctagaattggtttttttattttttttttacagagggagtacccctctgcaaaaatgttagaattattttatatttcagtttttcttaatatgttagttatatttgtagtattcaagtatctaggatataaataaaaaaatatttgatcaaaacccgataagttatcttaataatcattggttgcatgcatgtattttttaatctatgttacatataagatgagttaattttttcttaatcttagtaatgaaagtaatatgtctaagggcattagtatagtatactcagtaagtaaggtggggtctaacaaatgtagatttttgtcgttggaactttcataatgtgtgaggcaataaggcggtcccatgactatataaaaatccaacggtgtgcaatggcatggatggaaaggagagagtcaacacataggtgagaaaatagtgtttttttattccttactattctctatccaaaagtctaagatatattttattttttgttatttcaaaagtctaagacctatttgtaacctttacatatccaaaagtctaagatatattttattttttgttatttcaaaagtctaagacctatttgtaacctttacatgctaaatttctcttaaaaaaatctttatgtgctaaattaaattgttgacggaacacaagaaaccatcttaatacttattggttgcatgcatgtgtataatttattggttttgtcacatggtggatgtgataattactcattggtcttggtgacaaatgaaatgtcttagaattttgaatatagcaagtactagggagttattgttgcttactacttccacaatgtttgtattattgcttactacctggtttttaagcatattgtggatgccataactcttttggatggagggaatatttcatacttcctccatccaaaaaagtctaagacctatttataatctctatgtgctaaattaaattgttgaccggaacccaaaatgtcatcttagtacttattggttgcatgcatactataagggttattgataccacatacccaatagtaatcgactaagctcggtgaggcccaccacataccatgttctatacggaaacaaacctcgtaatctcgtatatagaaggagttccggataaggaataacaaatagagttctatatggaaacggcaaggactacttggattgtattcattttggtctccctagttttatttggacaagaggacacctatggatataaatacaaaccccctaggaggagaggaaaaagaaacccacaatacacaagccaatacgccgctggatattaacatcagagataagcctagacataccccatctggtgcctacgaaagccggcaagagggatctagcgccatctctgatctcgacgagttcgtacttgaggaggaagactaccctgtcgtcgactacgagttggttatctagccgccaagtcgacgacagctagataggttatcccaaatattatatttgtgtgatccagatgaataaagagtaacaccggctttggccaacaggatgtagggctattacctaccagataaggggcccgaacctatataaaaatccctatctccatctctctttacctcaatcccgcatataccctggtgccaacgatccccataccatataaataccgtagtcgcgatctcaaacgtcaacacatgtgtatagttcattggctttatcacatgatggatgagttaattactcactggtcttactaacaagagaaatatgtcttagatttttggatggagggggtaccaggctaccagctactccctccgatttcattttaattgacgttttggacaatgacacggtctacaaaatatatctttgaccttatttttctattataatatatacaataaataaatgcatgtttactttattatattactttgaaagacaaatctatatatgttgttcttgtttctttaaaacaaatattttgaaagttattgatggtcaaagttataaaagattaaactcaaccttgtccaaagcgtcaattattataataccggaggaagtaagacacaaccaccactaacacaaataaaaagaaataattgttatcaccttctcgtttcgaccgcctcaataaacacgatgcatgcaccaatgagattagggtggatgattaacagaaaatttatggaagagagaagtattagtgaattgtatgtagacatacgcacatcatattatgaaatacttaaaaaaaagtggctacaccttagtatattttaggatggatgggtataaagtactagctttgaaacccccaattttgaaaagatatgtgtttttaagtgtggctgggaatcaaaagaaaagtaaggttttggtgtacatatccatcgtgaaccggaaataaaatggcggccactgtcaaggccataactgataggttggatataatacgagaatgacactgcacagctctcatttacttgttgacagcactttcaggctgtgcaccactatatctatatgtagatcagcagacctttagtaaagtgaagggaatgaaaggagttaagttcacacgtttgcatgtatctacaaatgaaatcattatccaatggtgagaattgttacacgtgtgagcacactcaactttttctcctaaaaataattaaaaaaaactttatctgcagcagcgtataaactcattcgcgggaagattttagtatgtgtgttaactgtgtaattgaaagagagagatagagaaatctgaattgtttcccttgttgcggggaaatctgaattgtttgccaaacaaacaaaagagacaggtcctcacatctcgcgttcaaaactaattgggccaattagataagcccggcccaaagagagtccgtgctgcatgaccaggcagaagtcagatccaaccggcctgcctgtcaatctacaaaggatttggattcataagcatttgtttagttggaggacggaatggatcggattgagacgaatttattttctcagggtgtttattttgggatacgctaaaccaagcatacgctaagaattactacttataactgtcatttgattatgtagcaataaggtatagaaaatccaaaggaaattaatttccttttctaacagttgtagagaaaaaaacataaaaaatttcccatctactcataccttttttttaattagtatggatttgtaattatgcattcctgttcctacattattttctatttctgtggagttgaaatcccggcctccaaaccaaacaagcctgcgctgttttgagtatctttataccttacaggttcttatatatgtctatatctcttagggctcctttggatgcaggggaggaaaccccgggaaaaattcccgtacagagatttttccctgcaccaaccgatccccttccacctccaagggaatcactcctgttaggggaattttccctgataccatttgggagtagggggagagggttgatgggggaagggggatttagacaggcaaactgctaaacagtgtttgaacaacatgtctctagaaatattatagaaatttcaggaaaaatagaaagaatatagaaaatccatataaataggaaacaacctacaaaaattccagaaaaaaatataaaaacataaaaaatcaacaagtattagaaattcagaaaaatacaaagaaatataggtgagtttatgtggaaaccaacttcgtgacatgacataagttaaactttagaatcatccatatcatacaaaatttaaaatctttggaatcatccttgcatccacaaatatagaactgtacattatatttatatccacaaatgtcttgatcaagaatgagacatgggtccatttaaatctttatctcttctatcttcttcatcatctcttcaacaaatcttcatatattctaataaatctgtcaggatgaaaaagataatctgaaatttaagtaataaatataaaatagtgatacttcagcaatcaaatttgaaggatggccattgatactagcttaggaaaaaaatgcatgcacatcaaccaacatattgcaattgtcagctacatcagcgtaaacaaactcttggtataagcactttctttttagatcaaacatcctacatgcagatacacaccattatttttaaatcaaacacatttgaagtccatgtttttgtattgatagttttccaacaatactctatttcaagtccatatttgaaagtaagttgagcatgcaattcaaattgaatcctggcaagaggaagaatgcaagagcacaattatgaattatcattatggacatgataaggaaaaaaaagtagtagtagtagttgttgttttaattaatcggtactactaggtcactttgtttggccagtgtattgtgcagtgagtgagagagaggagattgaaacatctgtgtgtgcgtgtctttgtatataggttgctgccaaagcttgtgtttttttgaatgcacaatgccaccttgctcattttctgctagtgatacatgacatgaaactaaagtttggactaatgtataagtatagagcataaaagacttcattttgtagtaagtatgagttcctatcaaaaatatgattgttaccatttatttagtcccaacatgtatgctaaattgaccactaattctacagttccctgacagagactacaagaatggatcagactaaaaaatacctccagaaaaaacaaaaaacttgatgctagcagctcaaccagtactgagatctacctctaggttaacagagctgacagcatccaactaaaagaactgcatctctaattaactacaaaaaactgttactggtttgcagactaaaatttctcatatacctcactagttgaatgatcctcactgcatgtgtgataattcctcatttcttgggattggcacattgatctcacatatttagactacactaagcatgataattacactgcagaaaaaaccagagcacaacctactccatcaaattagaacatcatcttaccaaaactcattcatgatctaaaacaagagcaccatacgcccacccatatccccttctgaatcgcttccataacaaaatgaaatgctactgcagggtacaatatcacaatgtattagaaagaacaggagaacagattacaactctcccaaaccaaatcaagaaacatgccatacatacaccaagaaaactgaagtactgaacgaacccccaagaatcaagcagcagctacaagggcacgcacaaacctagccgggcaaccgccggcgggcgtcgcgcagcgaggaggaggaggaggcggatctgcgcctcagcgcctcctctaccggtgagtcgcgccgccttggatcccccctgtccccgcctgcttggagccgtgtgcccgcgctgccggctcgccgcctcgtcgtcgttgcaccggctgccgcggtgccacccgccgcgcccacgcgtcggtgcctgcgatacaagcgctgagaccggagagcgagattgggagctaactagaggaggcggaaaccctagaggaggaggagaacggaaacccaggaggaggagaggatgggaataaggagaagggcttacccttctcgccggaggaggagtcccggcggtggcgcgtctcgccggagaaggaggcgcggcggcgcccgctgttgttcgcgcgagagagaagcgactccggttgcgcgagcgagaagcagtggcggatcgagagagcaaaaattcccaacctccgaaggtcggggacctttccctagggtttccccgtggattgggccgggaaatccctgcctcgtgggcttccaaatggacatggaataaaacccgtgacaatttcccctgcaggcctttctcccagggaatgggctgggatcccggtgggatcccgggctgccaaaggagcccttatatgattcccacgccccatttaaacggtcattgcttaattttcttgtaagttttcaatctaatggatttgaagcgatatgacactttaatcctgtaccttttcagaaatcagaacctgtagtgttccaaagagccctagatcggtggaggctggagggagagaaacatcaatgaagtgttcattatagtattgcacaacatgatattttttttaatgaaagaatcgagtggcatatgtttttacacgtttgtttgtagctttactagtactataaaatgtaccactagtatataggagtaccaagtcactgaaatggacagacgacagttgcgtcttgtccgtatacattgttacacacacccgttttgttcttcagctggtagttgttgcaaaatgtgcagtgcaaagtaaggtgtaagttaatctcaagaccctagcttggatgggtacagcgtgtgaaaacagacaaaataatggatgatccgaaacgaaacggacagacatgtcactagctctgtcgtcagtgaattaattatcacaaacacgaataatgtggtacaaaattaatcgtgacctcgatcgtgtgtgtagtactgtagccgaccgtcgatcgatcgacgatgaagatgatgacgaggatatcgtatatatggatctcctgcagcccaatctcaataatatgcagaagatgagagtacgatggatgcaatgtcaatctcatctcatcaatggtgtcgctattacagcacgtggttttaataataatccacggtacgtacggtgtctagctgctacttgcactgtgcccctcctctacttaaacgcgccatcgtctggatagctagctacgtactgagctcgagcttaattagctctagctagctgcagcaatggccatgggggctcgcctctgcagcagcagcattattgttgtggtggtcgtcctgattgtggcgacggcggcggaggcgatgcggtgtccggggacgacgagcgtgtaccggcggccgaagaagaaggcggcggacatggtggacatgccactggacgccgacgtgttcgcggagccggcggggaggaacgcgccgcagcaggtgcacataacgctgggcgaccagacggggacggccatgacggtgtcgtgggtgaccatggaggaggccggcaacagcaccgtcttgtacggcctcgccatggacaagctcgacatggccgccgacgccaccgtcaccacctacacgtactacaattacacctccggcttcatccaccactgcaccccactactaggaaaatgatttgttgccacgaaaaaaatcgtggcaatagatacatattgccaccattttaaaaccgttgctagccgtggcaatagaaacagtagcaataggttattgcaacaatttttatctagtggcaacaaactttgataatgccacaaaataatcgtggcaaaaaaacatattgcaacacttaacatcgttgcaacaaataattattgccaccacttcgtgcgtggcattagttgtgcttgccacaaaatagtttcgttgcaatatctaatatatgttattgccacatagcattaatcgtggcaatatatcatatgggttattgccactaaaatatttttgtggcaataagtattattacaatgaaatgaatttcttctagcttttatagaaaagaaattgtgttacatcagtaattggatggatcatttggtactattgcaacatgagtagaaatatatgttaaatggcaaaacccttgcaactcatgcgcacaagaattatgatgtctgatatttccgcgaataagacataatatatttcagatacccaaagtaatgatgacaatatgagtatgttaaatttccaaatgctgaaatacaagttgtctgataaaactaaaagttctgaaactaatgagtttgtaacattgttgtcgaaactagcttttctagccatcacttgtttgattttgtcgtggtttgctccagccattcaacagtaacagagttgattgttcctcctgtacaaatgtatggacatatagttacaagtcgtatttaaagtaaagaaagtcaccatgtaaaatgcagagctattttatctagttttctgctagcatgtatagttaccaaaacttcataatttcttcaaataaaggacattgccagagtctgcagtgcaactaattttagtatctaacatgattaaattgagttagaagtcatatgccataactatcatgccactgtatggacatgtgtgttctttggattgatggaaacataaacaaatgtgattagtgctcactatatctgacattttttaagccatgcccctgttatttactgacttgtgagacccactgaaatatatatgctttgttacatatgtggtggctatatatagtactgtgttgctaatcatttatatggcatgcatgcttatcttagttagctcagataaacaaaacaaaggcctatggggcagtaacagaagcttagatgccccatatactaataaactaaacaggcaactgtttttgtcagcaaaggggacgtgccaaatactaatacaatccaatgagttaagtagcaaaagtaccagatcattacctggatgctacaccaaaccccgagctgatttagatatttctttcattcattcttccattttctcctctggcctgttacaggatttggccatacacaataagaaattattttttttacaaacagaccatgagcaggaaaacatattgtaaaattttttgcaaaagatcatttcaacatagcagcttgctgaagatttgtaattacctgatcagttcgggaccgtacaaaatttctagcaacattcctaagatgttgtgaagaaatattttgccgggtagtacttgttgttccttgcaaattagcgctgttaaaaagtgctttcacaactgtgttgttctgaatgcttcgagccttctttgttgtgtcatgtggttctctattctcagttggacaatctattgccagatcagacttcacaccataaaacaagaaatatatatattatgattccacatttgacatatataagatatcaaatattggtgaatgtgaacattttggcaatcattacctgttgttccgatgctacgctttgcgtagtaatcattttgagaatatcctcccgtagcatttccctttccttacgttcttctgaatcttcccgtgacattgtcatcatctgaatcttcaccgtggtaaacccactgtatgtaactttcatcgaatccattccttagcaagtcactttgcacttcggagcgtgttttgtgtaccacattaaggcatcttctacatggacagggggcattatccccaggattatcatcttgaaatgcaaaatttaaaaattcctgcaaccctttttgccactctgcagttgccctactcatgcgcatccaactcttatctactgacatgcttcctgcttatcactatacaatattactaatagtatcaaaccacccatttaatgaaaaaaaaacaaggaaaatatggttggcactttatgatcttaaggaaaatggagaaactgtgtgaacataaactcaccttgccagaacttgtctctgtaggctgaccagaaaaaatattcctgtacaaagatatgaacagataaattagaactaaacaaaatcatgaggatttgagctgaaaaatagacattggacagtaacagatatattggtattcccatggaaggtgtttcttatttttcaaaattcatatgagaaattggacaaactgaagaaattaataaatatgagagaccgtgtatagcaaatttggatattgtgcagtataaccaaggtaaccttgtgggagacagaaattcagaaacaaagacagaaattcagaaacaaacataactcatctgagctattctacgctagcaatgctcgccctgcctgctctgcttgcctactaagatagctaatctgaagttctaaactactcactgtcgctgccgctgcggccgtcaccccatctgcagcaagcaacatcctttgctctatgttaccgagatacagggatacggatatggataggatacatcattttctgaaaaacatggatacgggatacgtctatatatgtatacaaaaataatatgaatttatgcctgggaaatcaatagcactagtaaaaaaaataaatcatgtcttccagtctgatttctctctatcttctccaataactcaatttaattacctccacaacccattggatggcagctttgtgccctggcctacgtggtagtgtggtggcgatggcatagggcgtccggcggtggaggcagtgctacgcccagcggcggcggcggcagcggcgcgacgcggcatattcggcatccgacgatacacccggcttccgtcaacggcagcgctgcgctcggcttccatcgacggcggcggcgctgcgttcaacttccatcgatggcgccgcggccgacccccccatctgcagcaagcgacatcctccggctccgcttcctcgtcgacgccggggccgaagccgaccctgtgtaccctcgcatccttccattgtagtggctctctcatgcgttgactgaaccctcgtcttccccagcgaaccctcgtcttccccggcggatgtggcgcctctagccaggcacctcgcttggatccctcccgcacacatctccggcatgttgcttgtggaactagggctggaggatcagatcgggatgaggaagatgaattggaggggatgcaggcgtcatccggtcgccggcgcaagtgaggcggcacagaagacggtgagcgccgacggattgggaaatttggctagaccgtgaaaaaagaaattgtgtattcgaggaggatgaggggatgaaaacggaggatacctgaaggctgaaagctgaatcactgaacggagtggaggaattcctcgtgacgcggttgacggcggcaccgtcgcggtgaaatcaccaggcgctgctcctccgtgagactttggaagtcacgggagcactgcccagccgtgtgaatggaatagattagattgataaatagtactaataactgaactaactttttcgggagttaatcgatcttttcacgcgcccaaaaccgcgaaacacagaaatatttcgcgctaaattttgggaggttcggctgagtcgtggcaaatattgtgtgcttattgccacaaaaatcgaagtcgtggcaatagggcttgtacgttgcaccgatattttttttgtggtgatagcttagtttttattgcaacgatattttatttgtggtgataacttatttttgttgcaacgaaaataaaagatattacaacgattatacatcgttgcaacagaatatacttatttgccacgaaaagttttatcgtggcaatagtatgatatattgccaccaattatttttcatggtaatactttcgtggcaatagctaatttttcttgtagtgccctcaccaacctccaggtatatatcaccagtttaccccccacacacacttgttccaccccaaccgtttcacctccagactacggtggtgtttgaatctcccgaagatgaagataaagataaagattaagtgtttcatataaaacgagatgataataacgtgtgattaattgagttttaattattacaaacttgaaaaatggaccaatctgatattttagaacaactttcatatataaagttttcgtacgaaacacaccgtttaacagttcgaaaagcatgccacgaaaatccaagagtttgtcctaacttttgttggagaaaagaacaacttttatattattgattataaaccgtaacgcttattaacattaatatataatttataagtaaaacttttgtacatatgttcttaacaccttaaaaacaacaataaaaataaactaggatttaaattataaattttggttacaacttataagctgaaaaacaaacgatagagctatatattatgaatattactgttctattgacaaaaatatattatcaaactctgacaagtcacaagtctaccagaaaatgtaattgaggaaaatttccgtaatgctcctgttcacatatgtataagtatttctaactagtaattgaaatttttatataagtatttacccaccgactccatatatcaaccaatcaggtgatgaaaaatatatatggtataaaagtaattttacctcaatcttaatttctcctaaaactccagaaatatttagagaccatgttcataaagaaatgctccattagctatgaaatatatactggatcgaacagtggtgcagtgtcttgatcagtcgaacgatatactggatgtttccaaacatttatacattctcaagcaagcggatcgaatggagtggccctattaattaattttgtttgcaaagttaatatattaatatgaactatcaaaatatgataggtaaataaattattggcgtttcttccaaaaaaaactattggcatcaaacaagtggatattggacaggcatatgtagatgtatgtgcagtacctgcctcaaggcaaaatgaagtactccctccgtttcgtaatgtaagtcattctagcattgtccacgttcatatagatgctaatgaatctagccacatatatatgtctagattcattaacatctatatgaacatggacaatactagaatgacttaaattatgaaacggaggaagtaccacctaaaaataaattagaaaaatatttatatgcaagcgtacattcatgtcaagaaaaatatcagatgcaagtgtccaataagctgacataattagctgaacattatatgtatatggattaattaattaattagagtggaattattaattacgctttgggacgcagtatggcgtaaagtactattacgccatgggtttcgggttcacggtgcgcagcttctggttcacgacgccgcctcggccgggtcccgacgtggccttccggctggggctcatcggcgacatcgggcagaccttcgactccaacgccaccctcacccactacgaggcctccggcggcgacgccgtcctcttcatgggcgacctctcctacgccgacaagtacccgctccacgacaacaaccggtgggacacgtggggccgcttctcggagcgcagcgtggcgtaccagccatggatctgggtggctggcaaccacgagatcgactacgccccggagctgggggagacgaagccgttcaagcccttcacccaccgctacccgacgccgcacctcgccagcgcgtcgccggagccgtactggtactcggtgaagctggcgtcggtgcacatcatcgtgctctcctcctactccgcgttcgccaagtacacgccgcagtggaagtggctggaggcggagctggggcgggttaaccggagcgagacgccgtggctgatcatggcgtcgcactcgccgtggtacaacagcaacaacttccactacatggagggggagtcgatgcgtgcccagttggagaagatggcggtggacgccagggtggacctcgtcttcgccggccatgtccacgcctacgagcgcagcttccgcgtctccaacatcaggtacaacatcaccgacgggctgtgcacgccggtgcgcgaccgccgggcgcccgtctacgtgaccatcggcgacggcggcaacatcgaggggctcgccgacgagatgacgtggccgcagccgccctactcggcgttccgggaggacagcttcggccacgcggtgctggacatcaagaaccggacgcacgcctactacgcctggtaccgcaacgacgacggcgccaaggtcgccgccgacgccgtctggttcaccaaccgcttccacatgcccaaccacgacgactccacccccacccccaccaagcgccattattatggatgattcattcattcgcatccatccatcgcttcctcttcatcgtcgtccatgcctgcctacctagtgtgattttgtacacgtacgtacgtgtgattttataataactatatatataatcgtgccaatcaataccattaggtgtgtaagtagtaacagtttactgtaatctcttcctgctgctgctgttttctgaataaagaggaggcaggatatatctatcgatggaggagcacagagcactgcctgctgcttcctctgaaaatatatctgaatatatatatacacatctgcagtttgcaggccaattatatatcatcgatcttagctagttgaaatccgaccgactcgactcgactcgattcataccccaagatcgctttcagtctctggcgcaatcattgtcatgcggaatataatcctctgccatggactattggactgagaagaaaaaaaagatcaatcttttcgggcgactcacacctcacatgtagagccactgcgagctgtttctttctccatcgctagctgctttttctcagctgaaaagaacatgttcaagatgccaatacctttcacgctagcctctcactcaaaggtacttcataaacactggaatatcaaatttacgaatccggattttccgtacgaacatcaaatgagccgagcagaatgaatgactgactgaatgagtggttccagtcattcagatggatcgagtcagttcactaacaaaagtaaaaaagaatcgaacatttgaggggcatgagggagtcttgaatatatatcatgtgtggttagccaaaacttaacggtggtcgcactaggcagaatcgacacaagcaagcactgaactgacattattgatgaaagggttagggcctttttgaatcataggaatgaaaaaacagaggagtagaaaaaacataagattcagataggaatacaagtgtaaaacagaggattgtaaaacacaggaaaaatataggaatgaccgtttgattgagtcgtaggaaaaacacaggaatttgaggagagataaagactcaaagtattcttaacatgaggtagaacctcatgctaaattttctccaaacttgcatgggaagtggcattccatagaaattttatgggattacatatgattcatttctttaattcaaagggctatataggaaaaattcctataggaatgaaatcctttaaaattcctatgaatttcctttgggagcggattctaatccctcgaggggatatcccatcgtatatctttttcttttaaattcgatgtaaatagttgtgaaaaattctgaaaaaaattgacaatgtagagtataatgatacctactaatccaccaaaattcaagttcaaattcgatttacacgtcgagaaacaaaaaagacaaatttagatataaacagtacgctactatttatatgctgaatttgtcttttttatattttgacgtgtgagttgagtttggacttaagattttgtggagttgtatatatgtattgtatgaatgttgtcaaatttttctagaatttttcataaccgtttagatggtttttaggtaaacgaggaacatcccctcgaggaattagaatagtttcccatttcctttgaatgaaaggggccttagctagtagtgagctactagtactagttgccatcgagaggtcatcttctccttatctttctcttcttcttctcctctcaattaagatacatgcatcatgtgaaagcctcatgataataccaggtcaagcagggcaacaactttatttctgttgattacaagttagtacaatgcgaactaaagaaaatttaggcattacttattcgagtcaaagcttgcccgtccacgacgccgatagccagtgagcttgacacgcgacctgccattgccactgccaaattttatggcattattcagaaaacttatactatatgctagttgattcagggaatgaaagtagctagactgctcctaattcagagttcagaaagttaagatgaatgggtggtcggttttcaaaaaaaaaaaaagatgaatgggtggtagcttattcagatttcacaaaagggaagagcaattgtggtattttaactcggatcaaccctctgaatgatgctgtcagttactggcactaacggttttacacagaaattaaacaaaagtagaatctataaaggtgaatctgctgtctagtgcagcacataaaacgatatgaggcaatcattttgggggcaaatctgtgaacaagtggttaccaaatcgaccaaaaggtggcagcatgcttctctgtggcatgcttttggctagatcaagttgtgaaattgcgatctcctagctagctttttcttcaaggccaccactgtgtttcaaagatgtagcgagtgatacatggatgggcaagtaacagtatgtgcattatactgaattctactagtaaaaaagtagagagctaagtttcctttgttgaagaggtctgaatgatatgatatctttaacatatcttaacggaacaaatataaattgtgttatgcttaatatcatctggaatatactggcatatgataagcagttcacattacatcatttaaaacgatatccacgggtgatgtttcgacaaagaagaactgcaagcctgcaatgccagcacacatgtcgcaatcttttgtgaattggtggtgtgttttgtcagtcaaagtaggcgcccatacaaatcagtagaaggcaaggcaaagcgatgtgagatttgtttgtccctcccttgcttggttggttgtacatgctgcgaatcgaagaataaatcagtagggatagaagagtacttgtgttcaaagtcaacttgcaagtccttaatctccaagattgatccgcatctccaactaaaccctctcctaatctaatcacggtctaatggcaccatctatggatattccccacaaaccattcagattagttcaagtcaacattaagatgcacgcaacactctcctatttaagagatgtatcctttcttgcttgtccaacgaaacagagtagcacaagaagcagagtgcggctagctcacagtcaccatggggatgctgcggtggggagctcacctcctcctcctcctcctcgccgcggcgacgtggacgtgcgccggcgccggcgccggggtgacgagcgagtaccggcggaagctggaggcgacggtggacatgccgctcgacgccgacgtcttccgcgtgccgccgggctacaatgctccgcagcaggttcagtcttcttcagtctccacaaccacacaacgcgcgaccatctctcatctctttctttgtcatcaggtgcacatcacgctgggggaccagacggggacggcgatgacggtgtcgtgggtgacggcgaacgagctggggagcaacacggtcaggtacgggagctcgccggagaagctggaccgcgcggcggaggggagccacacgaggtacgactacttcaactacacctccggcttcatccaccactgcaccctcaccggcctcacccacgccaccaagtactactacgccatgggcttcgatcacaccgtccgtaccttctccttcaccacgccgcccaagcccgctcccgacgcccccttcaagttcggcctcatcggtgagtaacattacgccatgaattcatcaccatttcgttcgtttcagttcatcatctcatcacatcaatttaaacaagtcattaggagttgtgaacaaagtagatcgatcacatatgcaaacaaaaactggttcgataggatttaggttaggtttagtctcacagtaatccgttgcattcaatgttgaatggtttcttgtcaagtttttgcattaattatatatatcgggagactccaaagtcgctgcaaaccgccctcatcccaacgtcagtcagtgtcattactcaagtctgaatttcctctcgagtactcctacagtaccgtactcaatcaagtaggtcagccgtgttgactatacatgcttcaaagtcatcaaaaaaaccaaaaatgtacgcagctggaattgatgaccatttgactgtgatgatcgtatggtatttgaaaccaatgaagatgtagattacgttaacgcacataaaacaaaaggtcattattatataattaattaaattttaattattataaaattttcaaatggatatatttgacattttaatgcaatttttatatagaaagttttgcatgactatttaatagttttaaatacatgctaacggaaaaaactattaaacattttgtttcgtgtaaaaaatttctacatataggccgtgtttagttcacccccaagtccccaactactctaaactttcaactttccattacatcatatcacatccaaaactttcctacactcataaacttttaattttttttcaggaactaaacacactcataaattgctttaaaatatcaaatatgttcatttgacaaaatagtattagtaggagtactcccctacctcgcagtaaccgtttcagcgtgttactaatgtatgttagttgacttttttggaaaaaaaacaactgtacgagttctgtcaaatgtagtacttagtacaaatacaaacgacgaaggacctgtttagttggcaaaaaaaaatctctacatgtcacatcagaacatcggatatacggacatatattttattaaacatagtctaataataaaataaattatagattctgtcagaaaactgcgacatgaatttatcaagcctaattaacatgtcattcgtaaatgtttactgtagcaccacattgtcaaatcatgacgcgattaggcttaaaagattcgtctcataatttcctgccgaactgtgatattggtttttttttatatttaatactctttatatgtgtccaaacatttaaaaaaaattgtttggaactaaacaggccctaaattaatgaaatgaaatggatgagtgcacgcaggtgacctcgggcagacgttcgactcgaacagcacgctggcgcactacgaggccaacggcggcgacgccgtcctcttcgtcggcgacctctcctacgccgacaactaccctctccacgacaacaaccgctgggacacgtgggcgcgcttcgtcgagcgcagcgtcgcgtaccagccatggatctggaccgccggcaaccacgagctggactacgcgccggagctgggcgagacggtccccttcaagcccttcacccaccggtacccgacgccgtaccgcgccgccggcagcacggagccgttctggtactccgtcaagatcgcctccgcgcacgtcatcgtgctggcctcctactccgcctacggcaagtacacgccgcagtggacatggctgcaggaggagctcgccacccgcgtcgaccgcaagctcaccccgtggctcatcgtgctcatgcactcgccgtggtacaacagcaacaactaccactacatggagggggagacgatgcgcgtccagttcgagcggtggctcgtcgacgccaaggtggacgtggtgctcgccggccacgtccactcgtacgagcgcagccggaggttcgcgaacatcgactacaacatcgtgaacggcaaggcgacgccggcggcgaacgtggacgcgccggtgtacatcacgatcggcgacggggggaacatcgaggggatcgccaacaacttcacggtgccgcagccggcctactcggcgttccgggaggccagcttcggccacgccacgctggagatcaagaaccggacgcacgcgcactacgcgtggcaccgcaaccacgacggcgccaaggccgtcgccgacgccgtctggctcaccaaccgctactggatgcccaccaacgacgatgtataattattaatcgactccaaccatctcaaacttcttaatttgtatcactgctatgctattgccattcttcttcttctttagctttggataataaatactcctactatgcaataacaaatactactagcagagtctatcttgttaagccgtgagataattaatccccaaatgggacacttgccaacacatttggctaccaaattggatataattaaaaatgtttatattttggagcaaagagagtagtacaatctaaaagggagtcacaaaaggattggtttctttggaatatttttcatgtggctttgtttgtaacaaaagagattgcatctaaagttctcaaggaaagttgagaatttttgtacttcaatggaaataaacagtgagattatccagaacagagattttcttctatttgattgatttgattgttgtctcccttttctctattcttaagtttcctgttacttttccaaacagagacaccatatataaaaaaaaattaagctgaagttttactaaattttagtgataacaaaaagagaaaaaaaagtctttatgcagagaaaaaggagaacaacctaacaagttcttatctgtaaagttctctcttgaaagttgctatttatgttatgtataaggtgaagaaaatattattttaatctttttaatccttttttctgcaatttttttgctttccttttttttgcgcttttttattacttttttaatcttcacgcatgtttttcaaatgttttgtattgaaagtttttaaatcttgacttgaatcaaatcttaacttttaaaaaaataaatctcaagttgaaagttttcaaaattgagttgaaagcttttaaaatctcgagttgaaagttttcaaaccctaattgaaagttttttaaatttgagatgaaaagttgaaagttttcaaattttaacttcaaaattttgttttcaatctgttacttaaaaaaaatcttccaaaaaaagaaaaaaattatcttaattaccatcgtgatctaaaactaacatgttagttacgttagatatactcgtcttagggaaaaaaccacggaaaaaatccaccggtatacgcgataataaaaccacagagaaaatagaactccggaaaaaaaataaatctactgtggtgaagaaagggaaaaaagaaaacccacccccaggctacgtgcgtgttgccggtgtgcacgcgccaagcggcaatccctgcaactgcaactagtggaattcgagaaacgcgggaaggttgttgatggatgaatcgttcattccatccatcgtattcgtgaatgccgttgcatgatccagtgcgtgacccgattatcgtgaaaaaaatgcagcatgcatgcccctcctctccaactgatcgatgtggacttggactaatctatttgctgctcctccgtcaagtggcaatccctgcaactagctaagctagtggaattcgagaaatgcgggaaggttgttgatgaatgccgttgcatgcgtgcgtgatcgatcccgattatcgtggaaaaaatgcaccatctgcactatatatatactcactcctcatctagaacacaacaaattcattagattagattagatcatccatggtaatggaggcggcgtgcgtgctcgccgtggtggtggtggtgatggcgttcttgtccccggcggcgcgcggcggcgtcacgagcacgtaccggaggagcctgcaggcgctcccagacatgccgatcgacgccgacgtgttccggccgccgcccgggttcaacgcgccggagcaggtccacatcacgctgggcgaccagaccggccgcgccatgaccgtctcctgggtgacgccgaagctccccgacagcaacgtcgtccgctacggcctccgcgccgacaacctcacccacaccgccaatggcaccttccggcgctactccttcgggcgcaagtaccggtcgggattcatccaccacgccaccctcaccggcctcgactacggcaccaagtaccactacgccgtcggctccggcgacaccgccagcgccaggtccttctccttcacgacgccgcccaagcccgggcccgacgtgccgtacaagttcgggctcatcggcgacctcgggcagacgttccactccaacgacacgctgagccactacgaggcgtgcggcggcgacgcggtgctgttcatcggcgacctgtcgtacgcggacaaccacccggggcacgacaacaaccggtgggacacgtgggcgcggttcgtggagcggagcgtggcgtaccagccgtggatctggacgacggggaaccacgagctggacttcgcgccggagctgggggagacgacgccgttcaagccgttcacgaacaggtacccgacgccgttcggggcgtcggggagcacgcggccgctgtggtactcggtgaggatggcgtcggcgcacgtgatcgtgctggcgtcgtacgcggcgtacggcaagtacacgccgcagtggaggtggctggagggggagctgaggcgcgtggacagggcggtgacgccatggctgatcgtgtgcgtgcactcgccgtggtacagcagcaacggataccactacatggagggggagtcgatgcgcgtggagttcgagcggtggctcgtcgacgccaaggccgacgtggtgctcgccgggcacgtccactcgtacgagcggacgcggcgggtgtcgaacgtggcgtacgacatcgccaacgggatggcgacgccggtgttcaaccggtcggcgccggtgtacatcaacatcggcgacggggggaacatcgaggggctcgccgacgacttccggtggccgcagccggactactcggtgttccgggaggccagcttcggccacgccacgctgcagatcgtcaaccggacgcacgccttctacgagtggcaccgcaacagcgacggcgtcaaggtcgtcgccgaccatgcctggttcaccaaccgatactggtttcccaccgacaccaactagctacccttaatttcctacggcctacttcctctgtcacgtaaaaaaccaatctagtataggatacggcctactttctctgtcacgtaaaaaaccaaatcagtataggatatgatacattctaaaccaatctagtataggatacggcctactttctctgtcacgtaaaaaaccaaatcagtataggatatgatacattcaccaaatcagtataggatatgatacattctagtactccgaatatagatatacatctattcagattcatcgtattagaatatgtcgcatccgattttagattcgttttctgtggacggagaaaatacctgcttaattttttctttattactagtacttttctttttctagatttcgacctgaattctatttagtacgaatgcatcaacagcaaaacagattagcacactagagagggagatggattaataaaatcattcggttctgtttggagtttgctagtataatatattcttggttctgtttggagtttgctataatatattctttcttgacgaattatctccattcgtaagcgtgcgttatcctcgcctcaactaatattggaattacagttcttctgtccagaatagtagcttggctatccctttgtcttttgctctgccgaataaaacagcaactgcagttgttacacaatttttctaaaaaaatcttagtccaaattccgaaacaattcattctactacttgggacctgggagtggaaaagcagttctgactgaataattcatacgcgtgataaattgggatattgagagccgtatagcgaatcagaattttgatataacgtactgaatgaacaagaatgacctctgtattgggcatatccgcatatggcaatttgtcgaccatcatggaacagtttgatcaagttgatggcatgcgtttttagagaaagttgatgcaatgcactggaaatgtaatgttgtactccaaacagaattgggcaagccctgatatgctattccgccctttgcacacaattcggccatgatagtatgccttgatggtgactcctatatatgcaaagttcatctcttttgttttctaatagtccccttcactgtttttttttctgtcgtcctatatatgcaaagtcctttttttttcttacctcttaattaccaaaatccaaaaaaaggaactaattgaggtttctttctatacaaatttgacatccaaaccatctactttgattttgactattttcaagagatgtaaatttttttttcacaccagttaaagaatagctgcacaaatttatttggtttcaagatttgctatttgacattcgaggatgctcagctgacttcttttgactataagggctgtaaatgcaacatatattgtaggagattcctgttccgcgcatacgcgccgccaaacgaaatcgtgcgcacgcggtttcaataccatttgctataggacttcttttattttctgggagatgcgcacatctaacgtaactaagcttgctagctagtttagatgtaattaaggtgacattttcctttttctcgaaaggtttttttttactaacagaatgaaggaaatctatacgtgtaagaaactttcaaataaaatttagaactttctattaaaaagttaaaagccatatacctaataaattttacaaatttcaacttacaatttaaaactctaaactcaaattttgaaaaatttaaactcgaaatttgaactttcaagttaaaatttgaaaaacttttaactcaaaatttaaactttaaagtcaaattttgaaaactttcaactctataattgaaactttcttcagattggaaaactttcaagttaagatttgaaaacttttacctaaaaatttgaaaacatgtgtgctaacaataaaaaaaaatcagaaaaagggggaaaaaaagaaaacgcgcgaggagaggcaccaaaatagggaaaaagatagcgagaagaaaaagaaaatgcgtgcgtggggtgccagctgacgtgcgcaccagatagcaacccccatattgtatgttttagatacaaaagaaggcatcaaattcactatatagatgaaaaagaagatctaaatcattttaatcatggtacagatctactgataatatagttatatatataaaatgtaactaatttctatatgttgttgtaacacgagttatacatcaaatccatgaattgcattacccgaggttattttctagacactaataacagtaatatagagaaatacaatagtctttgctaaatagtatcatattggctccgttcaacagcaaattctttttactgtactgcggccaacaaaaacattgttttgtatttgtagttgcggcagcacaacggccgaacagacccattactagcaggattttagacgtggtttcatgagagatagatgacacgtcagaagccagagcgaattggattctttgtaaaagagaaactagaaaatgatgcaaagaataataataataatgcaaaaggaaaaaaaaagaaagaaaaggtagccgacccgacgtaaaagagaaggcgaatagccgaccgagcccgagcgcccttcctcccctcttcttctccttcgactttgttcgactcccctccttcccggcagaggagaggagaggagaggagaggactcatccatcatcatcaatcaacgccatgacgagctcctcatctccttcccgaaaggtattattctactccttcctctctctccccaatccgtctgattctcgctatctgtgaacgttttggtctaatttccccccctttttttttgtacctgcgcgcaggcgctgagcaagatcgcttgcaatcggctgcagaaggagctcgccgagtggcaggtcagccctccctccgggttcaagtacagggtctccgataacctccaaaggtcgtcatcttgtcttctactggttgatttcttgtttcttctcctgtggatgaaccgcgggatcccatcttacaattgattccttttcttttcttgactgtatatgttcttgattttggggatttttggtgggtttttattattagtattgttgttaatctgtggagatggattcgtacgattcgcctaataggtgggtaatcgaggtcaccggagcggcgggcacgctctacgccggcgagacataccagctgcaggtcgacttccctgagcattatcccatggaggcgcctcaggtgagctttcttttcacaacagattactttctcatatagaaacctttaattaatcctttcgtttcttctcatctgttccctgcattcgatttggttgcaaactaatttaactctttcattccaggtcatttttctcaacccggcgccgatgcatccacacatttacagcaacgggcacatctgtttaggtaaagttgttccttatcatctcaaaaataaaataaaataagttgttcctcatgtcggcctcttctctctagcagatatttgtttaggcttccatgttgattaactgcatgttgtatgagaatgttctttgcctaacctgatgttctatctagctgtcagttaggtgctaagattccatctgttaggggaaagccaccacctttgccaagtgtgcttttccacttcctagagtagctgtacaattgagatgccccgacttaacttttcattctatttctcttttactatgttagtagacaatcttgatgggatcacgaaattcacgaccttgttgtaaacattgtttcttgcttctgctttctaagttttcttattatctagatattggaggtttgtcttgtttcctcgctattaatacagctgtcaccagtgcttctacttctatgattgttagccatcagagggaagctttaaaattatgtagtttatttggtactgaatcctgagtgataacacctttgcttcttttcttgtcctcaattctccttccacctctgaaatttgatctatataagctgtttacgtaacttcttatcacccttttgtcttcttgtacaattagctacgagtctaatggtatgatagcacatatgtacagccttcctttttggttcctttcagagtggcatgcatttgctttttttggtaattcgttctagtaagtatttcttgtttaaatcttatcttgtgtagtgatcacacagagttgcagttgtgcttgaaaggctttgatttgtgatgcagagaatacaaacaagatttatacttctatctgttatttcttttgcctgatatatatatatttcttgattctagttgagtgccaaagttagtaaaaatataatactaatgggaattaaaacattccttaccttgaactgtttgaagggagttaggatgcatgtcagttaggttcgtgtctgggtggtcgagggtgttttcttaaatgtcctggaaaggtaatgaggattagacatctatacagtagtacaaactaggatgatagcatgcttctattcatattttaaactattgtgcaaatataatgttggccctcatgtttccaatataaccttgccatttccactttactaaaatagctgcaaatgcattggaacaatagattgttatagtttggcagcttatgaagtgagacacttaaaagtagatgtgctgaaaagtttgttctttcatcattgcccttcacatggaaacatatggtatccgtgtcttgtctctgttggatgcataaattatgttaaatggtcaaatcacaacaacttaaagcaaacaagctattgtataattagttgttgccaaatttgagctgttttcagtagacttgtctacctgtatgcaataacatagcacttatatcctttggcaaacggaggtagtcaaatctattttttgtcccccaagactcggcgacatgctttcatgttttaagttatatatacaacaattagcatcttgaatctgttacttcgactatctaactagtctagatgagctgcttgagccaaagggttgttaattttggagcaactttactgctcagctggtagttgagtgtgtgtagtattgaatttgagtaacttggatcactgattctgaaatacagtgcagcagcagctgaaaatcattcattcaggaaaatatgtttctgagacaccttaatctctgactcgtgatttcatctttgagcatttgatctgtccttttttttttaatgttccttctccatagaaacaggactacttcttgatccttgtaatgatgatttctctgtgattgtgaaccaaaagagagatgagatacagtttttatgcataaatataatggccattaagaataacagcttgctgctggtcatatatctgcagatatactgtatgattcttggtcacctgcaatgactgtcagttcggtctgcatcagcattttgtcaatgttgtcaagttcaccagcaaaggttattatatataactaacacccttcccattttctttcgctgaccaaaaacattaaaaggtatcttgctataatgtggtgtttgcagcaacgccctcaagacaatgaccgctatgttaggaattgccgcaatgggaggtcgccgaaggagaccagatggtggttccatgatgacaaagtgtaagaggaactagttggcacttttgccattcagtaatcgtaataccttgaaatctcttgcaaggggaaaatgagatgaatgtaggcttactgttaagcatcactctattggaccaccaagcttaactgctgggttggtttgtacatgagctgcctgcacacatgtcaagtcatgaatataatattaccataaatgattatacagaataagcaagtgtaccatgctgattctctgatacgatcgagcacaaaaagaatagcgtattgaactatgagtctgatgatttgctaacatgagcttgctgcatgtctgcatatgaattttttgctatgattgtctttctatgatgcggctgtgaacgaatggaagcagcgcagcaacaagaagcaatagcagcatttattcgtgtgaaatcaaggcgatttatttgattctttatatggcttactgataaaagaactccaaaaggaatagttttacccttgtaaagatattattaccctttatttaattcttaagtcaccaagaacacccttgtactacctccttccctaaatgtttgacaccgttgacttttttaaacatgttttgatcattcgtcttattcaaaaacttttgtaatatgtgtaaaactatatgtatacataaaaatatatttaacaataaatcaaatgatagaaaaagaattaacaattacttaaatttttttgaataagacgaacggtcaaacatttttaaaaaagtcaacggcgtcaaatattttgggatggaggtagtaactctttccggtttgcttgatgatacaagtattgattggtgggatgggctgaaaaggcttgaaaacggaattgggccgttccttccaataaaagggctgacacgagtggagtcgggtcgttggcccgttaagttccttccgatccgctcgctctcatccgcctcttccgccgcagcgcgcgccattgcctctcctcctcgccattgccggatctgttgctgctcctaggttatctagacatcttcctctagagggacaactcttgttagggctccatcgcggacgatggcggatggtgaccgtcaggaggccgaggcgcccgtggccgggatcaagagggtgaaggaggaggaggcgaccgcgtccccaagtggtggcgagaagaagaagatcctcccgaattggaggaagtcatcgatcccgtgtgaggggagtgagatcctgaagaagaagaaggaggcgattgcggcgaggcctctctgggtgtcgagggatgtcccgggggcgatggagtgctggattgaggagcgcgagaaggccttggcggaggaggaggccgacatcgcgtccgggaagaagaagaggaagaaggtggtcaagtacaagatgcctaatgaagttatccaacagatgatgagatacccctacacctacccggagtgcaccgaggaggagctggcccgacgttctgcctcaaatcgccagctccaccgcctcagaatgttcatcgatnnnnnnnnnnnnnnnnnnnnnnngaccctcatcgaccagtacctcaaacatggctatgcgttcgacgaggcggagatctccgacgaggaggaggaggaggaggaggagcagaagtagcaacctgtctgtgttgtggtgcaagatccatctaccctaagtaatatcgcttgcttgcttactggagtagtatcttcgtgtccctgtgtctgtctgtgtgatccaccacctatccttccttcctaagtgaagtgtctgctcgccaatgactctggtcttggtgtgtgttatcatctcatatcttatttgctactgcatgctttgctacttgagctatatattttcctgatattacaccttgctatactaattgaaccagctatcgtattggaatgaatgagtcaatggatgtgttttatgctagtgaagtacagttttacaattgctgctgattggaacaattctagtattcttagttgagattcccccatctcgatggtcagataacacaaacgatttactctagtcataatctgttttgtttctgtatgtacggttgaatctggctactctttcacttctcggtccatgttaatcaatttggctttaccatcctaagctgttacatgattctgttttcctcgtcaaataagtaagttgttccatcaccaatgcaagagtgcacacatttctaaggattgatctcatattgccaatgaattgaaattttattgtcttgtgtggccatcagaatgtttgattccatcactgcatatttggagggaatcaattatgggcaattcctctgtatgaaatttgccgatcctgtccattacaggtttttgcattcgtgtccatcactgcagaaagtcagcattagttgcattatgtctgttcaggaccaccattgaatgttttgctcatctattagtaagagttgccaagttgtagttatggtgacatctcttcttttcagtcttcctctgttcatcggttacatttcatatctcctatgtggatcgatctaaacatttctgtgtagccagttaattacctgagagaaggatctaattacatttggcctcatgccactagataattattttgcttatggttattagttttgcgtgcaacaaaattacaaggagattaggctgtctagcatatctgagctgatgactacaggctatttactcaccatctatgaggtgtcagcctaccagtatttggtcgaggaggtcaaaatggacgccaccgcctgacactgctcagggtaatcatgcccgattagttcacttggcccttgaaaacacaggtcttggatgcttgcttggctcgacgagcttttatttgttcaactgtgtgcgcgcgcttgttgctaggttatacacccctggagctgcctgcctgcatcagatacctccttgatcatggcgcttatctgcatcaagttcgctcaaatggaaatgtcactcatcttcacaccgctgcagtgaaaggtatgaacagcgtgcttagcctctggtatacccttaggattatctttttccaattacagttactacttgtctgccaacccatcctgctagacgcatgactgtaagaaacatctagtctagcggcctttgccattgccttgatttattcttctgtgatggatccacatatgaaatcatgctggagatcattatatggaaactagggagaactgtaaataataaaaagtgtgttattctaatagctattcgagcctaatttagaatactataatatggtgattaacttgcgatccctaaatcaaaatgctcattggtgcttctattttcctttttaaccataaattacaataggctctggtctaatctaatatgctctcatattgtcacgccccgaactagtcccgaccggaactagcccgtgacgctccaaattaacctgttaatcgataccagtcccaggaaacagtgctggtatcacagggagacagaatatcacagcaacagaggtctctttattatagagtagatgtacagtcatgttgggctgcggacagatcccgagctcacaactgcattacaaaaggaaagcggaagccaggacttggaccaatcaacacaggcgcgacttgggaactaggccgaaaccctaaaactcatcgtagccggcttgctcctggaagaactcctcatcagcaggatccgcttcatcttcttcagcaactgggggggggattatttatatagagcaagggtgagtacgggagtactcggcaagccatgggaagtaagtgtttaatgcaggcttcaaggaaaggctggtgtttttgcaattaattttatttgaactcttttctgaagcaactaagtgagtgcttctcaaacgacacggatgagacagtgcgtctcgtccggtcggagtatgtgcaatgtatcagtctttagaatttaaacaaggttggcacccgatcaacagctttttcaacggccacccgggccaacaacttttcaaacggccacccgggccaacaacttttcaaacggccctagctgatcccatcagctacagatttttcaaacaccgaaccccttttcacacagcaatttcacaagcagtagtcaaaccaaactatgctaggaatcacctcacatccgcccatgaccgtgggcacggctgttcgaacagtttgttaacctctgcagagggggtacactttacccacacgacattactaacccggatcacccagcccgtggggatcagccacgtcgggagacctccaagctttcatgacaaggcatttccaaagccgacacaggtttaccatatgccgacgagaggggtcccagaccaacaacaggttaggtcccagaccatactgtgccaggaagcccaggggtcctccccgacaccaccccggcgaatccacatgtctctcggcatcaaggctcccctgataagctagttactcagccaggggtgtcccattccacccatgtggtcgtacttgtcttatgtttggatgaaattccaagaaatcggtccttaagtgcgagagcgggaaaccgtacacccggtacgttccccgatccgtggttttggaaattcatttagttcgcaagcaccgacccaggtgtcgggttttccaagtcttttgtaaaactccagttttacccaagttgttactcagatttttaagtttgaaggcgaccgtcgatactcgcacagagtgcacgaatatcgaggcgcaactgggtggttacaaggggacatagtatagcaattaacaatggaaggatcaaatgcaacaagtcaggtaggtccgccaatctgccttgcagacgggataaaagattaagtgcgatcctatcaatgcataatattttgcaagcaatataattaaatttcaaatataggctcaagatgttcgggtggcttgccttgctcgagatctggagcttgatcctcgaaatcctcgcgctacgggtcttcgggctccgaaactacacgcgaaacgggacaactcaacaaacggcgaaaataaagccctattaatgacctctaagcgtgccattagatagatctcgagatttgaggaattttggaagttg

SEQ ID NO: 8786 - DNA, 30373 bp, Oryza sativa
catcccatataacatctacttggcacttatagtaaaggaaagaaaaaagatagagcccacgtgggtcctatttaccagtggctatcgtctttctcctccacccttctctctactctattcccctatctgtctccacctctccccttttctctctttcccgatgatctccaaggcggcggctcccattggaagatataacaaaatgagaaatttgaaacaaagcctttctcaattgttctttgagttatttttaatttcttttatcagcctttcttcttctatgatacattaatttgtttcatttatcacaactttttttatgtatatattcaatatactaactttcggaggagatcaggtacagacgtcgcacaatttgatacatgttcatcatgtgacagctttgctaaagcatactgttatctgtgttctactatgaaacttcagaatttcgcctcaagatgaacatcaatgatacatctacctactgatgtacatccttcaatttctcttgcaaagataacttgtaacaacatgatcaattgcctccaaccgattaaaaaaaactgacttggttccctatgacgctaacaaatggatttgcttggaaaaattaactaattaattaacggtaaacattacgctgacgttccggattgggcaagaagacttttgaacacgccggctaagaactgcagccgtgtagtctagtgttgaacagcaacttgatgagtaaacatgacttttaaggatcacaaacaaaaaaaaaaaattatgagctttcagtgtactgttgcacagcaacttgaggagttaaatacctgcagatacacactgtcatctcatcttaacatccggacaagaaatcaggatggacacaagacaacttccaggtcttagggaacgttcgttcctgggcaatctgggggattgagagagattgtctctcgttttccgcgcgcacgcttcccaaactgctaaacggtgcgttttttgcaaaaaatttctataggaaagttgctttaaaaaatcatattaatccatttttgaagtttaaaatagttaatactcaattaatcatgtgctaatggctcacctcgttttgcgtatcttcccaatctccccaatctccccaatctccccaatcctcaaacacacccttaaggtagaaatactgtactactatctgataaattgttctgttgagcttaatcatgcaagggagtctctggcttgcattaaaacgtggactaatctctgcaatgattcccggacaagagtaccatccaaccttgatggcgatgccaaccttcctgtcagcacaattcaaagccgaattgttcaaaccatctagaacacgtgcaggtggtttgtctcatctgattattaatctaatctccagcatccagtactttatttatctgcacaaagttgagcgagtccaactgtccaagagaatgtttggcagagtattttcaccgcattgacctgaaaatgatttagcaaaatttactgttttacagttacacgcatactagtattagtactaactacagattccattattctgtggaaatctcacttgtgcacacatgctagtatgctactgcatcattgacctggaatataattcatgattgattgtcctatctacatatatattttgctaatttcatctcatctgaagctgatttgctaatgtaataactacaagctttggaaaccatccgatcgatgaagtacggttgagatcgagccacgacgatgaattatccgtgtttgatcacgcttgatctgagccgttgattctctgatcggacgaccaacaaggacccacgttgttcactcccccttatggtccaaatgcctcctagtcctaggggatcaccttgaccttcaccgaagtgaccacggcgaactcccggccgatcgccgccgcctcgagcatctgcacgacggagcgcatcgacggcctcatcgacggcgtcctgctggtgcacaccacggcgacgcgaagcaccctgacggcctcctccttctcccattcctcgccgatgctggcgtcgaggagggacatcaccttgtctcggctatctaaccggcgagacacccactccacgatgtccctactctccccgtactccgccatgatcgccgtccgccccgtcaccagctcaagcagcaccacgccgaagctgtacacgtcgctcttctccgtcaccttccacgtgtaggagtactcgggcgccatgtacccgagcgtgccggccaccacgcccgcgctggtggtgtccggcgtggcggcggcgccgtcgaggatcttggcgaggccgaagtcggcgatgcgcggcttgaaggactcgtcgaggaggatgttgctggacttgacgtcacggtggaggatggggcggtcgcagccgtggtggaggtactccagcccacgggcggcgccgacggcgatgtcgtagcgctccggccacccgaggccgccgcggccgccgagcttttgcccctcgtgcaggcgctcgtagaggctgccattggggaggtgctcgtacaccagcaggctcgccgcgccgtcgtcgctggtgatgctgcacaggagcttcaccacgttcacgtgccggatcgagctcagcgtccccacctccgagtcgaactcgcggcaccgcaccgacgccgtgcgccgcgccgccgacggcgaacggagcatggcggccgacgccgccgtgctcctcgccgccgccgccgccgcgcgtgtccgggtgatgtgcttcaccgcgaccaccgcgccgctcccgagcttcacgcggtacacgttcccggacccgccgctgccgatgaggttctcgtcgcggacaccgtcgatcacctcgtgctcgtcgaacgccaggaccctgaacgacttgaggtcccacgaccccttcttgccgaacaccttgccgccggccgcctcctccgcctccgcctccgcgcgccgccgcttcttgatgtacatcaccgcgccgagcgccgcgagcactacggcgaggccggcgaggaggcaggtgaccacggtgcgcgcggtggccgcggagtggcctcctgatcccggcgagcagcggcggaggaagtccactccgttggtggcgcacagcccggggttccccttgaagctctcgccgtaggccgcgatggagagcggctccggcacgggcccgacgagcttgttgtcggacatgttcagggagctcagcttcagagcggcgaggctcgccggcacggcaccggagaggtcattcccggacaagtccaaagaattaagccgcggcagggtccccagctccgacgggatcgcgccggcgagcttgttcccggtgaaattgaccgtactaagcgacgagcactcgccgatgctcgccgggatggccccggtgatcccattcctagcaatgttcaagctgccgagacgtgccagcctcccgatgctcgccggaattttgcccgacaacccgttcgacgaaatgtcaattgtctcgaggttgctggcgtcgccgatcgacggcgggatcgcgccggagaacctgttcccggccaggtcgaggctgctcagcaaggcggctctcccgatgccgtcgccgatccccccggtgaactggttgttggcgaggtcaatgatgtcgacgttggggagcgcccacaacccgtcggggacgtcgccggacatggagttcttgctcaccctgaacctcaccagcgtcgtgcagtttgcgtaggtggccggaatctggccggagaagttgttctccagcatgagcagcctggtcatcttgccgcgcttgcacatgaacggcgggatcgggccggacagcgcgttggtggacacgtcgatgaagttgaactccgcccagctgccgagatcccgcggcagctcgccggtgaggttgttgttgtacagggacaggttcacgagctccttgaactcgccgaactccggcggcacgtcgccggtgaagccattgtagaacagctgcagcgacacgagctgggtgagcgaccggagctcggagaggctgccggtgaggtggttcatggacgcgtcgaagaactggagcttcgtcaggttcccgaaccccgccgggagctcgccgtggagcgagttgttgtacagctcgagctgcaggaggttggtgagcttggtgatctccggcggtatctcgccggtgagcgcgttgtcggagagctcgaggtcgacgagcttggcgaggttgccgatgccgggagggatgacgccgccgatgttggccgcggagaggtagagcacggtgaggttggtgagcgcggtgatctcgtcggggaacgtctccgtcttctcgaagaacccattgtcgccggcggcgagcacggtgagacccggcatggacgccagcgcgcgccatgggaaggcgccggtgaagctgttctgcgacacgttgagcctctgcagcctcgtcagcggcgagaggtccgggacgtggccggagaagccattgaacgcgaggtcgagcacctcgagggcggtgcaccccgcgacgccgccgatccccccggcgagcgcgttcgacggcagggagagcttcgcgagcgacggcagcgagccgcacagaacgtcgaacgggacggacgttgcggccacgcccaagccctccacggcgacggcggtgacgccgccgccgccggaattggcgcagtcgacgccggtgaagttgcagggggaagccgcggcggcgtcccaccgggcgaagaaggcggcggcggtgggagggatggtgagggcgttcttgaaggccatgagggccgacacctcggagacggcggcggcggcggcatggaggccgaggaggaggaggagaggagggaggagaagggagggcggtggcatggctgccgggaagaggaggaggaagagaaggaagaaagatgcttcctttggtgtcagtgtgtgaagctgactgattggctttaaggtagtaagtaggtcagcagcctgttccaacgacagcacacagatgctattttaattagcttagcttagccaatttttgtactgttccaaacagagacattattgattaatggtggttaatttaacttgccactctctctgttcttaaatatatgaagctatttacattatagatgagacttaactttttacatgaaaaatcattacggaaaaaaaccacagacgccaattgccaataagtaatactgaggagttgattacgaacacatagtatacatctagccatcgtatccttcccatgccgtttacaaggatataggtaaaaaaggaaaaagctaagagtcataatagaaaaggactaaacgaagactaatcctaatatattgtatgtcgatattcgcatcacatatttaataaacttttttatccgatatctggccattcattttattaaaaaaatctatgtaaatgtcatttatttttgttgcattttattttatcattaaataattttaaacatgattttatattttatttttatttactatttattttttccataagacaactggttgacatggattgttacggtacaatataggagctgatcagtacatggttgtttatttgagataagtagctagattgttaattaatggagggactaacaactgtgttaagctagcgtgctaattagccagtgtaattgaccattgctttgcttccatgcacggcaacattgcatgaccaatgggcaaaaggttcagtccagatagcactagtttgtggaaccctgtttcttgtctaatgacggtcaagcaaatgcagaaatgctaactactccgtaccaggcttggactaattaatgaacgtttgtataactgtaaacccacttcaattaagatgtactatctctgtcccaaaataagtacagccgtaggtatccgtgtccaacgtttgaccgtccgtcttatttgaaaaatttatgaaaaaattgaaaacaattagtcccatataaagtactattcatgttttattatctaataataataaaaatactaattataaaaaaatttcaaataagacgaacggtcaaaggttagacatgaatagtgcaaaattacacttattttgggacggagggagtaatatataatgtattgagacttaattccagtagtgctagcctgtgcagcattttttttttgaagaatgtcacaaaggtagtaatattaatattcttatattactagcatccattggtgcaaaacagctataggttggacgagcgtgtgctggagtaatttaactatagttagatggaacggatatgcagggtcaataatatatatccttaagcaacaatcatggattgagcccttcaacgcacacaccagcatctagctatatatgattaagcggcagatattaattactattgtcttataagtcgtctacatatatctgattaataataatggaagaacgatgaaaatatattaaatggtgagatagatatatgatcaagaatgatctcagctggatagatataggagtatactactacatcatctatcgatcatcattatcttaaaaaaaatcatctatcgatcatatatttatccaagaatgggagaaaaaaatgagtccaacgacaacttggcttgtggggagcggagacgaggaactgatgactgaattctgatgattcagggagcactatctgtagcaggccaccaaaaatgtaatggatctctgaattttgaggctcaaattttggcagtttttgagaggaacaggtagctaattatctgacgtgggagagatcgcatacacacacatatacgatcgatcgtggacagatgtgatgcgatgattcggtcggatcggatggtgaattgctgaagtatatatcttcagtgtgactcttgaatgcaaatgctcgcaagttgctgcagccgccgcgtttgacctctcaccaacgctttcccacacactgcattcctgcacgcatcacactccatttcattatccgctcacagatcatatttataccgcaggattacattagttaatttcttctagaatgtaataatagtcctcctaaaacctgaattcctctgtagtttttctctctgaagaagacacactcaactgttgcaattcagagaatcttccgaaattaagcagagtgatatagtatgattgaggtcaaattgattatccttggatccaggtcctccacagtccagcagagaggaactgcagctacagtattctgagtctgctacagtgaatcaatgcgccgaacactgttcgggtactgtagcaaagtatttcgtaaacagtaatctttttgctgtttgattggttactattcccgtttactgttcccatctactgtatcgatttgttttagaccgttggatgtggatccaacagcaaacaacacaccctaatgcaaaagcactgtagctccctttgcattctcttctccactgcagaggatccaaattgattatccttggctttcctggtaaccttcctccgatcctctgctaatatatatcagtccactggccagtggacctcaacgactgatgatgatgaacctacgtgtgtgttgccaaatgccacacgtgctctcatatatggccactcttgaacactgtacttgttctcttttttctcctttaatttctctattgctttcttcttcctttgatgttgctgtcccttgtgatttgatgtgttgatggcttctttttgtcatgcatccatgtccactgccgattcttttccaacctctttctccctagcttccaagatggagatattgagctgaaacgcaaccagtgcaggacacctgtctctgtccctgtaatctctattactcctactacttctttctctgcaggaattacaggatcgtcgatgcgatgctatatgccgtccaattacacatgcagaaaacgaccagcttacctgcttctagatgattaagatagctgctcatggtaattactactaccatgttactgtatactccatccgtttcttaatatttaacttttttttaaaatatgttttactgttcgtcttattgaaaaaatttaagtaattattaattctttttctatcaatttgattcattgttaaatatacttatatatatacatatagttttacatattttacaaaagtttttgaataagatgaacggttaaatatgtgctaaaaagtcaacagtatcaaatatttaaaaacagaggaagtatgttttaacaagtaaatttagggccccctttgaatcgcagggttgaaaaaatggaggaataggaaaaacataggattctgataggaattgaagtgtaaaatagaggattgcaaaacacaggaaaaacataggaatggtcgtttgattggagcgcaggaaaaacacaggaatcggatgagagagatagactcaaaggaaattttctaagaggttgaagctcttgctatatttcctccaaaatccacatgcaatgtgtcattccataggaatttcataggatttgaaaagcttcaatcctttaaatcaaagagccaaataggaaaattttctataggatttgaatcctatgaaattgctacataaattctttgattcaaaggggcccttacattattatgacctcagggttcaaatttcccaaaattgtggggctatgagaacccttcatccgtacaatattatgtcagtcgaaatatttaattttctgaatcaagcaaattatattcaaatttaaccaaaatttgttcgaatactgacttatttcggtccgtaattccttttctatcggtcccccagaagaaatgcgcaagccgatatacagaaccctgatctcgtcatgaactgtaaaagatcccctaataataattaaactgctgctttatttgttgtatttcttttctgtttgtaaaattttatggtgggtaaatgttattgtcagtctagctatatgtgggcatcacaatcacatggatgccatgcaatctttgttagtttcatcttggtgctccaccattttgtcccacttacatgcatgcatcacaaaagcagacacaatgctcttttctttagtcaattttccaggtattgcccactaaggaagtaattattaacttaattatcttcctcatgtgccatatatttacaatcaagtcaaaaaggaaataatcacaaggaagactaatacaatgtgacttccgtgcgtagtggattttttttaaaaaaaaactggaagaattcctcaccaaaaagatgtgataatgaaagtacaattaataaaatggtaatgaacatgatataggtagcactagcagcttctgttgatctgtgcaaaaattcagatgatatgatactacaaatatatatatatatatatatatatatattcatggaattcaattagtcctatggttgagaaatctattactcgttttttttttgttttaagaatgttttttttctttctcttgccacggagactaaatattcagagagcgtatgtgaaattaaagaaaactcgtatcggtattatgtaatgatgtacagaaattaaattaggaagaagaacaagactatagcttgcctacgttagtttattatgcatcatatataaggatcagggtggctgcaggctagtttaggacagcatgaaaattagacgtacgtgcaagtcaacaaagtgcatgtatgtattatttatatatcctcatggtggtttatctcatatatacatgcatgtagaccctataatttctagatatatatgccggtggtggtgcttaacagatcatcactgacaaatataattaacgcaattaaaaaacacaattaatataaacaactactacaagtgcaaagctgatgagcatggcttgaccacaccactatagccatatctgagtgaccacacaagcttccaaattaacaccgactagtgcacgcatgcagtttgtatgtcgtcatgccaactcaacatatatataactgcaaattaaaactgtagcgtgcatagtttacctcattattaattgtgtgcttttgatcttcaactatatatatatatatggtgccaatgcctaccccgtttataacagacttgattattacaacatgttatttaattaattatagtaataaattaaatgttttagaaaataagcttaataaatatgttagaataacaagtgaactgaagtgcgctagaagaaagttttataagaaaatatgtatttgaaagacgttgagcaaataattcacgaaaataatacggtgaagtagctgaaagaacacgcagataaatataaatctcagtggattaacgtgcatgtttccgaacatctacacggtgtgatgttttcaaaaactgtttatatatgaatttattatgatattgtcttaaattcatttttaacttcatatataataattaatttatttgtttgtgccttcagataattatcacaaatcatgtctatttagtcattcaaaaaaaaaataacacatgagtattaatctacttcccctatctcaaatatagctactacaaagatatctttattttgggatggagagagtacctgtagccatgcatatatatgtcagtgcacgagagcattttaatttatatagaagttaatttagtctagttttgaaaatataagttatataagcacaagcatatgctccctctaggctctagccatatgtaatgtacgtaggtttgcatatgcttatatttttttatagtacacttgcttcatattaattggttgtttgattccattatctaaaattctaaattgttgcttgtgtgctggtatgagagcgacagtactgacacattcgatgcatgggatcatcctcggaagaactagtgtaagaataatcccagcaagcgagtatatatattcttaattagtttggttaattaatttctttcaccactgggttaagttttgctatttgatggagtacatagaatgcatgggacaaattatattaaacaagcaaaatatgctataagtatctcatatatatactgatgtgtcgttttcgcactaactaaaaggacactagtgatgatcctatagatatatctagcaccacatgtgcatgtaccccactattacaccttttctctttttaatttctttgcaaacaagacccttttttgactcttgagaacatgataaaaagatcaagcaactaacgagacgaccctcgtcaaaatttcaaaaagatataacggcaccttgctagcattcacacattgatacatacagtatatatttatatttatatatcaaccaatgttatgttctgtgaaatgtgtgtgtggtgatgtgtattgatgtgtgcgcgtatgcatatgttatctaataaagaaaaagggaaaatcaatgttgcgtttcgctagctgtgtttgtatctctcatttccaaccgcacgtttccgaactatttaaacagtgtattttttaaaaaaaatcttagaaaagttattttaaaaattcatattaatctattttttaagttttttttaattaatatgtaatcaatcatatggtaataagttattccgttttacatgggtggaaagagagtttctatacttaactaccgaaagcatcaacacaacctggtgttctattgatcgtgtcgcgcttatgcatgccagctccaacacacttcatgtctcaagatgcttcttaaatttatattttttaaaataatcggttccttcatgtatattacagtataatgtgatgctatatatatgtactgccacccccctttgtgttagtaatccttgttcagttaattaattagcaggctgctggtgccacaatataagtttgcagagaaaatgtacacaaatccagcagaaactaatcaacttcgttaaattaattaattaccttgaatgtaaatggaaatatgaatacacaaaggatgtgtttagatccaaagtttggatccaaacttcagtccttttccatcatatcaacctgtcatacacacccaacttttcagtcacatcatctccaattttaaccaaaatccaaactttacgctgaactaaacacaaccaaacatgaatgccacttgtacacacaatttgttcaggccccatttcccgtgaatttgtcgcaatccaaactgatcgataacatgcatgtgaaagtgaaagcaaaggcccttgtttgaaattaatctctgagatgcagcgcatgagatgtttggccggctgcagtgttaagcagtagcttttgtgtctccatcagtttgcagaaattctgcaactactactccactattaagcaagcaaatagtagtagacagacagatcgatgctgatgagcaaccctacataagattcatgcatattgatcaggtttgaccagctagctgatcctgacagacaaatgaattgatccatggatctgtatgggttattattatttcataaattaattaactagtagtaggcaataataacgaataattaagttagacttgctcggacttactattgtttttttaatccttgacactgtatatactatactagagttagcaatgttgggagatggatggatgggataatcagataataactattaagcacagttaatctgagcataataatacactacttaagcatagtagtgatccttatatatgtggaaaaaaaaactattgttggatgcttgcgattcagaaaatcagaatcgctagtggtagtagtactaatcatcatcaagcactgatcttagagtagcaggctgggcctacctgatttccttcgcagcaatgattttgggcccatatgccgtaggcctccagctccaggtgattatatatcaagttgggctataattaagcccatcaaaattgaacacccaccggcactagtggcccaactatatttgttcatattttttgtgaaaaaagtttttttaacaatggattacgtcggaccaaaagttaaaaaaaaaagtaataaaaaactatatatatatatatatatatattgattagttacctgacaagttaaaccagctagctaactacaaactaagtatacattgctagaaataattatgattgtattgtgtatgctggatggagtagacgactgcttatctatactatggtagtaaatatgtgaattttttttgaaaatatacaattttttttaccggaattgcaagaatatactgattaggggaagatttgagaaaatataccgccgtcgcactttggttaagcgagagcgcgatatcgcataatgaattagcgaagatgccagcgctatcgctaattgaaacagcgctatcgctaattgaaaccgcgagagcgctaacgcatcggtctcgcattccaaaagcgcgagaacgactcggtctcgcacgatcgtaccgcgatttcgcggccgtctgacgtgaaccaagaccggcgggccccaagcagtctcgagagcgcgtcccacctgctaatggaatgcatgagccatgcacatactggtatatatccatctatatgtgtgttcagccatatatagatgcatgcttggccaatgtataaacgtatacatgcatgagccaacaagaagatgatatatttgacggctatatatatgtgtatgcatattcgtatatacgattcagcgcccggattcactaacgatatatgtacgtatccatttttgattgagcgatagcaaagcgctctctcgctttgccagagcgataccgcgcgtcggtcttgcacattcggacagtgataccgatatcggtctcggtctcacgctttgcgcttgcgagaccggcggcccactcgcgtccggtcgtttcgccaatatgggtcccatgacatgctcagtctcgtgcgtcgggattacgagaccgatttcactctcgctcttgtacaccgcgataccggcgcgacaacgggtcggttccatcacgtggcactctcgctctatgaaagagcgatatcgtggtggtctcgctgtttccacaagcgacaccgccagctcaaatgcaccctcgcgagttgatagtgcgatagcgtggcggtatcgcattttgttcttgcgaacctcggtatcgctcttccaagccgcgataccgatagtatatttgtgcaaatcattctccatccggtatatttttgcaaaacaaatccataaacagtatattttcaattttttttcgtaaatatgtcacctcacctatttccattgtaaattttacaagttaccctttgaatttcttaatattaaaaggatcaaatagtcacataaaaaatcatattaagataaatattttctataaaaaaagatggataacatattaatacattttcgttaagaacattttactagtttggtcataaaaatctcctacccgtaatagtataaagtatacaaaaacagatagactaggctatgacggcgatgatgcacatactggcaatattattcatattgcgtcacaccaaacggaacggaaacgtacacgacacagctagttatagttatccagcaagagtacgcctccctagtgtagaagacgtatcccacccttacacgctctctatcccactacttttacaagaaagccctccagttttctcgtatttctcttgccgttcccgcgccaccaaaccaaaccaactcttcgtcgtcgcgccgcttccgttcttccggcggccatggaggacgcagcagcagcagcaaggcggatggagaggcttgcctcccacctccgcccgcccgcttctcaggtcagcaccccacacgccgcccagatccccatctctctctctcccccaccctctttttcttttccacccgatttaattcaggtttagtttagtttggtttgctgcgcgtttgcttttcgggaagctgcaagatgatcttgctcatctagtatccgaggttaccttcttcttgcaagcttggggattacggggagttgagattggggaggtggcgagtcaaccatggggatggctggacctaggttactactactactattcagttacttttagtttggatctccttcttgaattacctacgccgcggggtaccgatttcacagtgcttctgatcgaattatgttttagtttatcacttgcaatgtactactagtgtaaagctaccaactttactggacttggaggaggtcccgttagctagctttgggggaaccaaatctctggttttgctacttcccacagattctcaagtgaactgaaaattgacttacatttttttctgatgatatgctctctggacgacttgttagtttctgattgaaactttgaaccctgatactaggatcttacccttatagctatttgctttctactagtgatagtgagtagggaatgtgatcgacaattatgctactttgcaccttctctgcttagccgtaagttttcaggggagaacattttgaccagaaaccttgttagaacagcatttgttcaataaacagcaattgactctgccacttttgtagcgactacaaccatgctcttcctttattatgtatactttaaaacgatagttagccattgatctaggaagtttacaagcatacacggtatgcaaatatggccggaagataaaagcttacccttccatgttctctgctctctgtttataatctgttttatcctgcttaattttctctgtttggtgtatgtgaagatggaggaatcacccctcctgaggggctccaattgccgggcaaaaggtgccgctccgggtttcaaggtcgccatcttgggagcgtctggtgggattggccagcctcttgcattgctcatgaagatgaaccctcttgtttctgtgctccatctgtacgatgttgtcaacactcccggtgtcacagctgacattagccacatgaacactggtgctgtggtatgttccttgacattatgtttagtatccccctattcataattgaaataccacattctgtaaccgttgcattttgctactacttttatggtcagttgcaatttctataattttcagttgtatgtcttgagggagggtacatatgcttcatctatattttccttacataacatgtgaatcatccagaagacaatctagttctgacaaatttaatttttcaaaccattgattatccagaatgaaagaaacaagtaattccaatgaaacttgtctatctgatagtcatatcttaataacttaaaaggtactaagttggtgtctgatcattgagcggctactgttgatcaaaatacagatattatataatactgctagcaatacgtcgtagccttcatgcatatttaaagtattttaactattattagatttcagctttgtagtttccagatatcctttttttatcaccatgtggtattcctatagttattcatctgtttattgaaccgtaaaaggtatttcgatcattgtatttaattatgctaaggtctcaaatctacaggtgcgtggtttcttgggccagccacagttggaaaatgcccttactggaatggatcttgtgatcattcctgctggtgttcctcgtaagcctgggatgacaagggatgatttgttcaacatcaatgccggaatcgtccggactctttgtgaaggaatcgcaaaatgctgccccaatgcaattgtgaatgtgatcagcaaccctgtcaattctactgttccgattgctgctgaggtttttaagaaagctgggacatatgaccctaagcgccttttgggggtgacgacacttgatgtagtgagagccaatacttttgtggtatgaacttcaacagagtttgctttgtagtatatcattgtactaactttacatggacagtttctcattttttttttttgtctttgttttgtttacaggcagaagttcttgggcttgaccccagagatgtaaatgtccctgtcattggtgggcatgcaggagtaacaatattaccactcctttcacaggttaggaataccttccattgttgcaaatctgaaatctgagccacatatgtaggacaaattagtttttctggatatagacaattagtattggatcaatgttaccctgtttattttttcaaaagattgatggaattttactactattccccctaggtgaatcctccctgctcattcacctcagaagaaattagttatcttaccactcgcatacagaatggtgggacagaagtagtcgaggtatgattttttctttatcatctaatgatgcatgtttagaattgtattcataaagaagaaagggaagttggtttcacagtccctgatatgtatcatgcataatggttgtagttgtttgacttgaaagttaataaatctggaaaagaatcaacatgctaattttgtttgaatataagtgaccacttatagcatggatactttcaatccttgtacatatgcatattagttaaatgaatttcatggtgttaacaacaaagtcaagtattaagtgcatgtcgaactttaactaaatatgccttgaatgtctgtttgcccatattgcatacatttcatgttgttggcagaaaactactagttcaatgcatgtttaagtgtcgaaatccccctttcttcatttatcaatataaaggcctcccatgttctagatttttctgcttacgtttgcttttgctaggtgaaagtttaacagtagtctgtctaacggtaaatgtttttctatggaggttacagagttgtttgttggctgaagtttaatgtgttgttccctattggcgattcctgtgtactgttggtttctcaatgtttatatgttgctaatactgagcattttaattccccccttcctattatccatgtaggctaaagctggagcggggtctgcaaccctttcaatggttggtttctgtcacatgcgtattagcgtatgaaggttagttcttttatcagaacaattaagatttaacatggacaatttttcttgtaggcgtatgcagcttctaaatttgcagatgcttgcttgagaggattgcgtggcgacgctgggatagtggagtgctcttttgtagcttctcaggtttcttttctcccttttatgctggttatatttgtcatttgtgtgaacatatatttctaatttgcaaattttgcttgcggtgggtattgaaggtgacagagctgcctttctttgcatccaaagtgcggttaggtcgctgtggcatcgaggagatcttatcacttggtccattgaatgaattcgaaaggtttgtatgcttttccagtatttggcatgcataacatgcactcatatttagtgctacatgctcttatatgcttttcaatgatgttgatcctaaatccccacactgtgtaattatcaagctatcttctagtagcgcacaacgcttatatcgccagctcataacagtctttaaaaccttcatgacttgattgccagatcagtagatactgactggaagtctgcctaatggtttctattggactgggctcaagtactattacttgcatttagtagctcatagcaaatactgacaagtcccccttttgaaagtgaaaaatactgctgaaaatatgaatgcataatcatggcagactgcggccgtataacagtgcttagaaagagtcctgaaagtagagatgccccactacagattgtatggcttcacattgcaatataaataatactattgccaagttatctcttcatatccatactgtagaactgcaggatatatgacccctccgacaagaacacgctgcgtctgaattgaaagcctctgcggcatatatatgacaatatatgatgctgcattaggtccacagccaattaagatttgatatatcctactgctgtattgacctgcattactgattatcttcatacatcgctgtcatgcagagctggactggagaaggctaagaaggagctggccgagagtatccaaaagggggtcgctttcatcaacaagtgaggccatcttggaatgccccaatttagttcaacatggaaatacacaggctgtgtctttgcttcctggggagtgggaagaacacttgtatcatcttgtctcaaatgtaaaagctgcctacacgatgtttatacagctgtagcagatgcaaaaacacaagtctgctaataaaagttgcttctgaataaaaaggaaccctgctctgatctctgccttgttaattatgtttccctggacagtgaacatctcatcaggtgtaatttgatcttgtgatggacttgcaaattatagaggaaaaagaaaagcggaactaaattttacttcctccgtttcacaatgtaagactttctaacattgctcacattcatttaaatgttaatgaatctagacatatgtatgtatttagatatatgtctagattcattaacatctacatgtatgtgtgcaatactagaaagtcttacattgtgaaacggagggagtacatatcaagtaaccaagtggtgagtcttaaacagtatgccatgcacagttaggaacagtggattgtttcattgtttgttcatgcaccaatgcagaacgtcaacaagatcatgtgacgtgtgagacatttgtgatgtttggtagggttgttgctttcatggcaggagaaaacaatattatcttggaagcaaggttacttgttttgggtctgaacaacactgtgctcctaaatacagtataaacaagcctgcgtggttgggacatcaaactctcaagaaagcagcagcagcaaatgaccttcaatggcgacactgacgctgtcgtctacagttattttcaataaacaaaaacagagttgcaaacgtacaggcatgaaagccagtggcctgaaggttcagttcatcaggtagattactgtgttggtcacatcaaatccatcgtcatggtatacgtgcattaccagttgctttgatactgttttctgaatgagtatcaagcaattgcagatatatggcagcttgatgcgtgaattatcagttgcttgatactgcagttgatcaggtggaatcaatatatattatggaatactagctgcaagtagttaaccatcatggaaattcaggttcaaggcctgaaaattcatcaatctgagatctgataatattaatccctcaacaaataattgaaggcatcgatctggaccaagaaaaacaagagaaaacgtgccttttacagtcagaatgcatccattcagaactgaacatacaccggccagcagaaatgactaatgagacaattaattaatataaagttgctaatattataaactgctagctgctgcaacctccaagcctttggcaattaataaactatagacaccatgtcgatcctaatggatcgaccaattattgaagcctctcaacttttcatccatttatccatgcaggcaggcagcatgtcatgtgcccaattacacattgaataataattaattgtcgcgttgattggcttgatcagctaattaaactaaagtttacctagacataaaaattagtagtatatactttcctgagatatgcagcgctgtctctgatatcaaattgtaatttttaatgttgcttctaatcataattaactactactagctagcttgatactctactgcatccttaatatgaaattggaggactttgtctgggaataaccggacgggtccccgaaaaagatattcagtgttcatcgatcgatcgccctaatgcttcaaatcgtcactaccaaattaaacaaaacacacacacattaatacactcatcgaatccctcgaaatcatcgttagcatgttcttaatatcacgctttactccatgatggggaacaaggacgagatcgagctccttttgtgtattgatgatcactttcacgtgtatgttcgtttaattatatatattcatgtgtatatatatgtatacatgattatattaaatgggtaccaacaacttcgatcatgtagaatatacatatacttgatcgatcagatcttcatggctttgtgtcctaccaactaaagacatgctgcattttatgcgaacagcaatgtgccaactttgcactgcatgcatatctcaacaactttaattgtgtactcacaaaactttgatatcttcttccttttttttagagaaggatcatatcgatcgagagaggatccttccatgaattgatatctttagtgctgtactgtagagatcacgcaatatcttttaaacaaagagggccaattaaaatagtcatgcagaactaactgaaaccttaattaattagaaaaactatatatatccgacagcttagtatgaatatatgtatagtttttttcctgcatgcatgactcatcatgcacgagtcaggatgatatgtaccagagaatatggtgcgtgcattttgaaaacaaaaaatgtttgagggtttctaaataaatataatagcatatatacctgccttcagaagaatcacaaaagtcccaattatttagatatttatgaaattttatttagaattagatatgatcgagttttgaccatgcatacacgatctatatcattattatactacattattagctcggggtagatatatactatgatgcaagtcattatgcaacttgcaaattaaaacatattataacatgataccgaaggcgtccaaaatttgggaaaacagccacagcaagatgcaaacaaaagatcattttggtttcttcttgaattaatgatttggattgatcaacaaacatcaagtaaattaagaccaaaatttgcagcttgtattggctgtgcagtgcatggttgataaagtaaagtctcgtcaccatgcatcaacctcatcaccatttacctcacagtgcttttgctatatatgccggccgatcatatcatgaatgtgatgtgaaactagctagtagatcatgcacgagtgcttgacgaggaattcctcaccataagttttgtcgtctgatctccagagttttttttttatagtcgatataagattcctcaccacaagtaccatgcatgcatcaaagataagaggattaattaatttgcatgctcagatgtgttcacttggatagagacatgcgtgcatgggtgcatgctatagcttgagatcgaccaaacttcttcttcttcttcttcttaatttagctactctcttcttatttcttgatctgtttcttcaacactaccattattgtattggtccagtagtgctgagttaagcctcctcatgatctcatccactgtggaattgaatccctcttccacctgaaatacatcaccagctagcactgatcaaataagatgttaattaatttttatatatcctgatagagtggtagaatatcataaccaatatgacgcaaattaaattaataacagagagagagagagagagagagagagagagagagagcatgcactactatgccatattgtttctgacaaatgtacaaatccaacttggttaatttcagaagaaaataacatgcatacattttttctataggcagcttatgctctatataagtaaattgatcaaattgtaatcacgttggcctctcaccaataacatttataaaatgggggctcaaagaccgtacagatcgatcaaactgatcatagaaggggatgtgaatgtatggagtactagagaaacttttatttcttcgacctagctcgctgtcgatttcttacctgtcaacaattttcacactgcatttcgactgatttattcactaaatgactcaaccacaaatctagtaacaactagttttctctactactttaaaagcgcagtcatcctccttccatcttctcaccgtgggcttcttcgtaggatccactacttaattccaaccaaatccgcccagccagccaatccctaattatataggtctagcatatgctttattttcaatccatgcacccacccagccaatccccaattatataaaagaacccattctgtagacgaaattcacatgctatatatatctgcattccttgctctctcccatgctagctagcagcctagcacatgtttgagtccaacatatatatatttaccctgaacaagggcctctcactctagatacattgctaccccttattagtcagcagaattgtctttgaagtcatataaatatttttaaaagcatgaagcatgcctgcatggaaactacaaagtcttcattcatattatttattctatttggtccatttaggatgaacgcatgcacaactctctcttcacccctcaatgattttttagaatttttttgatcccatgaatggagtaccctgcagatcagaacaaagtacacctgcccatacaaacatatgtacatagttaattgtttttgagggatgtatatagttaattaaatggagaaaaatcttaagaaacacgtacatgtgcactagtattttttcctcagctgcagcacaaatgcagttactaatactttacaccataccaattaattttgaggccctagcttataaatatagcaggaatggagtgaattgtatgtatggaatggaattgcactcagagtagtcttaattttcagcagctgcatgcagcaacatgtatatatctttatatttttatatagcatataatacatatctcttcattattattgtagaattggtagaaattctatgtatgcaaaccatgtagagatcgatctagcttgatccgatccatcaataatcagttggagtccggactccggatcaagtaattactaataataatcaaggttaattaatttgctatatatgtagtatatgtgttctagctggaaattacacatggtaatttgatgcatatatataagcaaagcaatgcaggatggttagagagcgagcttgccttagcggtgatggtgatgatgacggtggaggccgggaatggcatgacgctggtgtgggtgatgcccagccggagctcctccacctccgacagcaacctcaccagcaaaccccgcgagttcccgcactgcacccgcaccagcacgctcctctcccacacccgcacctcgatctccggcacccgcccttcgccgtcgccgtcgccggcggcggactgccggccggagcacgacgacttcctcaccaccatggccgccggccgcccgccgccgtcctcctcctccagcgtcttcaccttctcctgcaactccttcacatacttcaccgcgtccccgaggatggtcgccttgtccatctgcacgaacacacgcaatattatctcattaattcagtgcaattattaccagcatccatcatatctagctaattaatcactgtacttgctgcttaattaggcactgcctttttctgtagattagacgaccgactgacacggtcaacaacattgtgatttcgatctgcagattgcaaacgtgtgatttctgtacttcatttggtttctttcgggtttgtctttcaatttgcccacaaatctcttggggttaatttttgttcaagttaattagatgatttgctcactgaacagtagatcagtactagactgtgcagctagctagtaataataacatgcaatctactagctatcttgttgttagcctaatcatgcatgaaattagaggagaattagaagaagaatgcatccatggattgaaactatagttaacctttttgaggccggggatgacggtggagagctcgatgaaccgctggttgatcttctcccgccgccgccgctccgcgattatgtggtcctgcacgtatcccggcgccgccgccgacgacgacgacccgccgcctcctcctttcttcaccgccgctctcgctgtcgcggtagtctccatcgcctgcagcggcgccggaactactccgccgccgcctccaccgccgctatcctcggtggtcggctgcgccgacgccgcgctgaagttccagctcatcggcctgtgccccctgccgccgccgccggtgacatgcggggaccacccggcggcggccgtggcagcgccgccgcctgggctgtcgctggagctccagctgttggcgcggtggacctggtccacctgcactgtcaggtcccggaatccgccgccgccgccggccgccgaggcgttgcggagagcttgcagcgacgggaaggcgccgctgtcgccggcgacgtcagtggcgtaggctgcggcggcggtggagtcggaggggagctggtgcagcgtgtccatcgcccactgcatgaagaagctcgagtcatccatgtcgtctctctctccactgcatcaacaaccaaatttatccaatcaaaatatatatcaacaaaatctgtgtataaccaatcctatctggaacagatcaagaaaattgtattcaatccgcaaaacaaatcaaatcggataataatttgtgatgagagagagagagagaagagaaatgaggaataatattaataatcaatcaacaaagacaataagcagcaggtccaacaaatcaagattaaagcaaaagaggcaaagacatcaatcatatggacgagacagcgaacaaagaatctgatttgagaatttgagatcgaggaggatacatggatgtcacggatgaatcgacatgagagaggaggccagccagctggagggaacaagatgtgacccaaatacatgtcgtctcatccttttccttcctttatttcttttgccgcatcgaaagcaagaagcgagaaacaagcaagcaaattaagctgatgcatgcatgcatgtagatttacctgaaattaaacaccttgagatttgctttgctttgctagcttggagatcaaattaagcaaagcctcttgctcaaatctggaggcagattgatctgttgctgctcctcctcctcctatctagtatagtagtattatgttgtagtagtagtagtagtgtgtatatgtattattgccttgatagcatttgcagctgaagcataagttgcatctggatcgatctatactaggtagtagacgatatatagtgtgctcattttttagcatatatggatggatccttgtttatcagcgtcgacatattatgcttctccctctctttgtctactaccgcacacggccaaacgttcgacacagaaatccgcaactacaattaaaatagggcggatggagtatatgtatgtttttcctcgttaattatttctctccatcacacacactacacatctctttctacaaaagagataaaactagttagccagcaaaagctgaagagaagaacaaacagaagaatagttttctctctgttgttgtgtggcctaatcctggcaattaattattatagaattggttatactgtgtacttcgcttttacacctacacaccccacagagaaaggtgtcctagtagtcgctataattgcagtgaactgttgatctgacacgacactatccatatatttataaactatagccatgatttaaccgtcctcgccctagccttaattattcgatcgagtagattgcaactatttatatatacggtagtactatataatatatagacgtagattatacatgtgtgtgtatttgtgtgctgatccacgttccaagtcaacttgagcttatattatataatacaaataagtttaattaatcaattaattagactagctagctacgggtagcttgttatagttaactgtggaggctcagtgaccgtttctagggttcatactggcatcatgtgcattatgcatggggagctgatcaaaagcatatgcatgagacacatatgcaagagatctctagaattcagactgtaggtagacatagtattatgtcactccaatatggcaaaattgcaaaattaaatcaaatgcaattattggtagaagcatcttagctagctagcgttcacaactatggagttaaatttctgaaatttcaggtttaatggtgtcctgggattttttttaaaatttttgaacttttttaattttaaattttaaaaataaactcttctaaacttagtatagaattttaactaaaaccttttagttacgccagctcaccatcttatttcaataaaaaaatttcaaatagtttatttttagaattaaaaaaataaaaaagttcgtgtcttggtggttcctggtaggatgatcttctgaccaaaaaatgactctttttagtatttcacgattttttttaaaaaataatataacaattttcctccaaattgttacctggtatgttgaaaacttgacctactttttatatatctatcaattagtattgcccccatctaataggaaccgctgcttttaaattaattttttcaacgaactggtacaagacgatgctaatttatcaaatagaggagtaaaagtatttacaggtataaaacctaaaggagaatatacagggcttaaggtaaaatttcctctagtctctttgctcccacgcgctcctaagtcttcccttcctcttttatcttggtaataaacgacatcatcgagagttctttatgctggaagattcattgatttctttctttccatatttcccatatttcccaataagttagcagtaggagggttcgcgttccttgtttgggcactcctttgcacaagaccaaaacttcccaccactcatgaaacatcgttggcttccatgatgccggtttgagttgttcttgtgtgatccaagttgcaatcatgtttcagatccttattgtgtatcttcactctacgagaagatggaatgatgcctttaggacacgctgatatagtggacaatatgttttgtttgactatccccttgccgctagcctgtaggacgtcaaaatctattttacatgagctaggcaaagaatttgcatttgcatgaggcctaaggtttccatatcgaccattcatagtttctcttgatcgagccaagggattgtgctttgtacgctgaagctaccgagtatatcccattgtttgtgatgttccatgcatgttatgttgtttggaaagagttccacctatttttctacgtttgaaaggaatctgttcagattcgttatattaagatatgtcacatttatcttttttttttaagatgaaggaagtatacaacaacatttaatatatagtttattattgcccaaatgattcaagatgctgaaaatcaaggagatatatttacgttaaccactagccaattttattttgttctgatgagtagtttccatcaccttgtcatctcaataaatataacatgacatggacctgaggcttcaccgataagtgagatctactatatatatttggtatgcagatcgaggatcggagggaaaaaaggaaggagaagaagaagaagcattaatatataatattatgacttaaataatctagaaagggatatcttgtcccttgattttgcagtttatttatactaatttttattggtatagccagcgataatatatatgacacatgtgcgcatacgtacatcgccatctagcgccaaacttaatacatgcatactttcataggtaatgtatttttctgagaccagatgaaattaagataatgaaattgcattatggtcttttttacttgttataaaagttagacatcgatcaactcagacataacaaataatgatataggaacacacggtatttattaacgaagttcagtcgaactatacatcttcagagctctgattatataggaactttttcaatcaacattacacctagctgctaagagtccatggcctcgccaccattctctctctatgtatcgccgtatttatactgtggcacctttctctttatttaaaatgttatcgggttatagagttcaactctaatttcacccaccaaatttaactgtagttaataagatcactagctaatatatccaaacacatattctaacattaaccactgctccctccgttccaaaatataagcatttttaaacttcgacacggtctacgagatactactttgaccaacaatatctataaaagtaacatgttttaaataaaaagagttgcgtattatgatagtttgtttaatgataaatctagtaacatcaattttacatgattgatcttttttattttttttctattaatagtcaaagttaaaaatgtttgacttgtcgctatgctaaggctgtgttcgcatctcaaggatggaaactcattctcaccgcacggaaaacggacggtccattagcacatgattaattaagtattagctaattttttaagcaactttcgtatagaaattttttgcaaaaaatataccgttagcagtttgaaaagcgtgtgcgtggaaaacgagggagatgggttggaaaaatagggtgccaaacacagcctaagaatacttatattttgggacggagcgagtataattcattgccacagggagcgagctgagactgaccaatatatacagacatcaggccagcttgtactcctcagagccagcatcgcagcaaccatactataggtctacagtactatatatgtacagttcacttcacggctcagcttgagctggttggattttctttttctttttcaattccttcatgtttgatatagcccgtgcttaatttaaggggagttttttttacaccgaggcgccgttaagaaaaaaaaccattaacatgtaattagttgatttaaacctgaaaatgatttattagatatttttgagtaacttctaaatagaaaattttcacgaaatgtattgtttagccgtttgaaaaatatgctaacgaaaattaagttagaatccgtatcttaattaagaaaaagaacggagtatgtctcgtactgtgtactttcggtcaaaatggatttgtgctccctttattatcggcaggaggagtttccgcgcgattgatcagctagctgattgatcatcatatcggcgatctagctagctacttcgagtttgactaagtttatagaaaaaaatagtaatattttgacccaagataaatttattataaaaatatatttaattattaatttaataaaactaatttggtagtgtaaatattactatatttgtctataaacttagtcaaaattaaagcaatttgattttgagtaaagttaaaacatgttataatctgaaatggagggagtagtttattaattattaattgaaaagagttgtaacaaacgatgtactgatgcaacagtactaaggtgcaaggggggttaaccgaatctgcagagcttttttgtcgcctttgtagtacaacaagataatgttcttgatcagttagtactccctccgtttc

SEQ ID NO: 8787 - DNA, 54508 bp, Oryza sativa
ggaaatgtgtttggcgaggattcaaaggaagggattgactttcggatttagatttcggagacttgaattgggagaggagatttgaggcggaggattttgatttcgatgagagggaacaacgggatttgaattgagatcttggcacaacttagactcgcacacaaagaacgaaaattttcgcaattaggattttgccgaaatagtttttaacaactcacgaaaagcggagcgttacaagtagctttttaaaatacgtgttaatagaaatatagaagtagctagggccctgtttagttccaaagttttttttctaaacttccaactttccatcacatcaaaccttttatacacacaacttttcagtcacatagtttcaatttcaaccaaactttcaaacttcagtgtgaactaaacacggcctaagttcaattacctcttattagaacgcgaccttagaatagcaaaaggtgtatgttttggatcataatatcctataattaataaactcgcatcagcaaccgatcaggggatgtagctcaaatggtagagcgctcgctttgcatgcgagaggcacggggttcgatcccccgcatctccatttttttttattttttttacttccctattccaagcactatcttcccaactgttctgaatgttcaagaccgtttatctcaactttctgaatattttccttattctagtaacttgtaaaacgagatggagagcaatgagattattatcagtcccaccatgattatacatatagtcggatcaattaactgcgcacattctctgaactttcagaatattttgtttaccctgttctaagacgagaggagaacaatgagattatctgagtctcaccacaccatctgcatcttttgcatacatacgggtgtgtttagttcacgtcaaaattacaagtgatgtgatagaaaagttgaaaatttatgtgtgtaggaaagatttggctgtgtttagttcaatgtgatagaaaagttgaaaatttatgtgtgtaggaaagatttggctgtgtttagttcctgaaattgagaagaagtttgggaaaagttggtagtttgaaaaaaaaaagttgagagtttatgtgaaatgtgatagaaaagttgaaaatttatgtgtgtaggaaagttttggctgtgtttagtttctgaaattgagaagaagtttgggaaaagttggtagtttgaaaaaaaaaagttgagagtttatgtgagtaggaaagttttggatgtgatgtgatgaaaagttgggagtttggggaaagtttggtgtgaactaaacagagcctttaatgtgatggaaaagttaaaagtttgaagaaaaagtttaaaactaaacaaggctgtaatagatcaattaactgaacacgctactagtctcaagtgcaaatcagacgtatgtacacatgtgtggagattatgggtaccccatacccacacggcatggttatctgactagttataggggataacttatatgtatgtaatatgtaacagatcataacttgggtgttacgtttccttgtatattacggaacggcctaaagtcctggttggctaatattgtaaagtagatttaggaaaccgataccgtattggttaaggtttctatctcgtaatcctgccccccatcctatataaggtgggcaggaggccctctagggggcagatgagacaacctgatcgtcagatcaatacacactcggcggattcaaatccccaaacaggagtagggtattacctctcattgagagggcctgaacctgtctaaatcctttgtctccacatccatccacttttaggtctcgtgcgctaccccgttttattattgccgaattcatgtttcgacagttggcgcgccaggtaggggtaaacgtcgagtttcctgacgacgagtgcgatggaatcaactttatgagtcgccggcttcgtcttcgctttgggagctccttgattcctcgccgccgacgacttcaacaagacgaatcgtcgctgctattctctgcctgatcttgttcgcatcagcacgacggcaacgacggggcaacgacagttcgacggatttgatggtcgtcctcgtccaccaccaagcctactggtccaatctacccaacgaggatgccatggtgttgcaagatggatctacaaacacgaagcatgccaaaaccgatctaatcggatgcataggagacggctgcagccacgccgatgcctccctgccgtcctgcgtcgtgctgatggacaccaacgccgcccgcgactgcgacctccgcctcctccgctccgtctcggagtcagtcgaagagatcaatctcggcgagttttttccttttaatctccgacttcgccgggttttttccttttcaacttattgttgtttattagattgatctctaaatgtcagattaatctctcttggtattttctgctgtttgcatgtaacgccgcggcactactcttgccgactggtgcttccgtctgcatggctggcctattaagccgccgctgttgggcgtctacgacttcaccgtcggcctgcctccgtcgccgccgattggtgcctccgcctacacggctggtctattatgccgccgctgttgggcgtctacgacttcaccgccggcctgcctccgtcgccgccgattggtgcctccgcctacacggctggcctattatgccgccgctgttgggcgtctacgacttcatcgccggcttgcctccgtcgccgccgattggtgcctccgcctacagggctggcctattatgccgccattagtgggcatcttcgctttcaccgtcgacagccttcgtcgccgccgactggtgtcttcattgttattaatggacgactttgttcctacattggccacctctgccatcaccaaggggaatattacaaagctaagtcatcatttattttattctttatatgatatttttccttttcctctgcctcactacaccaattggtcttccattgagtagtgagtcgggggctacagatgttatatcatattttttataatatttatcttgattgcttgcgacataatctgagtacaaaagtacctatcgagttatggagttctatcttcctatgctttccgtttggtttgccaatggatggttgcctttgggccgattcctagcacccgggggctcgttggatggaccgagtaacgcaaggtgctaagtattattcggaataaatcaaaagcatagagatgagataaatttattttctgctcttaataattgcaaaagtacctaagtagtaaattctgatccgtgaaactttgttccattaatgacgaactcatgtcactcatatgcatgtttgggaaatgcctaggccgactcccgatgcttgggggctatgactagtcggacagagtgtttaaacgtacagagtcatctgctcggggaaatcaaaattgacaagaggagaaatacatatttatcaatattttaaaatacttgattttttctcgagtattatatttatatcagatactactcatcctatatgtttgttctgcaggatccagatccagatatgcataaaagggattcatggctttaagcttatctcttacgctccaggaatggatcagtcagaacatcaccaaccggccgcctcgtctgccgccgactggtgcttccgcctgcacggctgacttattatgccgccgttgttgggcgtctacgtcttcaccgaccggcttgccttcgccgccgccaactggtgtttccgcctgcacggctggcctttaatgccgccgttgttgggcgtctacgtcttcaccgaccggcttgccttcgccgccgccgactggtgtttccgcctgcacggctggcctttatgccgccgttgttgggcgtctacgtctttaccgaccggcttgccttcgccgctgccgactggtgtttccgcctgcacggctggcctttatgccgccgttgttgggcgtctacgtcttcaccgaccggccgcctcgtccgccgccgactggtgcttctgcctgcacggctggcctattatgctgccgttgttgggcgtctacgtcttcaccgaccggccgcctcgtccgccgccgactggtgcttccgcctgcacggctggcctttatgccgccgctgttgggcgtctacgtcttcaccgaccggccgcctcgaccgccgccgactggtgtttccgcctgcacggctggcctattatgctgccgttgttgggcgtctacatcttcaccgaccggccgccgcatccgccgctgactggtgtcaccgcctgcacggctggcctgttatgacgccaattgatgctatcttcttcacggctggctacatcaccgtcaccgctaataggcatcatcatcttcaacacaagctgtctacgtctgctgctgactagtgccctcacctctacgtctggtttagacagctaccactactgatgaacatcatcgtcttccgtcgccgactggttatgctgccgccgactagtgcttttatcttcacaactgcgcgtcttcactaccagtttgcttctgtcacttcatcacggcaatgcaactttgtcatcatggatttctacttggacatcttcaacatttatcttcaatcaagcaatgactactcgacgataagaagctataattctcgactctatgttcagttgtttcccaactaaacaaagagtcgggggctacacaaatacatggctcaaaattcgacaagctttatgtcaaagatggagcaatcaattaatcagccaacgagtcaactccaggagtcattatcttcatctttgcttcggagcagatattctacttcaacaacttcaaatatttcggtttagacgagttgggcaacaacatcaactctcctccaattatttgtcttcacggttggcctactacgcaactgccgatagaggatctcatcgttatcatcggctgctacatcgttattgactggatcactgacatcgtcatcttcatcaacatcttgtcaagcctcatcaacatagcctactctgctgccgttgatgggaaacttcgtcatcatagtcggctatctctgttgccgctaatcatcattaccgtcggatgcgtttgtcgccgccgattattttcttcatcttcatgattggtggatttcgccatcaccgttgatgcgcgtctacgtcttcatccttgtcgtttccgtcgttgcgaaggttcgcgagtgcgccggaagtattcaagaagattaattgaagaccgattattgcaagttgaagacaagttgcaaaggagaagacgtttggcttataccccagttgagctgcctgtgggagtggagccggagcttcgctagattttattttccgctgcagttttcttcatgatgaggactaagtgcctcataagtaagtatttatcgttttagttaatttgatgaatctgtatattaaattgtcagtttgtgtacctcggctgattcctggacgaggattttatgcacaaataagttcggaaattactagtgaatttccgggcgtgacattttgtcaccaccgactgttctttcgttgttgttgggcgcctacatcttcactgctagctgacctgactgttgccgactggtttcttcgcctccatggttatgcaacttcattacatttgattggtggcatctttactaccactgacatcttccgttacttctgatgagcaatttcgtcttcatgttggtcatttcatctccatgccgactgcgtcagctattgccaatagacaattttgactatgatagaaggacaagctatatgctcaggggctcatcaactcaagcgtgaggattatatctccaatttggacttgttccggatacattccacatggattcatagttatgagtctattttctatgctcaacgactggaccaattattattccccgtaagggctatcaaccgaatacttgcgccattcgggattcaattattatatttattttggagtatcccataagggataatcattcagatcagaagctattcatatgagctacacttggtctatattacccggaagatttattactcgggagcatgttacatgcgtcatcctttaaagggtgtcgaaggcatattttttggcctaggcctaatatgtctgcagcccatattttcaggtgtggcctgtcacgttcttttagggacttaggcactttttgcttaggccaaagtgcgcgtgatcaagtgcccaataccttaaaatccttttataccgcagttacttaactttttaggagttggtacaatgcatcttaaaaggtgtcaaacagtaaagctttatatagctgtcccgctgacttttttataagtcaaggtgctgtttgggtttttaagcaattgattggatacaatattattgctttttgccacgtaagtgtgcatttttattgaccaatattatggcttaggctgattatatattgtgatcatttttcaggcggttggtaaatcctttatgagtttatttactcggattttataccacatatgccatatatttccaggtgtggtggaaccatgtgtcttctagggacttaagcacatctgttaaagcagtgtgcgcatggcgtatgcccagtactttgaaaatttctttattcacaacatacaagcttctttatagctattttgctatgtgaattttcaatgatgtagccaactttaggttacactcatcatattttacaaagcagtcggtatatcacttggatcatattattcagggattcacaccgcatctgctacatattaatattaagtcgcttggttgactacaattatcgaaaccactcggtgcatctagtcgatgcacctgactttattttttcagccctccacagtcttctgatttagaaaaagtactcgggagatcatggcgaagatgattgaagcactcggctttggagtaatctagttcgagagaagattatctttctgactgtgaaggtctcaggggctactgtggagattatgggtaccccatacccacacggcatggttatctgactagttataggggataacttatatgtatgtaatatgtaacagatcataacttgggtgttacgtttccttgtatattacggaacggcctaaagtcctggttggctaatattgtaaagtagatttaggaaaccgataccgtattggttaaggtttctatctcgtaatcctgccccccatcctatataaggtgggcaggaggccctctagggggcagatgagacaacctgatcgtcagatcaatacacactcggcggattcaaatccccaaacaggagtagggtattacctctcattgagagggcctgaacctgtctaaatcctttgtctccacatccatccacttttaagtctcgtgcgctaccccgttttattattgccgaattcatgtttcgacaacatgacgtctcaagtgaacagcggcacgcaattcaacagcataggaaagttgagatcatacatggttgcagcgtatgaacggcggaaggaggtaggccgccggatcaggcggtcatggcacggcacaagagccacccaactcggtaggctgctatgcagagctaattcgtgagacaagttatttaggcctaattaatttataattagcatattttttactacagtattatataggataatcatagattaattatactctatagatttatctcataaattagtccagagttatgaaatgggttttatcattagtctacgtttaatactctaagttagtgtccaaacatccgatgtgacacggactaaattttagtccttctaaattagtgtctaaacatccgatatgacatggaacaccactaaataccactaaataatgaggtagtcatattgtacaatagtaatctgaatgtgacacaacatggccatacatacatcatagaccaagaatgaactctttatactacatactagtctgatcacgcgcttgtttggtcagaaacacaagagttgcgttgaattgactgaaccaacgccaacgccaacggccggccaacatatttgactcccctccaaacatacacacagtattattcctcaccgccctaccttttcagttagcttcagcctcagcttctgcagacagtgcagagtacgccattgttcatccactcccattttgcaagtcagtgctaaccaaaaaatccaaaataaaacacccatcgtttcattcgcaagtactgctgctgtaatcagcatgcaagaatcaatgttaacaggctactgattgagttgattagcagctcgaacccttatccctttactggagaatggaagaagaggaatgaatttccatgcattcattcatatagaaccagcaggtagattaacgagatgttggcagaagagaaagaagtaacaggacacgattaagagtctcctcaagttagacatgctacagttttattcattactaatgcagaccaatatatgttcagtgttcatcataagcacaaagccacaaacactctgacagcgagtgtgttcgttgcttgctcaggcagctagaaaatcagtaaagtgttggtgcttcttcgatctacaattgttattattgcaattacaggaagaacaactagtggtactaacctgactgtactgctatcctgtatgaaattatacatttgtataggctactgaacacgaacaatcaagccatgcatcaccatcttacacttgattacactaacttgtcccgatcgatcgatattgaacagcaaaactaaactaattttttttccctttgcgccggcgagctatgtagcttaggccatggcagccgtggcgggcggttcagatgagggcgccgtgggcggcgtcgagggaggcggccatgggcatggggaagccgaaccatggcgcgtacagctgggcctcgtcgacggcggggcgcacgggcacgggctgcgccggcgccacgggctgccttggcggcggcggcgcgggggcgcccgtgagcctctgcacgaggtccctgaactccctgggctcgacgcggtacaccttgggcggcgcggggcctggcgccgccgacggagaggctcgccacggcttggccggcggcttctgcaccgccctgagcgccgcctcgtgcgccggccgcctcgcgtcggcagcgtgcatatccattgaattgaagaagaagaagaagctaagataagcagagtgagagagaggaggaagaagaagagagggcagagcagaggagcgatgggaggaggaggaggagatatatagagtggtgggttgggcgagggcgtgtggagggggttggattctagaagaagaagatgaagaggagaggtggcgggagaggaagcggagtggcgggagtggcggcgagcggggggcaacacgtggaggcgggcggtcaatggtggcaggcaggcaatggcgatggcattcgctaatcgcgcgtgttgcacttgcattgctgctgcattcctaaccatgcacggctctctctctatatcaaatgaaatctagtatccatctccatctcattggcattggatgcaccgcggcgatggcgtagcatagcagaagcaaaataagtgatgtgaatgatgaggcagttgagttggggcggccacctcgctcttaccgatcaacaagggcaagggcaaggccttgttgatggctacgctctgcctgccttatatcatcctcttatgtaggagtataacatttctttttcattatctacttacaaactacctgaggatgtagtggctggtttaattcattatttaaatatctaaatatttttaaaaataagcgtagtacaattcgttacttctagcaacctaaaagatataaaaaaagagcagccaaaaagtgttccaacacatatactgtagctctcaactctatcctaatatataaaatgggcgcacctaagcgtcgattcgttcagaaaaaagtattgtagttacagagtaacgttcaaaaatcacacgataacgcactattttcgcgaagtgaaggtggcgggaccaaatcccctcacctatgcgtgtggccataatttttttttcttactagtttgcatgatttgtgaagcaaatctaacattcgaaattatatgaaagttatattatagttacataccagttacaaatgcaattacggtataattatattgtatttatatttgatatttacttggacaaaatttattaacaaatattgttgtcaaaatgacaagagcttcacgtcgaaggacgtggttccctcggtggagtgatttgaacaataaataacatattaatttatgaaattttttagggatcccccttacacaaccctagggggatatttatagtcttagtacatgcctatacccactagggttcaatatgtacagagaaatttacattatacccttatgataaggatattagagggacatgtagtgtccatcccaactatattccccttgaaaggcccctggcctggcccataataggcgaatggcaccatgggccgtgctgcttggcgggctccctggcgaagccggtcttccatggggcgaacctttcgtgctccgccttgaggcttcgcccagaggataaacttggtggcgaacccccttgacttcgtcttttggcttcgcctgatgcagtggcttgttgatttaatggttttagcaggttcggccgaaggctctcgtggcatgccttaacaaatatatagcaaaattatccactagatggattttaagtcctacctagatagccgccaggtcactgaatagtcaggtacgtgcagtagaaactctttttttccttagtcatgtataaaagggcctccttttactttgtgactaaagaacatatatattcatgtgaaaccggtgacaaagaagtatatttttaatttctttttctttcccactgttcctactgttctacatttccctcgtgctagcatacgtacaatcatgaaatagaagcacgcatattagtttcattcattcatgcatgcattcaaatatctcatacgcaacctactatttctgcagctagcgagcaaggttttctcgcagcctaaccaccgtaccacaagactattctctctactgttagcttgtctgaatgtctgaagaagaataactaacaatcaggttcaggttgagtacttgagcacgcacgagcggccggcccagtcaacgatggcacacgcacagctatggacattccatttctctctgtacgtctcgttatcattctgaaacgaaggaatttcatatgagatttgcagggcctttaatttgataattaattgaccggttgactatatttcagttgattggcgaattaaccacggacgtacagttaatagtaatactccctccatactcacaaagaaagtcatttagaacatcgatacggtctccaaaatacaactttaacttcttttttctataaaaatattcattgaaaagtgatatatgtatacttttatgaaagtatttttcaagacaaatctattcaaataatttttatattttcaatctcaacaacttaagagttattcatgatttatattcccaaggtttgacttaaacattgtcctaaacgacttcctttacgagtatggagggagtacaagttagtactccctccgtttcgaaatgtttgacgccgttgactttctagcacatgtttgaccgttcgtcttattcaaaaaatttaagtaattattaattctttttctatcatttgattcattgttaaatatatttttatgtaggcatataattttatatatttcacaaaagtttttaataagacgaacggttaaacatgtgctaaaaggtcaacggtgtcaaacatttcgaaacggagggagtataactcaacacgttcagttcaatccggcacgtacgcggatattcggtcaaatttgatcaattttttttctgtaatttcttgtctgcaggctagaatggtgagatgatccaagtccgtcgtcctgctctgaatatgtcaaaacttgcgcttggcctggactttccagaattccagtcgtctctcgtctcttcccaaaaaaaaatctctctttttagcttactttcctttgggtgcattttgtttatcacctgattgttcttcacagtccaagaaaaattctatttttttccagtttagtttcctttggctgcatttttttatcaccagattatcttcacagtcctaaaagaatatctcacaaaaatctcatttttgggcttactttcctttgactgcattttttttggtttatcagaagattactcttcccagtccaaattttttctctctttttttttcagcttcatttcatttagctgcacttttgcttatcagcatgttattcttcagtccaaaatattctccctttttcacctcgatttccttacacatacgactagtaattattcctaatgcactgtacagtttaatcttttgatacctttctctaatcactcccacaagatgtatgtacagttcctggatgtctcctggaaggaggagatcaggagatgaatcccaatcagtctctatctcccttcagggacagagtaatctactactagtatagtctacggttagtggggcccacctcaaacaacgacatgcaagaacaggaggagcccacaaactgataactgaaatcatggtcttcttctcaatatcacccccacctccccttcaattatatacaagtcaccctttattctttttttcctctcttcttaggctgtgtttagttcagcgcaaagtttagattttggttgaaattagagatgatgtgactgaaaagttatatgtgtattacaggttgatgtgatggaaaaggactgaagtttggatccaaactttagatctaaacacagccttatactagtgtatccttttggatggcaaagtaaaagcagaggttgacaagcacatagccatgtacatcaagtcacatgtgggtgtgcactttgcacttcttttctatttggcaggtcataagagctttgtcaaattcgagagctctttggtgaatatatagctgcaactcttgtagaaaattaagaaatagttagttcaagtactatccgtgctactaataaagtatgttttcttcgcactatctacgatgaaacgaactctaaaaacagtagaaagttacataacatatacgtgcatatggtgcacaaacaaatcatctaccaaagcaacaaagtcaaggccaaatggatagccaaaaaatactgcaagtgaaacacatcgtagttcactcgaaattgacgcttcagaaaccaactggacagccaaaatattgcaagtgaaacacatcttagttcactcgaaattgacgttttcagaaaacaaagaaagggaaattttttagtcctagaaaaagcatcatcgaaaaggaatccggtggaatttgcgaatgtcttgagggggagcactgaaaaagttgtccccaagtaggcgtaggcaacaacaattcaaccatggccgtgctgaaaagccaaatcttccctctctaatctccttctttcctctgctttcctctaaatgtccagatggtaccaccacccaagtactccgattttttcagctcggcgattgaggaagatcttctcatcatcaccaccaccgtgctaccctagcctaacctagaggccttcaacctctgctcgatcgatctgctgctgcttctccaaggcgagcttcgtgatcaaaggtccttattctctcatcagctctgctctgcttggttttggttttggttcattcagtttgattcatttgatggatagattggcaaggagtatgagtatcttcttgtttccctttttgcggcgatttgctgctcttgttcgctttcagttcgtctctcatctttatgcgtttcttggctcccggtgaaggaatcacgattcaggaatctcggactccgtgattttcaccagagaaattcttttttttttaacccactcatcaccgtgtaatttttttaatttcttctctgcttcgatttcaccgaagggcagaaaccgctcttccttggacgtaaccgcttctcggatccacacatacattaattttttttgcatttttgtttaggataggattggagccaataatattgtttactagtaggatttttcatttttcaataagatgtcttgttcttggatgttgccatggacagcatgcaaggaggggtagcgatggtggtgacagtgaacggcggcaatggcaaggacagcttcggcaacatggcgaggccgccgtcgaggagcctcctccccctcaagctcctcaagccgttcctcatcttcgccgtgctcgccaccggcttcctcgccgccgccgcagccgccctcctcctcctcggcggcggcgctggcgcctcctacgtccccaacgtcctctcggcaacggcgtggcagcagcagccgcggtgcgcgcagcagcaggaggacggcgggcgggcggcgctggagcggtggacgcggctaccggcggcgagcgcctggcacaacatgagcgacgaggagctgctctgggcggcgtcgatggagccgcgggtgcggcggtatccgtaccggcgggtgcccaaggtggcgttcatgttcctcacgcgtgggccgctgccattggcgccgctctgggagaggttcttcaatggcagcggcggccgggagctcttctccatctatgtccactccacgcccggatacaaccccgacttcccgacaacctccgtcttctaccgccgccaggtgcccagccaggtactacaaactcaaatctcatatcaaatttgattagtttccgtttcaaatgcgagatgatttttttcatttctcaattaaattaaaagattggggggaatttggagagcgttgagtcgggttcgtgtccagatgaatgttcagcttccgtggcatcttggcaagtgcagtgcgccacgaatgcaagggtgaaaatgacatggtgtaaaagtctccctccttaataatcccaaaaaaaaataagaatattcaatcacacttgtacaggctacatacaattagctagaaacaaatttcatctcgttttctcatccatcgtcagcatctctgaaacaataattccagaagcaaacctgaagagtgtatgaaatggattggaaattgaaatgggtgtgcaggtggcgcaatgggggcagacgaacatgttcgacgcggagcggcggctgctggcgaacgcgctgctggacggcggcaacgagcgcttcgtgctcgtctccgagtcgtgcgtgccgctgcacggcttcccggcggtgtacggctacctgaccgcctcccgccacagcttcgtcggcgccttcgacgacccgggcccgcacggccgcggccgctacagggcggggctggcgccggaggtgtcgccggagcagtggcgcaagggcgcgcagtggttcgaggtggaccggtcgctggccgtgttcgtcgtcggcgacgagcggtactacccgaggttccgggagctgtgccggccgccgtgctacgtggacgagcactacctgccgacggtgctgtccatcgaggcggcggggcggatcgcgaaccggagcgtgacgtgggtggactggtcgcgcggcggcgcgcacccggcgacgttcggcggcgcggacgtcggcgaggcgtgggtgaggaaggcggcggcggggcagaggtgcctgtacaacggccagccgtcggaggtgtgcttcctcttcgcgaggaagttggcgccaagcgcgctgcagccgctgctcgcgctcccgccaacgctgctcggctactagaatttttttctactactactctcatcagttacgtatagatgtacgtactgtacgtctctcactcaaatgtctacattatatatacgatgtatactcacatcacagaaattttttgagcggtaatatataaaattttttatactccatccactgttgcggttaatcggttatggatgaaaatggtatggactttcccaaccgtatcgactatcgtttccgtcttgtaccagccgttttatttcgatcatgtgtttgaaaagttactacctactgctttgaatcttcactataataggaacatatgatgttaatatataccgcctccaattcaaaatgtacgatgccattaacttttaacataacgtttgaccatttattttattcaaaacagttacataaatattatttagggcttgttcggttcatagagttttcaaatgaaaggaatagtaaaagcaaagaatcaggatgtcacatgcactccattccttaggaatttttctaaaaggtctcacatcatgcaaagaatcctataaaataatttttgccgtttctcatgtgctatgtagacaaagaacctgacaagcttcatattacacagtgcaagtacttagtagtgggtcccacatgtacatcttttcacttttcatctcccaatctctttctcctccccaaccgaggttgcaagctccacaagaccacaacgcagcgcccagccgttctccctgcgttgcgctccctcgaccgtcacggagaacgcgtgccctcttgtggctccgcctccgcgaactcgcccaggcaacgcactttggcgacgtggtgtcaatttttccgttggcactgaccgggctgaacgacacgtaggcccattgtaaatgccctaaggctacaatccttatgaatttgataggatccattcctatgaaatgaatgatgcatataggaaaagaatcataaggtttgaattcctacaataatcctatgaaaatcctctaagccaaatgagtccttatttttttctaacttgttttatgatcaaataaaatataatcttaaattatacttttacatatttatactaaatttttgaaaaaaaagatcaaactttgtgcgaaaagtaaacggcgtcatacattttgaaaagagctactatataaagtaaacattgtcgtgacttgctttcccttgtgacacattgttttcaaggctctattccggtaattttatctccggtgatttcattttttcgttatcattaatcatttttggctctttcgcttcgattccttttttaagaaaagaaaaacaatacggaaatggtttaaacattttctgacagtttttggccattttcatctatagacggatctagggggtggcccagtgatccagtgacaaaaaaaaatcctagcccaatacatatatatacatatgcgaaaagaaattttaaaaaaagaaaaaaaaagctcctttattaatatattataacgcacatttgattaatttatacttatagcttggttatatttagagtatttaaaaattttatatgaattgaaccacccatataaaattaactagataggccaactgttttcatccctagcttcaatgcttgaatgcccttttcttcttttttttttgaaggaaatgaatgcccttttctagtcaaagctgcaaggctgcaatgtgaagattctatggttgttcacatgctgagcatgagcagagaggcccaaaccacccaaccaaagaaaaaggcagccgccaccacagatacaattggagtggtcgcacttgacatcgccggcgtgtgagctacggccggccggagccctccacccttgacgtcgtcaccggcacagccacggcacaacgactgctactaggagcaatatatgacaggttgacagactggttgttggtctcaacaaaaacacccaccactagcaaaatccttactactgtattattgttgacaaagcaaccactcaatttgctactgttctgttgttgatccatcaacatgtctaagtaagtattccaattgtactgttgcttgcagaaattatcatacaactctccacttccctaccaacttttactgtgaactagtagacccacaaactgaaactgacaggaggagatcaaaacatcggagtacaaccaaccaataattcaaacataaagtactccactccgtaagtactagcgattaagacagctcctcagctggttgctgcagctcaattcatggtgtttaatcaatgaaggcatgaagcaacagttgggagtgatgggagtcccagttctctcacaatgctcagatactaccaagcagatgaacaggttgcaggacatggacttgcttgcagcctcctagcctgcatttgatgatggctcccaatttgtgcactgcagaagtgcagagtgcaggctgcagatcgactgcctgatctgctcccctctgttgagccacacatgtaacatgctgccctgctgcttgtagccgagctgatcagctagctcatacatatgtatgtatgcccacctgttgccacgatctctcttgtgcaaatgccacgcgagcagtgaagcgcaggggatggaacaaggattcgttctctcattgattagcaggactgcagtgccactagttctaaattctagtagcatatgcatgtcatgtgagtatgtgactatatgtgagtagttgatggcttgattctggtgaaaagcttggcaggatcctttcttggtcactgcagcttataatttgcttagactgaaaccgaggcgaaggcacagattcctcactttagtctgtttatgtttattttcctttctgtttatccctgagagagttgtcatgtacaagtatcctcgtatcttcaatattcacggcttctttggtttagcatcctactaaaacgttgatggtgctaaaacctggacaagtttcacccttgccaacttgtttatatgataaagttgtgtttgcttttatgccaatgaaaagccaaaactgttgactaaaatctagaaagtggcaaattagacatttgcaatgccaatgagttggcttcaaactagaaccaccatatccactatttaagctaccaaaatatcagtagggcaagttttggctccaattcaaaacgaccctcagttttcactgaagaattttgcagaagaagatgaggactactgctgtgggtgtaaactagctgcaagaccattggttgtgatctcactatgctagggatgtgattgaagaagagagacaattagtaagaaattcagagctaattgtaaactactagcaagaaaagaaaaggaatgaggttgaagaagagagacatcgttttttttgttctgtctgcacctgtaactgagcaagacaaggcaggtgatggcactgaacaatatattagtactagaaattcaggacttgttcaatagatgcatgcataccaatgtagtatagattatatgaccacatgttgggtaagtcaattcaagtttgttcatcagttgatgtcaaaaaaaatcactggattaatatattttaataagcttgcctatgcgcaggaccaaactgaaaaggtcctagcagttttgcccataataaaggccagatatttttcttaacaagcagaaaccgtgtataggttgagaaatctcctcggatcatcacccagaatcaccaggatttgcaaaatttcttcttttactgacatgaacaacacaataacaacatagcactaagaagtagaagtaagcagggattggatcatcgaattgctcctacaccaatcccatctttgtttgttgattttttttttgtgtcatgttaatctcttcgatccccgtttggacgccacacctatttacaatctaagtagtagagtagtgaggaacatgttacaaggatgcatggtgggtggtggttcacctcataggtccttgtcgtggcgcgcgctggcggcggtggcgccgccgtcgtcgtcgcagacgccgcgcttgccgtagcaatgcaagaagacccagaggagcgcggcgttgaggagggtgttgaagacccaggcgccgatgccgctgcacccgccgccggcgacgccgccgaagtgcatccacacgacgccgacgtggcagaggaggttgcacccgaggagcgcgcactggcaggcgagcgcgacgggggcgccacgggcggcggggaggccggcgccgacccagaagcggaacccgaaggcgacggcgtgggcgagcgtggaggcgaggatggcgagcacctggaacgactgcgagaactcgagccagaggaaggccatggcgacggatgccgcgtgcgcgaacaccctcgccgcggcgccgcgacggcgttgcagcacggcgaagagcccccgcgcggcgtggaggtagcgggagaggtagtatgcgtaggaccagaagaagacgcggccggaggagcgcgtccccggcgggaagcagaggagccagcggaacggggtggtgcggctccgtccgcgccacgaccaccgcgtgtcgcgtatctcggcgagcgcggagagcagcgtgccggcgaagatggcggcggagacggcggccatcaggagcgcgtgggccgcgggcaagggccccagcgggagcggcctccggcggcgcaaaagggcggcgaggatggcgtcgagggcgaggcagagcgcgacgtaggaggcgaggaagccgaggaggaaggcccaggtggagaaccacagccccgtggggctccacctgaaggacacgattgccgggtgctcggcgagccagtaggcggcggtggaggtggcggcggccatggtcgtcggcgtcggcgtcggcgtgtggtcgggtggatggaaagggattcgtccgtgtgtgtatatatatagcctcgagtttatttattggattcggatgaatttgtcggtcagctcaagctctcgtttctgatttttgattttctttgacgaatttattgatttataattagagttctagatggccttttgcataaaaaaagggtgagtttgacaggagactctctctaaattttcatccttttctttaaaaaaacgtcaggagaagggaccggagcggctaaaattaggctcgctgttttgggtttctagaggcacgattcgcgtgctcttttgctcctccttccttacgtgtttggttgttgccaggaccaaacactcttagttgtacatttaggatagctaaaattaatgaataatcttaatttcttttagtactccttttaatctgataactaaaattgagtaatataatctgaattcttatgttaacaaagttgttttaaatagtattctaataaaatttttagaattttttttttacacaaacataccgtttagaaaaacttgcaaagcgtgtaaacaaaaatccagaatacataataagaaaagaacaaggtcttcatgtaattcggattgcttacaactctgaaagtacatatacttcaaagagaaaaagaaattaatttggtacttgcaattgagaaaaaggggcaggatgattcacttacaaattaaaatgaaaagaaagatagaagggttttttttgaaatgctagcgagcactccacctccgccgccgtcggcgccccagccggtggcgcccatgctcctccgtcgcccgcagatcccgacgcccctctcggcggcctcctggccgtcggccgccccagcactgtcctccggttcgccaagaccgagcgccggcatgttctgggaaatctcgccgccaccgcctcctccaccagcgtccggtgtccgcctggctcaagacagcactacccacgtctccgagtccacagtgcccccacgctccttcgtcgatgcggtacgcaggtctccgggagccagctccagtcggcttgctccccaaccaccgccgcgtcccacattaaagtccgtctttactgtgccttcgccgcgacgcgacgcctaccgccgcgcctacgagctggctccgagagagaggagggacatcctccctcataggcgtacgacgccacgccccgcattcacgccggccgagccaggatggacagaggtcaaacctcggcgctggtggagagagaaagggcattcaatccatggccaacggcccgattcaaggcgagaagacggcgctggaaggagagccgccctctccttggaggagttcaaggctagaaccaggggacgttgcttcgtctgtctagcccgcgaccaccgggcatcggcgtgccgcgaccccccgcgctgtttcacctgttttcgcaccgggcaccgagcgcgccactgcaattcatcccatctcacctaccgcccgctgcgtctggacgcaaaagcttctcatgctttcccaagaacaccaagagcagacagatctcgctccccgcgtcccacacaccgctcgcggcgcctgcccagagctacttgcgcctcgccaagaacaagcagatcccgtttcccatccccccgccgccgacatgctttgagtgaccgccgccggaatcctcctccaccacgcaagaaatgccagggagcgcctgacaagcgcgcccccatgccgcccctccccctgctccacagttgccgagaagcagagcttctgccaccgccgccgccacccactggtgttatggcgcaattgggtgacccggagacgcgccccctcgaggatgtcgtctttatcccgacgtcgcatgccatcgatgcatagctgtgcgagtgggagagcacggccacggtcacttgggcgatgccccccccccccccccccgcgtctgccactgccaaagacgtcgagcgcgtcattgccgacgagttcggcctacgcgcaggagagcttgctgtgtcactccactatccggaggccttcctcctcaagttcaagcaccgccggcattgcgaggaggtggtaaagcagggcttcgccaagggccgaggtattgaggtctacttcatccaatggcgcagccgaacatgcacctaagaatcggtggaaaccgacctcgtccaccctgttgacgccggcgacacgagggtgatctcgctctgggcatggactccaaacccgagccgcatccacaagcgcgtgtgggtgacaatcacgcgccaaacccgtgatccactcctcgagtcgatcacgatctcggagacgctgccggagcattggcaacaagaggtcaagcacccggttctcttccatattgaggagatccacgactacaccgcggcggctgtcgacctccgcaacccgaagtcctgcaggccggcgacgcgcaccctgccgccgtggcacctaggggttcttgacggcgagcgagccccgccgcgcctcttcgagaacttcccctaccacccgcatccgccgcggaccttcaccttccgccaaggtcgcgcggagggcgtggagaacaacaccgccgccttccagagggaggttcgcgaccaaggtagcagaacggtgagggacgccattggccgagacggcggaagaaggcaagagaaggggcaccgcgacaggcgccgggatgaccgcgatgaccgtcgcgggcgcaacaggaggtataacagcgaccacccagatgacctccgacgtggaggacggcgcgacgacgacaatgatgatcgcgacaacgggggacgtgatgtcgcgcacggaaggggcggcgttcgcggcccagacgtcaacttcaggcgggaacgcacgcactcgccgcgtgcccgcgatcgcggcgacacgggaagacgcgacgggcaacgccatcaagcaaactgcggcggcaaggacgacggggccaacgaccgcgacatgggcaacccacccccagcggtcctcaaccctgtcatgatggcaccggcgcgggtcatccagccgagtttgcccccacgcaacaaggggcctctcctcccgctgcgacgccctcgcgtcgaaaaggggaatgaagcccggtccgccgcgacgatcccggcggcgcgggtcttcacccgcatcaacgaggagatcactgccgcctcggtggagggggcattgcggcaaatactcgtggcggccggcgtggcggtggcgctcgacaaactaaccgcaccgccctccgcaactccttcactgctggaagatcaagtgcggcccatgactccgacggcatcgctgacggcaaatgacgcgcccacaaagaagcagctgccagccctgagcgcagagtacaacgctgtgacgtccctgttcgaggcgatgtcggtgaacaagccattgtcgccggaaccgctgcatcaggcaacgccgacgccgctcactcccacgacgatggatggagatgatgaagtaatcttcgaatccgcccaggtaacgccgaccccaccatgtgccctgttcaaagagctcccccctgcaatcctctccacgcctgcaatcctctccacgccgcaggtgctgatcgaccacgccggcgagctgcagatgccgaactcgctcgctgaccgcgccggcgaccttcagatgccgaccgtggctgctgctacgttgggagaagggcggaggaggagccctaggctggcgcagtagccgctggctggactgccgatgtcactgtgggcgcagatcaacctctgccaacgcatgggactggcaccgccagagggggccctcactgagaaggcgatcgccgacttcaaggcgatgtttaacatgcctctgccgcaagacgccattgatgccctcgcgcagctgttcggcctcgacaaggaagacatgaaggcagcggactcagccctggcaatgtacctgggtccctccgacatcggctgccaggaggagatagccgcggcgtgatagagctctgtcccgcgccccggcgactggagtagaccatctccacgtatccattttactttcctcgttcgcatcagcgtgagacctggacgcgcgccattggcatgatcatgagcagcgacattaccttccaaggccggactatctattcgcagcaatttcgcgaaccgacctctcccctctcggtgccgcaattccgcaccataacgatgtcagtgttagcacaaggccgccacgacgacgatgatagcgaagctcgctggccggcttgccccaccggcatcgaacgcgagagacaagagcgacgcaaacaagaccagccgcccgaacccgaacacgcactccctgggcaggaacgacccttccttggctcagaacgtgacggcgaactccaacgcctccccgaccgccatgatctccagccagctcggccgcacagccaccgactcgccgtggggctcggcgacgatcaccatgtacgccgccgacgcggcgccgacgttcctcaccctcttcgtcatggtgtgcacaccgccagacggcgacatgaacccaagccctcccaggccagttttggtcgacaacgcaacatctaaaaggcaacgcgatgggcgccgtggcgggcgcggcgaccggcgacgcacgacaccgcaacatcatccaccgtcgaattgttggcccaacgacaagttgctctggcccatctccatgtgaccatcctgcttgggccgacccagtgcaccagcaaggcccaacaacaaactgcttgctgcccccatctggaccgccacttcttgggccacccagcgacgccaaggctgataacccgggtgaaaacgccacaaaacaactcaatgggctgtatacagccaaagcagaggcctgtaaagatgtctccctacaatctcaacctagttttatgcactgtgcacaactccccccttgagaaagattgtttctcatgacatatccggtcatcgacatcctctcttggaacgtctgcggtttgaatagaccagccagaagagcgacggtaaaagagaccctccaagatgctaaaccccacatcgtctgtctccaagaaactaaaatgagcaatatagatgctagaatggcaagctccctcggtgggggacgcatacgctccttccagttcaagccggcaacaagaccgctaggaacaagaggtggcatcctgatcctttggaatgatgattttgtcgacctcaaagatttcgcgcaacgaaccttctcactctcggccacagtcttcttaaaagcttgccaaacatccttccttctcacggttgtctacgggccaaccagagatagtgcaaagcaagccttcctgagacaactacgcgacaccaagccagccgacaattcaaaatggcaagtgctcggagattttaatataatctacaaggctttagacaaaaacaacatcaacctcaaccgcaggcagatgcgaattttcaaagataccctcaacgcttgcgaactcaaggagatcgcacttcagaatagacgctacacctggagcaacgaacaagataacccgaccctggtcaagctggatcgtttcttttgcaatgcaagctggaacacaacctttgagagacacctactgcatgccctctctacctcactctctgaccattgccctttgatgctaacggggcaaggagagactccacgaacgagaacattccgtttcgagaatttctggattcagctcccaggcttccaagaggtcgtagcagaagcctgatcagccccacaatcccaccatgaagcacaccatagactctttcacaagctgggacatacgtcaaacagcctaagatcgtggagcaagaagctcatctctcaggggaagctacaattccacatggcgctcgaggttattctacaactcgatatagcccaagagtcaagacaaatgagccaagccgaactcacactaagaaggggcctcaaagatagagtactggggattgcagttgtggaaagagcccgtaaaaaacaagctgcacgaatcacctatcttaaagagggggatgcaaacacgaaatttttccacttgaggatgaatgcgaggaaaaggaaaattttcatccaaaggctacgagtggggaacatgtggaaattaaaccatgaggaaaaagctaccgctatcaaagaacacttccaaaacttcatggcacgcccaagcccacgcttaaaagaccttgactgggatgtcctacgattgccgccgccgactgttccgcaattaatggccccattaccgaagaggaggttcacgcgcgctaaagcagtctcccagcgacaaagccccgggcccggatggcttcacaggagctttctacaaagcctgctgggaaacgataaaagatgacatcatggtggtcattcactccttcaaccatttgcgaagcaatagcctctcgattctcaattcggcaaatgtagtgcttataccaaaaaaagatggggcagaatgcgtgggggactacaagccaattagtctcattcatggaatcaggaagcttatttcaaaagtgctcgccctacgtttacaaccgcatatgggctccctgatcagtcatgcccagagtgccttcatcaagagaagatgcatacacgacaactttatgtatgtgagaaacttgacgaggaaattccaccaaacaagaacgccgactctcctcctaaagctggacataaccaaagcttttgactcggtgagatgggattaccttatcgatctcctccagagaaaaggcttcacatctaggtggaccaattgggtctccaacattcttgcatcttcaacaacaaggatcctgctcaatgggtgcctaggaacgcctataaagcatggaagaggccgcagacaggaagaccccctctcgccgcttctattcatcctcgccattgacccactccaccacctcctagagagagcaatggagttagggcatctatccccacttagggggagagcccccaggttcagaacctccctctacgcggatgacgcggcaatctttgtgaatccaagcgttcaagacatgacaaatctgactggcatcctaagcgactttgggcaggtgaccggcttctgaacgaacatgagcaaaagccaaattgccccaatccgatgtgacaatattgatctgtccagcattaccggcatcttcccagcaggcctaacaaactttccaatgaagtaccttggcctaccccttgtggtaggtaggctaaagaaagtccacattcagcctttgatggataagtgtcgatcgtgcctcgccccttggcaagggaaattaatgttgaccgccaccagaatctgcttgacaaattcggtcctcactgcacagcccatctaccacctaacatctctaaagctgccagatggaaccatagaagaacttgacaaaatgaggaggaagtttctttgggcggggggcgaaaacatctctggcggaaaatgcaaagtaaattggaaaagagtctgcaggcccaaagacctgggtggtcttggagtcatggatctacaacaattcgcatcagcactgcgactcagatggctttggaatgaatgggtggcaccagaaaaaccctaggtggggacggcgctaccgtgcaacaagttagatagagatctcttcacggccgcaataacaataacggtgggcaatggcaaaactgcacgattttggagctcgaaatggctggatgatcaaactccgaaacagatcgccccggatattttttttggcttctagaagaaagaacagaacagtgaacgatgccatatcagaaaacaactggatccgagacatcgaaatatctcgtatcaccgaggcaagccacctccaacagtatgtccgcctctggatagtgattagaaacatgaggccgctaaacgaaaatcaagacaacattcgatggaacctcacagcaaacgagcagtactctacaaaatcggcctatagactccaattccttggggctgcgcgatccatcttcaaccaatcaatctggaaggcctgggcgccgccaaagtgcaaattcttctcctgattggtcactcaaaacagggtttggacggcagacagactggagaaaagaggatggcaaaaccaaaagatctgcccactctgctgcatggtggatgaatcggccctacacctcctggccaaatgtaggctaacaaagagaatatggacataaatccagagatggacaggcactgaccttcagatgggtagctgggaaacttgtcactctgttaggcagtggtggactctcgtagcggagtccccaaataccccccgcaagcctctaaagactatgattatcctagtatcgtgggaaatctggtgcgaacgcaatgcaagaatttttcgaaactctgcgtcatcaccgtcctcaatcctagcaaagatcaaggaggaaggaagagcatgggtcaaagcaggggcaacaaccctacaggagtttggaatcctgggaaatatcacttagctctttttcttttttgcgggctagtctttttcctcggctaaccctgtatatacccttgtttatttttctcctgctctattaatatacacaagacaaagcttttgcctttcttcaaaaaaaaaacttgcaaattaaaaagatgttgagaaaaagggtagagcagttaggattgcaactgaagaatggtcctagctagcctaggagtatattgtttaacgtttccacacgaggatggtcttcgatgaggtcgtcagtcggcaccgtttctttcatttgattatctcgtgtcctcgatttaacaagcacacacttaatttaatccattgcatcatttcctctgtcttttcatggacaccctcttgcgatctgtatgtgcttacaaaacagctgatgtactcatcagaaggatatgtaggccatggcttaattaagtagcagattatgcaattaatctggttccaacaaactagcagatatatgtcaaagcatgagcttggaatatagcatgcatcatcatcaaccgacctagagcctgagaggaaaaggacacaagacatctggctttcaacaagtgctggcttgatgatcatttcttatttgtctcttctccttttgccttttggtgtttctcatcagagtttgagagcacaaaacctgtgtgccaactgcctgaattcattcagtcagtcagtcagtcacgatttgcattacaagaaattattactaccagaagatcagagggcaacgattttctagatgcatgacatgaggtggttacgttgtttcatgatcatccaacgtcgtcgttctagaacgtggatagagttaagtggaatactagaatcaactcaatcaaggaattttctttttcctcatcgtccagagaggcggttgctttttttttccaggtttcaattgtcaattcgtcgttagctgcttgtttttcacttgtttcacctccatatatctctttcatgtatcaaatattgtatatttcatggattttgctttggggttgcaatctattatatctaagctttacccctttttccatcaaatttattctatttacatcaggctagatatttcctttggagctaagggctcctttcaaaggcactattaacaaaatggaggaatataaaaaaaacacattattttgataggattgtaaatatagggctggaactcatattaaaattcctctaaaacttgtacatatattgagacattttcatatgattcaatactgtcctatcctttatttaaaaaaaactgcatatgaaaaataaaatcttatggaattgaaattctataaaactcctattacttccatctcatattataagggatagtcgatttatttgtattgccaaatcccttatattttggcaaatcaaatggggcctaaaaatagacctaagaggagaagtcatgttgtcactgatttaaggtgcttggagtctgaaaagagttttgtgatctgttgcggcagaagcataataccgcaaaaagagaagaggagattcttgatgcctgggcagcatccatgatatgaaagaaggttatattatactccgtattattctttccaaaaacaagcagtggattgttcttttcagaaatgagaggattgtgcttccctaccaacctttcgcttttgagaattaaaggaatccatactgactaaataattaattagcccaaagaaaaagagtacagaagactcctgagaagctcagtttttattggtaatcataaagcaatggggagaaaaaacaatcaatcagtggagcacataagtgtggagttcatcttgacaagaagcataaggcagcaatccacgtactttttctctacctttgttcgcaaacaaaattaacaaccaaaatcacctcagaaacgaacacagtgacggtgctgtagaaagaaattaagaagaatgtcgccttcaaagcatgcacaccacctttttttttctgaagaaaaatgaacctgcagtagtagactagtcaagccatcgttttctgcatgaagaaattagtaagaaaaaccatgtacacagtgagtgagctactctacacaatgagtggcacacacacagcatctctgaattgtgcaatgtcagttgcgccgtcgatggagacggataggatcggagctacctactgtatatactagcaactgcaactttcagatttcagattacgaaaaaagcaagcaagcaggggacggcagacaacatgcggtagcccagacatggaccgatcggagagggagaaaagcggaggtcaggttgggccggcgtgacgacgacgacgacgacggcgaccaagcgctggccggctgactagtaatgaagatttcttcaggcttagccagctaccttaataattaattaggatgccaattaattaagctacatatatatatatatgggattgtctatatatcctgtgattgaaaatcccgttccatatcatttgaattttggactattagatatgctttcgagatttgtgcataacaatgatcttattattttcctccccgtccccttctccctcccaccgcacgcccccggatccgtcacgttttgttcccgccgctgatgctagcccaccgtactgccctcctccacctcgcgcgacattggcggtgccacccatcggagtccatcgcccaccactagttctccgccatccacggtcatccctctaaagtcggtaaactctcccctttcccccctctgctcaccctcttgccatcttaatccggcacctcttgttctttgagtcagggttgttgctgccattcgctaaagattaacgtggttgttagagttgaaagagaaacttactagagcaaatcgtgaaacagatataatgttataaatctgtaagattttaccttaatttttcaatcaagagtgattccgtatatataaatatggcacgtacagtgagtgcaggatcgaccagttatattgacgatgaagttaagctgcactgttaatgtgtgtggctgcaggtcgggttgcatgtccacacgtggaacacacacctggccccgccagctttctatcacgccttcatgagccttccgatgtctcattctgatagttaattacttagcttcttgttaattactatctctgtttcgaaatatttgataccgttgacttttaacataaattttactgttcgtcttattaaaaaaattataaaatatgtaaaactatatatatacatgaaagtatatctaccaatgaatcaaatgatagaaaaataattaataattatataatttttttaaataatacgaatggtcaaacatattttaaaaagttaacagcgtaaaatatttaaaaacagaggctgtactagagtatacataagagtaaaaagaatatgtgagcacagagttaattaaggaggagtattaggtagtagctatagacggttggctggctatagtatgatgaggcgacatcgatctcaacttgatatcgacacgcacgtgttcgtcgttgcgttcttcagcgtctgatgcatgatacactccgatcaattagattaatcttttataaaactgggaaaaattactaatatggacccaaacgcacgcacgttttgatttaattactggttttgaatagggaatgggtccgaacgatgtatttatatatgttaatttcatttatcttggtttctggacatggattcttaataagctctagaaagaaagaaaggaaaaaccatagattctagaagcaggctacgtaggtacgtatggcagcaaactaagacgcatggcatgaggaactttgaattgacccccggctctctaaaacatttgaagcaaggattaatttggaattggatgaggacgagttgattttttttttgttttgtggttttaaggaaggaaaccacgatcgattagttgacacagaaaaactttctactacagtagaatgaacgcaatccgcgtatatagatcgaccaatgatacacacacagcatatgaatcctttccaaaatgaaaaaaaagagagaaagaaatactaagtccagaagaagaatacggtacgatgggcctaatggaagcccattgagaacacacacaacatctgttgggccttcacaagatagattgtcggcccaatacttttgcaaacaaaagcaggtggccgcataattaatttttttactattaggagtactatagtagttacggtaaaattaaaagagttatataaaattagtgagaaaaaaagaaaaagattagagggggacccacccacccatgcgggacccgatcccctcgcccgcctcgaaccttctccgccttcctcttcctcttcgtcttcctctgcggcgcacgcaggcggcgaatcctcctccgtcgacgcgactcctcctccgccgcccgccggtgagtcatccgcctctatcctctctacctcctcgcgagcttgatttgctcggcctcacgtacgtaccctctgcgcgattaagattcttcctactttccagattagattagattagagcagctagatcggatcgcccgcagcggatctccccctccatggatttctcttcttccactcttactgctgccctggttggctgctgcacttcaactgctgtgctgctgctgctgcccatcaccgatccctttaacctagtttgtttctgcccatgcgtgcgggggttactgttcatcgattcgagttgcttgcttctgccgcttcatattcagatcgatctctataggaaacgatgtctagaactaagccccggttcatgtttgcatttatcaggaaccagcagccagtttacatcattttctcttcttcttgtcgtactagagacatgcttcaatcttctcagctagactagattagacttggtctgaatcccaatacctgcattccataccacacacaacggccaaaatgtaaaccgcttctcaacttccaaatcatccatcatagtcagcggttttaatatttcgacacgccgaacctcttcctgcatatccacaccttaaatatagaaaattgtcacaaccaactttcatgtccatatcatagaaatgatattccagataaacgctaggaagttcagtcacagctacataatactaactcaagagaacaaatgacgaatacttcagtttctttgcaaagcagacatgttaaatcctcaagttgctgaactacggtttttttttttatttttgctctaattcttttccattttctttccctgttttagcacacaaaagtggtgcccctgccctagattataataattttgcactccaaaagagttggaactacaattgtacgttccatcatgccaactctgtgttgctgacgagcgtaccaatttcctccattgcagctcatctcatcccactatggcagccaatgttggggaatccacaagtggcagcagcagcggcggtgccgattctgggggaagcttcgagtgcaacatatgctttgagcttccgcaggagcctattgtcacgctctgtggccacctcttctgctggccatgcctctacaagtggctgcacatccactcgcattcacctgagtgcccggtctgcaaggctgttgtcgaggaggataggcttgtccccctctatggccgtggtaaggaccgtgttgacccaaggtcaaagaacgtccctggggctgacattcctaatcgcccagctggacagaggcctgccacggctccgcaggccaatcctaacacccacttccccaatgccaaccccaacccttggttcatgggtggaggcatcccactagccaatgcacggtgggggaattacaccttctcggcggcatttgggggtttgttccccctgctcagcttccaagtccatgggttcccagatgcaaccgcctatgggcagcctgctggttttccctacggatatggacacggccacggtcacggtcatgggcacgcgttccacggcggacatgcccatgctgctgctgctccccgccatggaccgcctgggcaacaacagcaggcggatgtgtacctgaaggcgcttctcatcctggttggttttcttgtgattgcaagcctcatcacattctaggattgtgccatcatattgctgtgcttgtaataagaggaatgatttcccgagttgctttctgatgttgtgcattaccttgcctccacacacgacccagtctgaatcaagtggttcttttgcgcaaagtgttgatagaattcttgtatatacgaaatagatgtggtcgtgtggagcatatgtgtactgtggttcatgaataacatggaagctctgtctgaatgaactagagcaatgatacttatattgtgtttttgatatgatgatgctcagaatgagcaggctatgcaattgtttggagcacaaatgtattcctctatggcttgtactaaagactatcgcactgatatcatatctgtgttttgtggtgtctttctgtcaacttatctctactagctttcagaatgtgttttaactgtccattgtacctttggttaaataatgaatacgagtgtgttagttgtatactgcatttctttttccaagaagttttttccgaagactcaaaaaactgtttaatgccaagtagctgtgggaaatggtggctgagtttgtgttcactatctgtaatagtagaatctatttgatgagactttctgaatcctgaatttctgatacattgagatttgaacagggttttgacttgtttgaccggagtagtatgaaattacaatacaacggcatttttactaaatgtatttctttagtaatgaggtgaggtagcaaaattcgaattcaaaattcataactccgtatccgtatggtaggtagcgtaactcgaaagctactgatgaaacgaaaagccgaggcgagactgaaggagtgtcagagcggaggggcacgtgtcgagcacccattgggtccctcgcctgcgcccctctgctctctttcccgccctttttattccccatctcctctctctcttctcctcctcggtttcgtttccttccttcttctcctcctcctccttctcccaatcgatcgcattcgaagcttcctccggtagctccggtgagggtgatggacgacctggacatggcgctgcctcaggccttcgagctcctcctcggcagaggtgatccatccatccattccctcatcctccctccctaaaccctagcgatcgatcgtttgtttcagtttgttcttaataatctcatcttttccattgctccatccgtgcagatcgagacgcctggccgcgcggggccgcgttcctcgtcgccgcccactacggggacgtccgcgaaatgaagagtaagccacatccaagaacccattttctttcccccctttgggttctgcttctgcatcgcatttggtacgaatttcttgctgaacatggctgcggggttttcatgtgtgggtgcttgcgctggattcttctggtatgatgttgatctgtttgtgccacggattcttggggggtgggggtgggggggtgctcttctctaattttggactaaaatctgggtacaaaaccacccaaagattgcaacttcgtgtatatacagctcgaaagtttcgttatgttcctaaaatgtctcccttttcttcttggtttgtgaagggattgcaaaggagctggacgaggacggcaaagggatcgaggcgactgtggctaacacaagcttcctcggcatgaacgcccttcacgcactgggttggctcggcaaggtgccggcctaccggtatctggtagaggaggtcaaaatggacgtcaacaaggccgacactgctcagggtaataatctactccagttcgcttgcatcttgaaaacatgttcttggatatgctttgcttggctcgacgatttgttcttccatcttcaactgtgtgtgcttgttgttaggattcacacccctggagcatgccgtctaccatggtcgcctgcctgccaccagatacctccttgatcatggcgctgatgtgcatcaaattcgctctacgggaaatgtctctcttcttcactcagctgcagtaaaaggtatcaacatagcttggcctctgatatgcccttaggattatcctttttcctgtcttagttagttgtctgccagcccatcctgctagaacatccatgttttcactgtaagaaactctgccattcccttgatttattcttttgcgatggatccaatttgtagtattgaacattaagccggagatccttatgttgaaatcagggagaactgtaaataataatagaaaaatgttttagtctgatagctattcaagcctaattgggaatactaatattgcgattagcttgtgatcgctagatgcaaatgtttactggtgcttttattttcttttgtaaccataaattgcacaaggatggtctactctgatgtgcttctcatatccatcaatgtcatgtagtcttttgaaaattttaagatgctttccaggttaaataaaatcctctggcctaagtttcataaaatttcctgtgtcattaaattgctataagtttttggaagcaattgtatttacactatcacttgtgggatcatcttttgcatgtgttttttcacgcattgcttcactatagccattaaaattagtttgcccccaaatgatcctttgcttagtatgataaccactggtgtttcattatgccaattggaaaattgctgtttatatttagatgctgaagcttgattcctctataacagtttgcccatatatttttatgacctttggttttccacctatttattcagggttctctgaagtagcaaaatttctgctttctagaggagttaatgttgatgcagaatcagaaatggggacaccactggctcttgctgctttcagaggatatgatagcactgtcaaggtccttttggagcacaatgctgatgtacgattgctttcatttctctgttggctttcagcatgaatctgttctcctttgcccctaagccgtggccttcgttattttcttcccacttgtacacagcatctcacagttaatgtgtgagctaacccaggcgtgggagaaggggcccacacaacagaaactctgataaagcaataggacaagcatataaaatacactttacagaataagcttcagcacattttttccttcagaattcttctttcttttggactgtcattactttgcatgacaattgatattctttgttttttccagcccaacaaggttacaaacaaggcacttggtgcacctttagacttggcattaaccagctcttctgtgtcctgtgtgaagctgttggttcaggtatagctctccctgctttatatggccgtaggtttctctaaagtggtgggtgtagtttacctctgtataaaagcatcaattataaggagaaaccatatgtttgtttatgctgtacacttgaatttaataggctggagctgaagtgaaagttgaggggccaaataatcatttggtaagagctgctgagaaaggcttaactgaagctattaaatgcatgttggaagctggtgcaaacccaaatgttcctgacagggtaagccttctcctttgtcacaccggtgatatctgcttcagtagtaaacggtttgatactaatttatgaacaaatgccacagtatgttcatgcataagttttttactgtttcctttttatttccttttgccatgtttttattaatttggttaggtatgcctagatatttgtctcatactagcaccaccttggtctgttctaaaggaaatggattaataagtttgctgtttacatgattgtccaggagaggtaccatttcattaaaatggaactaggctactctttcattaatctatattatcactatgaagagcatatatcctgaacatcaagaagagctttttgctacttgttttatttcaaattttcaatatttctatttcattcttcatttgttggacagctcgggagaatgccaatagagctggctgctgagtatggcacacgggaagatgttgagattctctttcctttcagctctgctattccaactgtggcaaattggagtgttgatggaataattaatcatgtacagtcagaaatcaagcaactagaggtatgtaccaattttcttgtgcatcttgcaacaatcctggtcttctgtgcaatgtcggcagccactcagtgtaaaccaatatgttttatggattaacactattactttaaaagcaagattcctgaagcattgcacatttctctgtgcaacttgcaagtgagtaccaggaatctgaaacaatgcattgattggatctgtttttttagccctttcacttcaccttaacttcttgttgtaatatgtttcttcactgctagcatcagatctttgaatatatgtctaattttagatattatttactcaggacgataattttatcaaaaagagaaggtctgacatgaaacaacaaggggatgctgcatttaagaagcaggattatctaaatgcatcagtgttctacactcaggtacattcttcggaaccattcccatggtacatcattggaccatattcctcattgtatatgccgttacttgtgtatcttcatctggcggacacaatatgttattgctactgtgtttctgactccagaagacacagggaaaaaaaactctattggaagattcttttatgatatttgggatttaactgaagattggaggtgtttacactacacaataagaaactagtattgaattaaaacccacctatcgatttgcccaaacaggccttacatggttcaccttgtttctttttctccatgaagttgatcttgttgttcatttacttttccagtgcacaaaatttggttggttatctcattatactatcacacatctccttgcatattagagcataagctgaacagtgtggactggaaacttttgtagcctgaagctagcagtagcagcacccaccaccaccaccacacacacgcatgctctacacacaaagcagtccactgatatctgtcttccattaatccctttagtttaattgggaggagttggtgggaattgcccttttaccgagaacttcaattttacctggttagggtgttggtccaagtcgatcagtgctgagaactggtatagcaataacagcaataaatctggcactgtttggttctttgcaggcactgaaggttgatccgtttgatggcacgttgttctcaaacaggagtctttgctggctccgcatgggtgatggagaaagggctttggatgatgccaatgcatgcgaaaagctacggccaaagtgggcaaagtcctactatcggcaaggagcagctctaatgtttctgaaggtgaactagacaagatatgcgttttgacaattcacttgttccttgtatatcttctactcctgtttgatttggctttgcacttgtgttccttaggagtatgagagggctcatagggcacttggtcgagctttagagttggaccctgaaagtgaagagatcgagaatttgtattggtaagatatctttttctatcaacaaaatctggctgttgttttgttccatgttgtaattggttgctgatccttacagggagtcgatggaactgtgcggttgatccctgaaatgccagctacagatagaagaagcacacgcagaactggaagctcttttgtgttatgaaagatggaacgacgcaaacgctcagtgatttgctgctttttgtgtacatatacttaggctgtcaaaacagaaacaaatgtctggtcttttatgtcgtgtttcgtcgtgacatcttcctggagtggctgttagactaaactagcattatcacattctatctgttgctagtatgggcagaggatgatcaactgtctaagcaagctggaatgatatgaattctctgaaatgttatgcataatataattgtgataacagcatttgcatggctgctaaaccctaactagaaggaagcaggtgttgccatcctcaacatgaggggcctgagaaacaaggcaactgacatgaacatgaactcaagtttattttcacccagctgagctgtagtgctccacaacaaaaacaacagaacttaacgcaaatctgcataacttgctggacacagcaagttttcagctccacttacacgtgtaaaagaatgacagaaaagctctaatagtagtgtgagagtgtataattggacagccctaagtaaccattactttacaatatggtgctcaaatcacaagcttttacacgtatatatatatagtaatgatggattttatctttacatatgattctttaccctatcacccccaccatctaaccttatattacatttcctgctatacctcctcttctgtattaaatggcaactacaaagctacaaatcccatgccctttcaggcatgttattctcccactaggtgttacaaatgctgccccccaattctctctcttaatgtccatggtcctgattgtttctctgctgtcttcaggccacaaaatcatgcagaagaggtgaatgctcaaaccgttgccgttgatccatctgattcatcgaatcatagtccgaagatgcgacggtgacaccaagaggagcagtagcattgtagatgtcatcctcattaacaccagggaaacctggctgagcattaggaacgaggttgctgctggagtgctgcaagcccagtgtcagcgacacattgccattgccgtatctcccaagctctgccaagtgataggccatgaaccgggcgttctcgtctgagtgctgcgcgacagtgttgtggagaaggaggccgccatccacttcgttcgatcgctggtccttcagcatcaggttcatgaaactgtcatcaggattgggctcattctggaagccaacaggcgctccgccaacattcattgctccaatgctggttctcgactcgctcaattggcttgtttcgcaaatccgtgccctggagtttttgagatcctccttgtcttctgaagatgccattttatccttacttcttggtgcattgtcagaggaagagttggagtcttgctctaaatcaccaatctcttctttgtacatgtcttcaatcattggtttccaaaggcggacacgggcatttatgaaccaattcgaaatctggagaacaggagaagcatgaagcagtcaacatgttgaactcttgaagaaacacaaaatgcttctaggataagaagttaaaacatcaaatgtggatcaatggtccagtgcacaaaaaagataaacaatatttacctgactcctagtcaggccagtctgcctagcaagcattaacttctcggaatcttttgggtacctgcaaaattgttgtggaggatgataagagaaaagaaaagagggaatgctggaaagaacagcataaaggatgaaacttacggatggaggaagtgttcaaacagccaagcgcgaagaattgtaacagagttttcaggcagtcccctctgtggtctccaggcgttttgtggaatcataccgtactgttggaaagcacgttgttgccttagctgctgatcaatgtaccggaggcgggttaattttccctccttgccagatgagttctcttcctcgccaagctttttcctgataacattgatctgatcattgatagcatccttcaggcaccgaaagtgccgtgagattgtctgaagagcaactgctgtgtaaggcttcgcagatcctggtccagctaccacatcaaacgatgaaaccacggtttgcatttggtggtaataatgcttgtatttccggtccacctgaaatatatatttttttgagttaaaatgatttgccaatcaattaactaagattactgtgctataagtaaactgtatatctactcttgtatacatataccaaggatcagtcctataaaactattgatactgtaatctcaactcaaagaaattggggttgcacttctgtttaaaaagaaagagaagtacaaaacaatagactcctagagtactcacctcatccaacattgccatcagttttgccattttgttctgaagctcttgcttctcagcagtggaaagctcaggtgctgcattagcgccagattcttgtggattagaagatacaccctcactttttggccctccatcagtctctttgccatctgcttttcctgattcaaccttctctttctgagccttttgttttatgctcttccaaacactcacgacctcatcaagcagttcttgtgctgccttgagataccttgagttccggattgcgcgtgaagcttcggactgcaaattcttcatccgcatgtcttcccctctaaggttgtcatggtaagactgcggcgttaacatgtctggctttatagaccagtacggtaaggaaggcgccatgatttgtgtgttcaagctcagagatagcccttggctttgcattgatggaacacttgatgagttgtgattattcagaacaccaaactcaagctgtgaaccagtgtgggcatcatcatggatgagctcagagccactaccttgtgctccatccatcatatgcatcaacatctcatttttcatatctttgacatggctgaaagagcgttgaccctggtgcgaagaaagcatgtcggactcccttgaagaggggtcttgtgacattgctgacgcatgcccagggccaggcatctccatgcaattctgctgaggctgcagaatgccgctgaactccgtataaggtccagaagatggattgttcagatagagcaagttccctagagctgatgacataggataggatgcactgcctgggtctcttgagtacatggtctgcgagtctctttcgctaccagggcttgaatagtaagtagccatctcgcaattataactacttattgctcgagattactgcaaaagcatatatgtatatgaagaaccagctttgacgttgacttgattgatgattccagcaggacatcaatattttgttatccagactaaacttgatcccgttcaacttccctgcaattgagtacatgaaatggactgataagacacccccaaggaagttcaaatattgaataaggagttctctcctctgagattgtaaaataacagcacaccaatgccaacaaaaataactgcaggcaagtgcttgtaaagcagttcaatggaaaacttcaaaacactttgcacaaacaaagacaagaaagtttaattgagcaaactgttaatatagatacagcagaagcacacaaagaatgccagtcataagtgagtaatcagaattggggctcaggctaagttttggcaggattctatctgatagaaatgcagtcacctgcaaaactttgctcgagaagtgcgataatatatgaactgacaatgtgacatgccgatttgcaggctaaagccacaagtggtcctccatttttaagattggatcaaaaaagttttggactttgtggtcctcctttgctaacaagatgttataagaatatctacttgtgaattcctcttgttatataccaagataaacaaccggacaacaccataaaccaaaatcaaatgactgcccagtgttttcttttcttttcataaaagcaacatggggaaaccacagtagtatcatgaaaaggagaattgcattggatagataaggtttgaacatatgactcttgagtgagtaatgatcatttatcatgatgagtaccttgttgaactaatagactgcaacttctcaaagattctctgccaggctgttattgctacgaacacagctaccaatcaaaatctgcaagagatgaacttacttagcagcctgtttgtcagtctaaacaaattctttttcatagctagatttttagagagtagagccaaagagaaaactccaaggcacatgtataacctacatacagaacaaagaagcacaagattttgatgaaaaacaagcaagatttccttagcataaagtgtctggagtgcagtaactcaacagaagaactactgcaaaaaggtaaaagtaacaggaaatttggcttttgagagcccagcttccatgaaaacattttttgaagactgcttccatgtaaacgtcgaggaagaaagggaaaaaaaagaaagaaagctaggacaatttagtcggcaatcgcaaagcctgttcgtacataagctcaaattatgggcaaagccacaaaaaagtgggttgctttacaatccgagaagaaaacaagaactcataattcggagaaaactaagcatatgagttttgaacacaagaatttctccacaagaatctatacaccaaagaaaggcaagaactttgttgaggttgagggcatggaacctcaaggtcagtcaaaagaaacaatctttgcacctgagctttcggttcatcgagaaaaaccagcagcaagcaaaaaaaaatccccaaacatcaaaagaagctgaaaaattcagatggaagggaagagcagtaccctagctctctaacccaacaaggcaagaagagctcagaaacccaagagagccagcgttaagcaccaaccacaagagcaagaaacacaccataattcagtgaaattccaccatcatcgaactgaagccaagaaccaagaacagaggtcatgcatgcaatccgttgctgatgatgctgcaataaggaggaggaggaggagcagatggtacaagagaaggcaataagaaaatggaggagagacctgagggtgtgctcctgatggggcgcagggcaaaggcaacaggaactgcagcagcgattgacaccaaagcagccagctgatcttcttcaagacagatagataggggagaggggatgagaggagaggagaggaggggagaaagataatcgatcctcccaatatggggacaaaatcagatcccaggattaaaataagtaacaatcccaaaaggaaaagtgagcagcagccagcagcagcagcaagagagagcacagagctcagagctcctctctctcctcttcttctcctccttcttctctcctctctctagcaagcagcagttgtgctagcttgctccttgttgcctaaataaaaaaagctcagaccacccactaacagcagcaccaaatatggaataatgtttgcctcctaaagaaatagttttgcttgttcctttattagttgctgtcgagaaggattatactgacgagctagctaacctcctcctcctcctcctctcaactgttgctgctgctgctgatgctgctgcttggagttatttgctggtgtaaccaccacaagtttcggctacttgtcgatcccagttgtttctttacgataaagcctatgcctccatgctcctcctgctatatttaattaatttattatatctgcatataaaattcagtttttttcttcagaaaaatggaattatattagcatgtactgtcctgcactgctctttatactagatcatgttaccttgtcttcagagatggctataggtagcaaaataattaaaaagaagattattttttttcttggcgaaattaaaagggtactactactatatatataagaaacaggagggtgattgaggctaataagctaccagtataattcagacactgtacaatagcaatgtaatggtgctgcttagtgcatgcatttcggagtggtgacagctaatgggcgagatatgcagaatcatgaaatcattagaggacaaagagatggaggcaaagagatttatcacgtgtgacatcaacgcccccaatgaacttaaaaaacaaacaattagtggtgggccccatccccaattcctctctctctctctatgcattggccattggccattgggtggttcgcgtggtccacgagcttacgccatggcacgggtccaccgcccccaactccctcctcctcctcctctctttctacaccaaattgaattcaattcttgcaattggattgatgaattcaattcaagctacaactcacctgaccaatgacaacaccccagcaacagatttgtcttttggcaggtacagacaatgtggatgtatactatatttaggctaaatttgcatggccaaattaaaggggtttgaaaaattttcttcccaacatatataaatcattggtctaaaaaaaacatatataaatcatgcaaaatgttctagttaacatggctacatgagtggaattatgtgtaagttcatatttttcagtgaacaactagtaatgttatcatacaaattaaaagagctaatctttttatataataaaagactgaaattattgtcccaacctctatatcatactagatgcacatttgtaaacaaaaagagatgatctttatacctgttcacctcaaaggtaataagaaagttcagttgcagtcgttcctttctttttttttctactgtgaccacaatatcactgtacccaccacttatattatactatgatcttagaacacgtgatccgtaatttagacataacccacatgcatcatccagtgaattaggaaagggataacaacactaattaattaagtatgcttgctaacgatggttagtaacctctcttcaaatcaaaggcatgaaatatatgcagcaggggtgcagagaaatgggcttgctgtgcacacattgaggttgggagtgggtgttgtggttagggatatgaagatgatggatggatgccctccatctcctaacaaccagtgggtggacctaaatcaaaaccaaccttgtcttagactttaaattataaatccatccctacctgctttgatcttcctttttatcctacttctactactactagctacttctactgcctaccatatttaaaagaaataaacttgtcctttttactttcttgtaaccacccactaatctgtgtttcaccttttaactgttgtgatcaccagggtagcatatacatattaactgtggaaaacaattaatggcatacacagtatacttaattaaggacgggtcaggtagaaacttttgtagggaattatatattttccataagatattatatgattacatatgtttatggttatttgcagtacatcaggacacaataaataaacaagaaaacaacaaataagtaaatgattgagtagtatacaatctggatgacaaatcttgtggtaccttgttatacaagatagataatcatattggtcgtcttgttatccaggacttaatataagagaggttttcttgcaagttgtagccagttctagaaagcatccattgttgatatcatattaaaatgagtgagcttaagataaaataattggcatgattagttcgtttgatcagtaagttgtttggccgccttggtaagatctccttcctttggtggccgtttatggtttcctttcgtatatgctaagccaagaacatataatccatgaagctgacatccaactccctgacaacacagtaaattaattactataaccagaagtaattagtcatacataggacatggcgataggaactagttcccaattgaggaatagtaattaactcctatatatactaatggctatatattccaattgattgttacaagcataatcttgcaattaggctaactctagctaccagatgatctgaaagtgcaattcagagggcagctgccactatatatgcaatatatgcaaatgctgtttaactagctaattaagatgttgttgctgatgtaggagtgacgtgggggtgattaatcaatattagccacacaaattaggagtacgtagcagggtagcattcagtcgctgtcatggtccttgaatttagtgttgggagctgttagtttctgcttgcttactcagccttccttcctaaactaattagtgtgctgttttctttccatctcttttcagatgcatttgtcgccattataggcctgattgctctcaattacagaggcttctctttgaattaggtgcccctaatgcgccacgtggccgccgcttattggacttgttgatcttagtctgtcaattttgtgttcatatactagtagattactagtgctagtcttgttccatttctcagagacagatcagatctctgcagaacaaaatcacacacacacgcctatggatatatgtagtggtttcaattctgtagcttatgttatcttatccaagctgatttagcctacactttagtttaactttatttacatgtgtgatgctataatgtaatgacttgttcaagctatgagaaaattaatcaaggaataaaattataagcagaaaaggaattaagtactgatggagataagccattgctatcagtatcaactgggaagataataaaggttaattattctctcattttcacagattacacaaagtgcgtgaaaagaataattaacatatatgtgtgtgcgtggatcgtttgtttgatgccgtgtcagtttgtaaatgactccagcgatgagtagtccacggtatagacaatgggcattaaaaatcttgcgataaaatccaaaaagtcgacgtatgattaacttaaattgacttaaccaactagatcacaatcaatgtactagtatagattattgttgtctctaccatgtcatcatccagaccaccaaatagttatatattcagattaaaatataattgctgagcctagaggattagaaacgtctaaacaatacactgattgtgccattattttagatagggcctggacaaacaagtcttgtcaaatgttgactaaacaaatacttgagtgtttgtgccacacaagcaagatccaattttccatttgcttaagcttaattattagtttgttgtgagagaaatttcagaagaaattgctattcaggttgttaatttaattcagcttggcagctctatgcgaaggtatagccatctttgaatatgcagagagctatttgggatcttagaccctgtcaaattaacaccacaaagcccgtgtccaaatcacaccgtgtgtaatcgattaaaagaagaaagcttagacatcaatttgcaatttgctcttgagcttttcaccatgaagatgatgcctgcccatctcaacgtatttctatatattccaccatccttccacagtttatctacctattgatgaacagttcatcaataaagcttccattgtcttaaaaaacagttttttgaagcatatttccttcaatgtttaaactgaattcagatggtagtttgattagggtccaaattcttatacaaggcatcattaattgcacccaacttccagttagcctataaatgatctgcaggtagcatgctaattaaacatttgataaaacactgcaccgtttagcgctgccaaaaggccaatataattatgtaattagaaattttatcacaacctactatcttgaccccctcaaaatgtttctgcaaattaaagagaagcagagaattggcatgcatgaagccagctagctgggacacatgtccttcaattaatctgatgacttacagaggatcatgggctcccataagttagttaattttcagatatttaaacacagctagtaagtacatatcatagtgcgtgtacgtgtgaatcataaacgaaaccgacctaacaaaattcgatcggcgtctctgtcgattgttttcagattttcagagaaaaaaaagaagaagaaactcagttggaaagttgtctctggaaagagaccaacatgacgagcttcggcaactcctaggcctatattgacaacatttcgttgcatcgacggtgatagatgcacgtaaactcacacaactgaaacatcatcttcatccagatgatgatgagatgatgaactagggcatgcagctgtccctgttcagatatatgcatatatataaatatatatttatcagtcatgcgtgcaaccaagagaaagaatgagcttagctagccatacatatgaccaagttttctgaccgatcgagacatctttctctatctccctttcctaccttttggagcaaacacatcgctttaatatttatggacatatatatatgttcacttcatgccactattgtattgcagttccacatatagtttataatagaagagtttcacaatcacaaataaggtttgaatagctgttctatgagcatatatgtcaatgtgactcctctccattcattgaaagaaacatctaaacacctccatggtgtatgtgttctccaagtcaaatgagtcactagggcatgcatttcaactgtgtacttgatacataaatcacatagtaatgagtacccagcatgcatatatagtacatgtgtactagtaatctagaaggagtattaagtacaactactgtctacactttactatactccatgtcaaggacaaggaggagaagatatagctaggatgctactcctatttgcacatttccagtgggtcaaagctttcctctttgttcagtgctaggaagaaccctactactggagatctttggcttttccagtggcaaaagtactacactacagtgaacacacacatgcatgcatatgatacaccaagaaggagaggatgacactgttgttctgccctgtcaacatttacttgtcaacaaatttgctcattaggctgctcctctatctgtgccctatagagctatgcatagccttttggttttggagcatttctgttgtctgttattgttgcacatttggcatctagcacagagcacaccactgaaaggaagttgattttgatatgtgtgttcggttttaagctctgaattagtagctcctgcaagcgtaagacattgacaatgacatttaacaatacatgtagctttccctaaaaaagcagcaagattagtgcaccgaaactcagcttgttgatccactacgcatttaaacgctactgtttcagctgatcaaggtctagttttcatgaaaggctgaaaccatattgttcatctttatttataacagcaacctgattattgtgcagttaacttatgcatgccccaatttctcattgcaacaaaaattaaaaaaaaagaaaatcagggttacagaaaaaacctgggacattatttatggtgtgtggtgagtgcagagcttttgcaggtccatcagaggttcagatatgatcagacggtgcaggtgcacttcaaatatgttgcagctttgccctgttcatcgcaacattctgttaagaaggcagcaagataggagttgcagctatcaattgcaaaactgagcaccattataacatgtgcctccaaaacctggtactgatggtctgatactggaagcaatgcaggaaaaaaaagcttttgctgatacagagatgctgactggttcactgcagggcccattgacacaacatcatcaatgggttcagttcagattagtctgagcatgcacccagctacagggctactaccggccatgtagataggcaggcatatgtatctgcaacaacaccaggcgccatggatggaccgagttcagtgcatcaacagtgcactcttggtactctagctagctacagtactcctgtagggagaaagactgagacatagaggggtgcatgcaattggacagggcgttgttctatatgggctgtacagtgctctctccatttcacagtgattgccattttagttttgtcgtaagtcaaacatttttatcttttatcaagtttttaaatatttatgtggtttggcaacataggaattatatattacgaaagtatttctcatggtgaatctaaagacataaaccttatgatattaaactatatgaatttctataaatttatgatcaatgatacagatgtttagcttgggagaaaggtagaagaacaagtaaatttaaaacagagggaatagctcaattgtaaatgagcacatgtataagtacaaccatcagatcaaataataattagcagatgagaactaataagagtagttgataaatttctgtggcatctaattggaggctgtaagagtactgaactggtccatcttccaaaacactcaaactagcatgctgatatcatgcaacattacaacatacatactaccatggaactgtacaacagccgatcggcaacatataaatatgtgccctcttgtactttgcaagtagtgttatctgttaagcatgctcatatcattatcatgctgttctcctctcaattgtttggatgctaatatgctatcttggctaggatgtggtgctgtatagagtccatttgtctaagataggtgcaaggttctttttctaatatttttttagtatctagtatatgcaatacagcagggtttttgttttgaacttttgatgttgccaaaagcatgtgaatgacagactgagtttggctgaaaaaaaaaaacctactggtctttgccgacagcatttctggtgctcaattagcatgtaaaaaacatgtttttgcaaaagaggcctgctagctaggcagagtccttactgactctaatgcatgcaacaaccaacagtagacagagtccttacaacctctagtagtaatataaagttatagccttttgattactgtcatgagtttgcaggtgtatggtgtatcacagagagggaaagttcattagcacaaaaaaatttccatctttttagtaccttacttgtgtagatgaatagtttctggatatataaccagctaactgaaacaagttagttttattttcaggataggcagctgcttaattagttggcgtcagcctctgtggatacacaagaatatagttagcagacgctagtagcagcgtgaactgaaggatagtgacctctcacctgtaccggtagcattttaatttcagcatgcatgaccaaatggcatcagtgtgctcaggtagttagaggttggaacgctggaacaataaccacctcacaattcccctctcaaaacaaaaaaaaacgtgttacatgcatcattacatatcttatacagacataatttgtatcgccttaatgtaattggctaaattcaatgaaactttccaatatctgaaaaccacatgtgctacaatacttctattgatcgagttatatattcgttcaagaact

SEQ ID NO: 8788 - DNA, 69533 bp, Oryza sativa
gcatgtcattcaggtccagattatcttgacagtgtcatgcatgtcccaaagtgcaaagtttcatttctatttattttgagaagaaccacaagagttgactgggaaaaaaatcaataaatatacaaattcaaccttgaagttttctctccatttctcccgtatgttgtcaatatggcgacaggcacaccctcattaagcgcatcatcaatgaacctttgaatggtttaatacacaagatcagacacaatgtaacttccaaagttcaagatagtagtaattcataaagcaagctcatggcatagaaaagaaaaaaaggaacaaaagatcaaaacaacgacagaacagaaagatattgcttacaaatgctcatgcattgatggaaataaagcaagatgcatgggtataaaaaaaacacactggatcttttgaattatggtaccatgtctgccatactttgcagaatgcaaattctcacataaatttctggtaaagcccctcaaaagaactaccttgcataccactatggttatcatatcttagaagtatgatttataatgatcctaaaagtgatatatcaatcaacaataacccaaatgatcctggaattatttcactagagagatacttcatagaaaattagataaactgggaacggtagacttactgttcaactccaggccgcagtggtaagctatcagaagctgagaacacttccaaagctttcagctatgagaagaagcacatgtaaacaagtcagtagaaggatattttttggtctataggaaagaagacgaaaaaacacccatcaaccattttgatctggactcccgatagaagaaaactcataagttgattgaaatcaaatgcaaaatacaaatagaaattaacagaaccaatcataaaagtcagtgcattggatggttaatatgcaatcctgttctcagggtatacccaaatgcaaatggttttctgactgctaaaccctgcaaaagcctaagttccaaaattcaaattgccatttatcttccattagcagaacaatgcatggtccatcatgagaaatattttgagactatacagccatgagaattgagattcttaactaaatacaatcaaccctaattcaagatagtctgcctatgggtaatcataatagaaagttcatttttttttagtgccagtatggtggttttttcttgttaagtacctgcatagcgtaaagtatgtatctaccttttcacgaagaacacttttcataaatgattctttctcgttagttggcaaagaagtaggccacccaatctgtgcaagtcagaggacaggatagtaataagtaatgcatgcatatctcaatcaatcaacaaatgaaattattcagctctgcaatagtactgtggtacacaatgaatgatttaaggagaacagaaacaatagtattattggatcaaatatgacagctaggagaagagctaggcgtactctgttgaagaataataacaacatcctttcctcgtcgccactagctttcctaaaaaactacatagcttcagacaaataaaaaaacaaaaagagaatgatagattttcatgcagtaaagtccaaaatatattctttgtaaagagaactatatagaaaataatagagactggaaatagcaggggaaaacattcattgatgccaatagtaaatccagtgcaattcaaaagagcgcatgtcccagttttgatgaagctaaagagtatagtatgcacctcactaaatcagcatatattggctctgtccaatttgcacaatccagcccaagattttgaaatgctgatgaaaaaatatgttagaaattgtgctagaagcattaagacagacaacaaaattacttatctgcagcactatatgttacacttcttctgttaaaaccaaacaagttttattctgtagaaaacacatgttggttattacacaggccaatggtgtcaatataattcaatgctttgcacttgtatattggcatcgcatagaccagataaatgatcacagatatggaatggaattgcattaagcaaagaagcatatttacattgttcgcacctacattgaaagcttggcgattgccgaagcgatacacatctgcaagaactctggagaaacagaggaaattctatcacacaatcatgaagagtcctcagagaaaaaaaaatcagaaagaacaagccacaaaaatagaacaaagtcccaagcaactactacctccgtttcaggttataagactttatagcattacccacattcatatagttgttaatgaatctaggcacacatatatgtctagattcattaacatatatatgaatgtgggcaatgctagaaagtcttataatatgaaatggaggaagtagtaactagtagtagtacatcacaaggcaatcgcatttatcctgagttcctgacaaagttacaagactaatcgaaggcggtattagaattccacagacagtgtagccgtcttgaattgctgaactataccaggagcgcatcaccaactgaattgaaccaagctcatgaaaacaacattgagacttctctcaagaacacaagtacagaacatgaagcatttcgaaattgataagagagcaatagccaattacaactaccctgtgcatctctataccgtggtttaattttctgtaaccagatgaatataataagacaaatagtagctctatctacatcaattgaagctagaaaatggaatatataaaaaaattaaagggcactctcttggtcgcaaggccaagaatcaagaagaccaggtggtctctgaggcgctcacccttccacttcgaggagcacggcgatatccggcgacgcggagccctgcgacgacgaggaggaggaggcgcaccggagcggcgggatacggcggccggagctcgggggaacggcggcgcggagagggagagaggcggccgcggtggtggtggaggaagaggaggaggaggaggaggaggaggcagggatggaggaggagaaggccttggcgacctccggcggcgaggcccggagcgggaggcagcgagcggcggccatggcggagaggagaaggtgcgcgtgagcttcacgaataatagctcagattattatttattttatttatttttccactatataaatatataaataaagtgctacacgtacacagcaagaggcatccagcagtgtatagctaatgtccaatggttgttttgttctacactcttcttagtctgtgttcttttggtgttggtcgggaattaatccccgttcacggaaaacggagtgatcaattagcgtacgattattaagtattagctaaaaatatttagaatggattaatataaattttaaagtaacttttctatagactttttttaaaaaaaacgtaccatttagcaatctaggaagcctgcagacgaaaaatgagggaagtgaagtatgggaatcatcacaaacgaaataagcttgttactccatcttttttaaaatactagtaagtgtgcacgtggaatccacgttgctaataaaataaataaaacacataatataattgttcaagtgctaaataattttcagatttcattttttgtttcaagatcgattaacgatcagtgaggcggtcagaccctagcttcatataatcacacagaaccaaaatttgagggagtcccatctaccttttgttacagtaataacgttttcaaagagtaccacaccaaggaaattatttaacttgttgacgtagtgcctgtcttgcaagacacggattgttcctgtcaaaggaaataaaaaacattctcgagccaatccaccaattatattcatcatctcgaaaaacataaatatcacaatcatttacaagagagaatttttttgaaaacagcttttggtgagcttccatgcattttacaagaaggtggttgagagcatatgcattacacggtgtgaattattatcatttaggccccgtttgatttagattattaagctaattattattatggattatctactataaattaaatattttgagaataaacttaaaaaatagcttaaaataaatggactaaacaaaaatcaatttctagagctatccatattccacagtatgaactaaattctagatcactcaattcaatcagaagatacagtgacaaggtaatgacgtaatgttccaaaatagaactcatatgccatttgcaaacatctcgaccttctacatacaaatctaaagatccacttgtactaattcaagttcatttatcaagcatattaaacggatagcaaacgccaagctgcagtatgaaaatagcccgaattttaaatgatttcataagtaattaccaggggccactcaaagtctagttcgtcaccttgcaatattttaccaaccaaaaagcaaatttcaggaaatatttcacttgatgtagattatggtaagtaggagcaagaaaaactcaaaccgtgtaataggatcatgcccagcaaatccatcttcactgtttatagagccagtacacgcggattaaaaattaaagttcaacaaagttcaatggatttactctaggtctctagcaaacccctcttgatcatagccatgtgctggtgaggtgcttgtatgatgttcttgatgtcccacatggccatccagttggtgtttatcatttctagcacaaacttgatgtcctctattgaaacaaagtctaagttgataaaacaaaggacataaatctgtggatttctgatgggtattaagttggtaccctacttatagctttcagctctcataagagtgtgaaggtgaagaaatcaaaatagctacatagaacggactgaaatcactgtattttacatgggtgtaaagttggtacccttttgttgctttcagatctcataagctgatgttttactgtagaaaggaaccaaacaaaattttgtcagacatcagcgtaagaaattaagaagtaggtggcactaatagaaattaagagggctagctgtgcaaactatatcttactattatgccttgatttgacaatcctaattgattttactactatattccaaatggaattttttctaagaaaacacacatatatatcttgagagaaaagattttacttctcaagagaaacctgtactaatttactaaactcgaaattacttgtgctcttggatacattttcatgcaaaaatttacaggcacaatgtatgcaaaatagataaaatccctataatactaacctggatttgaagaatgctatgacactgataaaaggaaaataaaaacattgttgctccatgaatagaaatctccaacattcacaaaaatagcatgaaaaaaaattgagtgcaagaaaccgacttgcctgtaccttgacctggacagcatgtgcctcactcgcacgcatcaatgaaaccagatgagacaagtcttcagcaactgggttggaggggactgctacctcatgcgtgacctggttgtatcattgacgaccagctaagagacgggacatccaatggagatcactgccaacacaaactacagttcattatgtccttccataagcatggaaaatatgatccaaaatgatggcagaacatgcaaactggaattgcgggagcctcaatggatgaccatatgttcaaaagctttgcaaactggaattgcgggagcctcaatggatgaccatatgttcaaaagctttgcttaaatcgacgaagttcagtagaaatcttgttttctaccttcagaattacagtactacaaatgcaaaggttaagtagaatacactaagaaccattgaattgttaatttgaaagcagcaaacaatcaaccagaaatttggtcagtatgacatctataaattgtcaaattgtaaacaggagatgatgctagtgctagctaagcatttcatcaaacacattgcaagcatgaatatagaacatcaacctcacctgttgctggtgttgctggtgtccttatttgctagcatgaatgatgtccaacggccctagtcctgtgccctcgttccagcgcatccctgataacaacaacaatgaaaaattatacaggatgttgatgatgacagcagtggtggcacaggtagcggtcctaggggtcgtcggctctacctccagtcggcaccctctcctacgaccgcgccggcggcctgctcctccccggcacctctgttggcgctcgcctcttgcccagccaacctcgccgatgctgacgggccatgcgcagcgacctccagccctcctccaatggccccctctcctcctagcaagactctccgccacctcatatcccctttccggcgggcggcacccggatgtccggcccgcgcgccggcgcgcgcgaggagtcagcggggtagggggagcagaagtgcagaacccgcctctctttcctctccatcgcggcgcggcgcggcgcgagcagggaagcaggcagcggcgggtagggtgaggcggctccggcgggtgcgcgcgaggaggaggcgagcagctccggcgggaggcggcggcagcgggctggcgcgctctaggaggagtcgagcggctccggcgggagaaggcggcggcgcgctggagcacaaaagggagcgttccctttcttttttctttgaccgatccctaaccgctgtttagaccctcgcaaaaaaaaaaaccgctgtttagaagtgggagatcgctaattgtttctttttttcccctaaccgctgtttaccacgtgggaatcgctaattgcaggggttgatccaacttttgatataaaccgttagatgaacagatctaagggtcaggagagagaggtgttagatgaactggtgctttttatttttaaaatatatatataattccaaggacatccacaatgtgtcataagaatgaaccataagaccttatgactagccatatacattgtggatactagccataagacattaaatgctaaaaatagccataagcttatggttcaaccttaagaaataaaataatgagataaagcacacgtgcacactaaagagtatgataatagattatggtatggtgggacctactttaaagtagaatttgtttacatagatgtgggacccatcttaacatctattcttgctttaaacattgtggctatggacatagggtatggtgggacctaccttattttcaccaacaccttaagcattgctgatgctctaaggatgtaccatgatgtccagacatatctttaggactagattttctttgtagggctgtgatttgtggagaaggtgaattagggattttactgttgattcattggtcaatccgaaaggtatatttgagtataattcattggtcaatccgaaaggcatatttgagtataatgaagatagaagttactaatatacctctaaatacatagaactagccaaccatcttatattgttttatgagtggagactggccagccttgttttggaaaagttattactacactgtcttgctttatactgtcttgcttagggtatacaaaaccacatagtcatcacacggttaccggttatcacgcgcggtaaccttcccagtttttgaaaccaagataattctcacagtaaccacatggttatcgtgataaacgtcttatcgtagggtaacggtaactccacctaaaatggtttggtaaaccctggtcttgctagtactgcttgaacgatctatacatacacaccaaaacaacatgttgctagttgccaccactaaatttaatgaagtggaatttactgtttttccactttctacacctttaccatgttaaatatgggtgaaaaagaaaattctcgaaactcatggcttatagtcttagatcgaatcatatcgaacttggcttggttagctaaaacatgtacttataatgagctgaaccgattgagttaggttcatggttcaccaaaccattttgggtggggttatcatctcccctcggtaaggcggttaccacggttaccatgaaaaccgtacagttaccgtgagtattaccttggtttcaaaagtaagaagattaccgtacataataaccatgtgatgaccatgcgattttatgaaccctcgttaggcttttagctcgttgcctagcgagccaaaactcgtgtttagcttattcatgtagaatgtcattatatcattatatatatttagtgtttcttagctagctagtagttactaagataccttacaacaatttgtgtttgtaattagtgagtactattttactagttattatttattattatgttagcatatgatacatcggcaaatattgcaactatgtggcataagaacaattttcccatatactccctctatattttaatatatgacgccgttgactttttaataaacgtttgacctttcgtcttattcaaaagatttatgtaattataatttattttattatgacttgatttatcatcaaatgttctttaagcatgatataagtatttttatatttgcataaaaattttgaataagacgagtggtcaaacgttggttaaaaagtcaacggcgtcatacattaaaatacggagggagtactaatgtacaatctagctaagaagcatacaaactttcaaagcctgaatgtagatgcaaatcatgcaatgctgctaactttttctcatgcatatatataattaacatgtaatacacacagttaattacatatgtacatactgagccgagactagcaaagttacatacgtataagtagcatactaatggagcaattttacagttcttgagaagggtaacataaggtattactttttctactgtaaaattggtatctcttgatattagataccaagagatactaaatttacattaaatgtttggttactcatactaatatcaaagtaatgcaagctatagctaacatatagttgttcgatctgcgtcaattaattaatttattacaagtagtaattattattagcagaattggtagagatatccatgatcctccccagctcgtcccagctactgccgctgctgctcccgccatccctactgaagctcatcacctcgctccaccccgccgccgtcgacgacgacgacgacgccgtcccagcatggaagtcgagcatgaacggcgactgacgatgacgaatgtcagcgacgaggtgagactgagagtgagagtgagacctcgtcgtcgtctcggcgtccgacgagtgatcgatgacgtcgacgatgttggccgccgccgctgccatggaagcgctgccggcgtagtgctgcaggtggcgacgatggtggtggccatggccgtcatggactacctcgtggtagtagaattgctgctgctgatgatgatgaatgtgctgaagctcatggctaattcgcttgttcatggatgctgctgccgccgccgccctgcccttggtgtaggtcatgctcctcttgaagatccggcaaatcgtccatgtctcctgcatgccattgatcgagatgatgcatgaccagtactatccatgaattcaattcagaacaaattaaaggtgtatatatatataagagatcattctgacgatcgatgtagctaattaagctagctagctagtgacgcaatgatgtgcctgtctagccgattgcgttgtgtatcaaaaatcttttccttctaatatattgacgtgcaatcttttgcgtgttcacgaaaaaaacctgacatactgatgcgtcttggaggtgatcggagtcggagatggaggaggggagtcggaactcgtgcatcatccaatctgtcttggtgcctttaccggcgctgccgcggtagtagacgagagacttcttgaggccaatgcagtcgccggcaccggcggcggcggcggcggcggcgagtgaggaagagtagattggcttgtcgatgccggtggccttccagaagccggagccggtgacgcggttggggcggatgctgttcctgtacttcctccctcgaaggcagaagaaatagccgcactccttctccgccgccgccgccgtcgacaacgacgacgacgacgacgagccctgcagcgccaccgcgccatggctcacctctgcattcacaagcacaacattagaatttggttgatatgcatgcatgcatggctcgttgttcatcatttttatctgactttgctgatatatatcaattattctctcaaatctctgattgtgtgttaattgttcagtgtttaatttttattcacgatcgatcgatcagagaggattattcagagatacaaattgtaactgatagctagtatatactaccacttatgactgaatttccttttttttttcagttacagaaccaactaaatttaaatgacacataggcatgattttatgaatgtttcaattgcaggagataattagtcatgcatgacgattcgcctatactagtcatattattaaccttcaccaccaagtgtgacaaaaatttaacctctggtatcacaattaatatatcttgcatcatattcttataatcttcttgaaagtaagatgaactaattgatatgcacaaaggaagaacatgagatcagaaaagtaatacggtttcatgccctgaatcctgattttatcccctcttacttttcagtgcacatataatgatgcgtatacatgtgtggatatgttcaaatcaattaagaacataacttgcacgtacaccagtttttttcttaaaattaagaacaaaattgaagtaacctacttggaagatcccagggatcatgcttgtagatatcgatctccttgatgatgtcaatactgaaaggcttcttctccaccttccttgtcagataaaaccccacgagctcttgatccgtcggatgaaatcgaaaccctggaaacaccagatcatcatcttctgctaataaagctgctcctcctcctgggctaattggactgtcaatctccttaataatcctttccaacctcttctcctcctccatggcttaatcttgtagtagctagctagctagcttaattggacagagctataataacttgtttgatcctatatacagctagttatatatagtgtatgaggtttagtgttagctatacatagttgcttacatatggtgatggagaagtatggccatggctgctgtattaataaattaatgtgctatatttgaccatattagaacacatttgatgattaattatactagacaaagctatagcctgggataataataagatgctggaaatttttgtctgagcaagctgagtctaagtcaatcgagttgaaccctctctctccctatgggtctctgcagataaatcgtcgtacctctgatgacttgctcaactcaattatatgtcgaatcaggagatttttcttcagtgacgacgatactttatttcgatctcgccacagcaaattaaatacaggaaggattaatttatttcgaagtaaaattatcacattgttatatatactagtggtaggcctgaatatatatgtagcacgtggttttcagagttgtgggaggccgttgaacaccttaattagagtctcagtttattcagaggcaatgcacatatatgggaaattgacattctaccaagtcaaaggcagataatattgattgacttggtagaggtgtgctactcatttcttccaactgagacatgcaacccaaattactcccttagtgcaacttataagatgtcaatgcattttaagattcaactctcataatatttgaaaaacaattagtcaaatataaatttaatttatttgataaataaaaacaatgttattggattgatatttgaatgtactagctttttatagttatgatttaatttgttgctacgaacattatattatgtgagaaactgaaagtcaaatagtagttttgaagacatcatgtcaagtttaactatgtcttatattttagaatggatggagtacattttagcaaataaaagaataatttcttgatgtatgaagtgtttacaaaattattgattcaaataactctcaattcaatctgctaaagacaactcgaatttctcgcgttgtggaaattagcactaaaatttcgacacctcgtgatcctttatcaaatactgcaacaatgcatatcaaaataaaaacttaaattaaatgggcataagtgcttattataatcgaagaagcttctgattaggttggacagttaccatctttttgtagctagttgcacgactaactactagtaactacttagctagagccaagaatctcataccgttcataccaagcaactgtacagccataggatttagtcacagtgtagacagtgatgctgtggattaattagcaattcgaggatttataatacggagaacgaatcaatctttcaagatgtactaatgaaaaaggaatgacgaactttgaacatttccagcttttgaaaagtacttgagagtcgggttcatcatattcggcctgaagaaaggataaattcgagaaatatatttcagtcaacagctgtagatttgtaagacgaactgatgaaaagaatttttcaagggtgctcacaaaaggccactttaattaaagagttcgttcaaaaggaggatttgagggtttttcttggtggctgttggtgccttggtggagttaattttggttaaaatcatgtgtatggggccacaaattgaccctttcatgactctctaacctccagagaaaaaaatttacatggtaaatattttctctaaactgtttttttacagcttattcgttttatattttttttcataaactcctctatctaaaattaattatactgcatgtttttgtcctatgtaagtccaactttcaaatacaaatactctgtttctatgagccgtcaagcaatgggtaacctaacaaagaaatgaagaatcctagtcattttcatctgtcagattggacgaaatgttgctatcacaagctttgaacaatgggtaaactacagattttacagtaattttttctaggatcatgcaagaactttgtcaaaagccttgacgtaacggtacatgcgcggtagattcggcttgatatttttacctgtcactcagtaatttactggaaagcaaagccaatattttcatctttgttgggttctcatcctggaaggtgaaatcctgaccactggaccttttcttcttcctgtgatcaccaaagtcagcatgctctgctccttgccaaaacaaaaatggaaaagattcaaagcaaagagaagaagagttccaatcttctagacccagttgctagcaacagatccattgtagtaattttttaaaaaagtatttaaatattgggtttagaagactattgatgttcagagtttttacagtcaatggcaccggttggcttgccagggaagaaactcaattagcatatgattagttaagctttaactattatatacttcaaattttgatttatttgattttctttaaaaaaaaccttatatgtagaaagttttttttaaaaaaagatcacatcgtttattagtatgagaagcgtgtccgtgataatgtaagcctaaaacgacaaatttagaagactgaaagaaaatgatagttgagtgttgacctgccagattagtgggagtactgtagactgaaactttctcctggatgttttgtcagagaacttcagcattatcctcatagtttacttagaggcatcaaagaagtacaagtaaaaccacttggtgtgaaactgtccgatgcttccaaaaacacatttttgcaaattgcatcatccaccatgcttgctatcctccatgtagtaaaaaaaaaaacatgcatgtatgtagttttctgtcctgtagaagagtctaaggggatggccatgtattctctcatgaccccatcagctcggttgacatgtttgatatttccttggacacttgattatacattggtcagcaatcttccaccagattgacttaaggtacagtttgtcaaaactatgtttgtttacgggtgtaatttagtcaggcatgaaacaaggaatcccattgtttcatactaagagaaagtagacattgaaaccactgaaaaatgagatgattactgaatccaactctttagaaaaaaaaacctgcttaattagtactcccttcttcctaaaatactagtttaggaagtcacacattcacgtgactataaccattctattgttaatggtattctattattaatggtatagatgaaaccttatctatgatgttcagcaattgaagaatttgagtattagtatttgtgaaaaatagaaacgctaatcaataacagaaaattttaaacacggtattgtaagatgtacttgcaaggatgattttgtagacgatgatatagtagaaccctttgtgtcattgaaatgagggtatgcatgtgttatcttgggcaaaggcatggtttaatactgtcattgtcgttgttctttcttttctttttagttcctacaaatatgcatgagtgtacagtgtactgccctctggaaattctgcaacccaaaagtcacaaccatatcaaatactccctccgttagtacggctcactcagacgatttgttaatccttgatcttcatgataacaactgaagttaatttatttttaatgatgtaatttgtcgatgtatataatactgtacgacttagtattataaattgcattttaacttatcttttgttaaataaaacacattatataaaattaccttcttgatgagtgcttttttttttcttaaagcagctgatcactcctcctcttactgtcttacagcatatttctatctataagttacagctagaagatggttagcgatgacaatgtctacggatacacaggcgagcaggtgacgatcaggcagtagccaacgacggaagaatgaagcaactaccaggtggtgctgaggctttgaagaatgaagcctacaaatctccaaagtccaaacggccagactaaaatggatttacatctcgatgaggtctacgaatccagagtctccaatcgtccatccgagctatggttcaaaaagtcaacttttcagtctctattcaaagcgcccagtcgatgccaagcacatatgtattactcccttcgtcccagaatataagaagttttagggttggacatggttattaagaaaatatatagaagtgagtggtggagggttgtgattagttggaaagataatgttgatgtagaagttgttatattttaggataaatcgtgagggttaaaagttgttatattttaagacggatgaagtaacatatactaggccctagttcagcaagcctgagccatggtgtttatacaataggccatacaggcctaatggttgcatcaaaatagtacaagtacaacagaccaattacaattgagactcgagagagtatgcccaaagttaatggctctttgcaagaccttgttaccaactccctactttcgttttccgcaccacgtttttcaaacagctaaacggtgcgttttttaaaaaagtttctatacgaaagttgcttaaaaaatcatattgatccattttttaaaaaaaattacaaatacttaattaatcacgtgttaatgtatcgctccgttttccgtgttcactctttgggttgggaacatgttcctacgaacacaactagcaaagttaactatatgtgtattttttgttttgtgggcttattctcctatactggctatgttattttctttgtacatgagcacattttggttctttttgtctatatggattgtatctagttgatgtgtacaaatctagatcagaaaaagaatgtggctagctagttgtcctggatttatatgttcgttaatttgtacaacttgatgaagttctttacattaatacaaaagaatctgaacattgaagttatttagtttatattatgaaattttgtttaggtttctgcattaacatgatgccttgaggctgctcagctaaggcttgctcgtcggattgccaaacaatgcaagcacctaacatgtatatatatataggttgcaaaaatattttctagataaactcaattaacatccatatgatcaatctaagtaagttttcacacaggtagctaacagctgtatatccaatgagccaactaatccaaataagaaatttttagttccatcactatctatattcaagtaggattgatgtattattagtttataaaggtccaagccaatactgggtatatgccgctaccttatacatcaaatgaatgaaaaatgagtgaaatgataataatggtggagattgtgctaatggtacagtagcagacgctgacatgtaagcccgaatccacgtatcagccattgctactgtgtcaacagtagcagagaatgcactagaggcaggccggcagatgattttccttgatggattggaattcagaaaataatcctttcacgggcatcgtcgtgtgggtgcaactcttccagtaggaaccagcgttcgacagataggccttttgcacaggctaatccgtctaggtctttatgttcataactgttccaagtgtgcaccgaattcgcagtactggacttgaaagtctcgaagcggcgagccatctcagcatggtcacgcttcaacttgtacgatacagcttcgtctgactcgacgtacgtcctcggcagtcacgcacttaccatcatctatatatcacaattcacagacaaatcaatcagttttacacttgcatacaaacaaatcaattagaagtattaaactttgagtaattttacggtccttgaggaggtaccattttttctattataaatttgatacctcttggtacctaggtactatgagatatcaaattttacactaaatttttggtacctcatagtatctcctcaaggaccgtagaattgctcattaaactttagttcctcagggtcgatcagggactaaaacatatcggatgtttggacactagttacaagtattaaatgtagactaatgataaaactcatttcatgaccctagactaattcgtaagatgaatctatttagtctaattaatccatgattagcctatatatgcgatgctatagtaaacatatgttaattatagattaattaggtttaaaaattttgtctcgcgaattagctcttatttatgcaattagttttgtaattagtctatgtttaatactctaaattagcgtcgaaatatgcaatgtgacagggactaattaaagtgatccaaacaccaccaatctatccgtatgctaaattgcatgtacagctgcatctttgattgtacgattggttattatggggtttaatataatgggattacctgggggctcgctgctgtagcggatggagaggcggtcggagacgtcagccgccgcagctaaacgggcggcgcggcatgcggccgcctcggctaagcgggcggcgcgagatgcggccgccgcgtcatggcgcgccaccgcggctcgggcggcgcgacatgcggcggccgacgccactagacacgacgccattgttaattagggcttactgtattttgtttctaccacatatgcatatatgtcgtcaaataagatcgatcgatcgatcgatggatgagagataggaaacaagtcaatacgactaatataaattatagagtaaaatacacggtcggtccttaaagttgagcgcgggtgtcacttagattcataatcttgtaaattacacatctagatccaccatcttgtttaagtgactcattgaggtccaaaagacctctgaccgggttgactggcttacgtggcggtccagcgtggcaacatatttgcattttgcccccctttttgattccccgtgtccgatccaatcccttctttgcgtggcgcacgcaggaacgcgtcgacggcaacgtgcgctagcacgcacacctgcggcacccacctgtctcaaccacgctgcgcccgctgacgtgcctcgtacccctctggcagccgctcgccggtgttgcgcagcgcccagagaaaccgcacaccgtcgtcgacgggaaggagaaagagcaggggaaggggaaggcccccgctctagccagccgtgggtgcacgcgacaagtggctgcggcagctgctcaagtcaagcttgccctgccgccccgctgccgccatggagctcgcacccgcccagctcgcgccgaactcgccgacgcctcccccacacacgcggccgcggtaggcgacccctccccccgggcgtggccggcgacacctcccccgcgcgcgccaagctcaccgacgcctctagcaccaacgaccagcgggaagggagaccgatggatctggccgtcagtgaggcgtgagcgccaccggcacgctagctacgaagacagtgacggcgctccgcaaactctcctctagttccctccgccgcctgccaactgctgccacattcgcccgtcgccgctccgctgctgctccgctcgcaccccgctgccgcgcttgccctccaccgttccgcccgccgcccattcgtcaagaaggatttgaggtccacgacggcacggcgtcctgatcttcgagctcgtccgccgctcgcttcgtcccctctaatactgtgtcgttggcaatcatgcgtcgcttcgtcgaggtccacgatagcggcgacggaggacactgatgttggcgaggcgaggccggagaacgtgacaagcgaggcggtgcagctgtgctgtgcgactaggcgccgcaacagctcagccatcggtatgacatggccggcgaaggggctgacgatgaggatgacgtgcggcggcggtgggcgatgtgacgacggaggcagctgagggatttgggggttctttttggtgcccagggctctactaaatgcaatgtagatggtcagcttcggtcaaaccgggtttggaccttaatgagtcacttaaacaagatggtgaacctagatgtgcaatttacaagattatggacctaagtgacacccgcgcacaattttaaggaccggccgtgtattttactctaaattatatctctatctctcccaacttctcttctactccctccaactaaaagtttaagccatagttcttatatcattgagaccactcaccacaggcggacaattttttttaattagatactaagtaaaatttggtacataaaggttctatgaaaaatttagtgtgcttcaaggtaatttcttaaatactgtaaaattcttaacatactttgcagtgatttcaggcctgttattactatctgcaaagtacgttgattactgaatccacttcttccatcttttcactagttgtaattggaaatcagcaatatgaagaacattgtttgtgtgcgctggtgcgtatgtacatgtgtgattgtgtggcgtagaccaaataatggtgaaataataaaaccagcttaagcagataatcacaggtaattaagacatgttcttcgtagttctgtcagcctttaaaaaggcaagcctgaagatcctttccttatgacactagctatcaggtgttatttatgaaagagatgattgactttcagagacatatattaaaaggagaagctgatgaaaaatgcaaagactaagtacataaatacatatattcctcgctttgaactggctcgtcaggcaaatatttgtgttttcatcaaatctaaggcaaggtcaaactccaaagtccctgcaaaaaaaaaaaaaaagctcaaactccaaagtgggacaaagttgctccatctctagcttcttttagaatggtcgtcaccataaaatcaagaacacccccagcagctggttcagagtcagttgctaagaaaaaaattcagattagtgtactacgtcaaagctactggagccagaatctgtatgaaggtccccgtttctcttgcaaatcaagaatccattgtcgtctagtccggttaggatatctggctttcacccagacgacccgggttcaaatcccggcaatggaacattaatttttgtacattttttctttgtctgctagttttgtttgtgagcagctcacaaaactaacttcaagatttaatttatggcttgttcactttgttgcttaccagattttcacaataccaatttttaataagctttggttttactaaaaaattttaacttggtgtgtttagtttgacatctttctaaatcttggtagtgctttttatcaggggtgaagctagcatcaaaataagggggtgtactaccattaaaaatctagaaattttcagtacaaaactgtgtattttagtgtttttaagtgagaattgaggaattctggggttaatgtgcaccccatacacaatatagcttcgccactgctttttataataagaaagttccaaaaccaccaaataatgttaaggttaaaatcagaataaagtgaacaagttctcatcagctgtgtttgttatgttgagttgggaactcattcccttcgcacgaaaaacggagcgatattttttttatgattaattaagtatttattattatttttaaatagattaatatgatttttaaagcaactttcatatagaatttttttaaaaaaacgcaccatttagcagtttaaaaacgtgcgctcggaacacgagagagaggagttgggaatccaggcggccaaacatatatagccgtgtaattaatttcctacgtaccactaaacagcttttttgaggtgaaatttatcgtcatttcatctactacatgtagaattttgcattgcttggagccttagcctagttaacttctcagcgaaaacgagaaagctctattagagcatgatcaattaagtattacagaagaaaactattattcaattaagcttgcatatgggctgcctccaggcccataggcccatgatctgtaactgggccgtaacttgcaaacctgcactagaatgggctttaattcttggttgtcaattaattcagtagttttgatattattaatttttattatttactagaaaaaatgcatgtgcgttgtaacgggtgaaggatattttattattgttacacagtttagttaagatgaaactcactatagaaatttgcttggatatatatttttctacaaaatcatgagctgcaattaagaatccgatcatttcaagttagcatgcgagttttttaaagagatatcttatacatatttctaaaagcgaacgaatttaaaacctgacttaaatacggatctatattttcaaaatcgaatgaatttaaaagccaactcatatacagatgatatataaaagtatcggtaaaaacatcttcaatttttataatggaagagatatacatctaaacgactgaatcttctcttgcctaagttgccttcgtgaaatttcttcaaactcgctttgaatcacgcctatatgcaccaattaacgccttgtaatcagtggatatttgcattgtgtccaatatatcaatcagtacgcgtatggcttgtggccgagtattgaacgctggctgaacgacttgactcttgtgctggactttgatctgttcgactcttttagtagcttaattattactagccctcaaaatattgtcttttgttcctagctcaaaaggcaaattaattaagtcgatctagatgtttgtgctgctatacacgagaatagatattgttgtttcactgcaagatgaacataacatttgcagatatttttatcctttccaactagatgtacacaattagtattaaaatttcacctgttattttcgcatagagagattaatggaaacgctatgcgttgtcggaaacgacgatcgagttaataagctgtggcttgtgttaggaacatgtcgcatctatgcttccaagaagcctctcatggctagttaaatagttagttaattactatcttaattaatttgatcatgtgcctctccattcatcggttcttacaaagtagtagtatatactactcctaaatccactcccaaaaaattccttcatcagcttctagtatactggacaactacttctctgaatacttgcagatgcagagagtctctgtctgcagctgttctatactccactgagctagtaacaactacttttgatctgttcaccaactagtagcattagtacagtttcttattcggatgctctctaatctctgcataataagtagcatattatactgcgagcatctaatcctaatcaccgtatttgttactcaacttccaccgtctttgtccaaaaaataggccacaaaaagagccaagcaaaagttcaggttttcaggagttctttgctgtaagctaatgagtgagttgggatgtcatgacagtgatcttgagcaagcacacacaactgaaattaaaaagaaagaaaagaataatctaatagtatgagattatacttgcattcacacaacatcctttttctttcagttccaagatgcatatgattatctgcaagggattaagtgcagatctgataatcaagtgctttgctaatacggcaagctaatcacatcttatctccgacaaagagacaggttaatgctagatcccaccgtggcaaaaattgtcagcttgtggtatgaatgaaatgatgattaaaaacaaagttgtgaggcagctgggagcattctagaaagagccagcaaatgccaatttgacccaccaccttctgaaagctacacaccaaattgcaaagtgcagaaaaagaaaattttgaacatttcttctcatggtcctcttcaacaccaacaggaagagatggaattcatctttgtctccatggccatggcgtgtcagggcacattatgaaattacacccctacctttcagcaaaatttcatccaacagagttgctgttgaccgttgacctttttgtgggtcaactcaatcaagaccagtcaaactaagcagaaagattcatagatcagtgaatgtagtgtatgaagttatagtggaaacttgaaagtatgcaatccaaatttgtcaaaagagcattgctactcatactatttttctttctttttttcgcatagctcttaccaacaaatctctcaaccgtttgatttaataattatatgggagttcaaagtaattctatatttactcacatcataccacatcaatgtttgtaatagatttataataaatcttttaggacctttgtagtaaaaaaaacaagtctaaaatcaagaaccaatacttttgggcttttggcgagtacaaaagtggaggtcttaatcaatcctcttaacaataataattaaatataaatatagggggtagagtgcaaaaaggactcaccttattagtcatcttccttagccttaagcgtaaagcaactcgtctcatcttcagagaagcaaacccaacaaaaaaaaaaaaagaattttcaggttttcttctcgctttcaccggagaaggagaaggagaggaaggtgttgatcgaatcctcctccaatcgcgcgcgattcgatccccgttgctggccgctcgctcgctcgatccctcatccgatctgaatcccccgatctgatggcggccaaccccggcaacaagatccgcaacgccaagctggtgaggaatcaaacgtctccctcaatttggtttcttgatttgtttttgtttccccctggatttagggctgatgatatttccccctaagatccctccttgttggtcgcgattagattgatgaactgattcccccttattatgatcgtaaaacaagaactcaatctttacttattggcatcatgtgctcatgttgttcatgtatcacgaattccgggtcttgggagtatgttggtatgcgtttactaacagtgttgattaaccaggttcttcttggagatgtgggcacgggcaagtcgagcctcgttctccggtttgtgaagggccagtttgttgagttccaggtgaatttcttttacacgtgaactactatgacctaagattgagcaggtttggtgtgttgggataggcttgattttgttggttcattcggatgcaggagtccaccatcggcgcggccttcttctcgcaaaccttggcggttaacgatgagacggtgaagttcgaaatctgggatactgcagggcaggagaggtatcatagcttggctccgatgtactatcggggtgcggctgccgcgatagttgtctacgacatcacaaatgcggttagtacaagactaagtgacttgcttgaattttaattaagttgtacatcttgatgatagtttctcaaagttttgatttaatgcaatcatgcctgcatatcactgaaaattataagtacggcaccacagccgcgattggtagaaattactaacagtctaataatataatttacgccattgaaaccagaattacgattagtaagtattggtaaaatcaccccttctctgtgattaacatatcgaaccaagtattcatgataatcgtacaccaactttgacattttaatccatcatcttttattgtcacagaagattcgaacttcctacatatagttttaggttatattgctcttctggtcttggttcaagtgtggccatgttttcccagatgatagactgatgagttggttctgccattaccaattagcaactcccatgtcctggcgttatggcacactgatagtagatcaactagttatcttcactgtttttgcaccttgtttgcatcttatgagcaagccctattcggagaagatactgtatctattgtgtgcccttacttgaacggaggaacccttcaattcacggtcttgcgatcttatgtattagcatattagcaacgcatctctttatatttttcttgcttcacatgcagcttttagtgtgtgttcttggtaaacatgatttcgatctgcattacaagtttttgggaagaaataaatatatcatagttgatagtttacaccgtgcacaaatttaagtctaacttcattcatactgttttatctgagtatgctcactgctcattttgtaaaagtggtgctaatagtggttctcatcattattttctgccttttaggcctctttcacacgtgcaaaaaaatgggttcaagaacttcaagcgcaaggtaatccatttctctttttgtaattttcacgtatgattagaacatctgtaaataagcagctatattgattttgtacaactgctggaccacctgtactgtacagttctcttataagtgaacttgcaatttcatagcactataagacatcgtgtctgtttttttaatagtccagctaatacaagttaacttctttttatacaggaaacccaaacacgataatggctcttgctggtaacaaggctgatatggtagaggcgaggcaggtgccagcagaagtatgtaattttgcttctcaaatccctttttttgtgattatatgtcaaagcactagtgcatttctgcatgaaactatcatgtcactgtgatttgatatttgtcactagcatctcataatggtgcttattttcctcattgcttcgagcaaaagtataatttggccttaccagcttcaaattactgtatttttctcctgtcacatttgacgatgaattatcagtatgttgtgatagtgaatagcacagaataactatgtctactttttgttgctcctgcttcattgaaaaaataactctgaattgaagtatttaacaaaaaaatatataataaaaagttgtgaaggcaagaaggttttctgttctgtggtggtcttttttgtttgctcattgcaacactgatctattaaataatagataccatcttttgtgtttgtggcactatcctgttcttgaaatgaatttcttttccattatgacagcctctgcggcttgctttgttgatgcttatcaaaagctctaatttgtatggtgcaggaggcaaagacctacgcacaagagaatggccttttcttcatggaaacatctgcgaaaacggcgatcaatgtgaacgatgtattccacgagatcggtgagtttagatcacaaatcatttccgcagtggatttctgtacgccgacagagctggttggttatttggtgtacaaaaatgtacacagcctgcttctgctaatttctaagcgaatttgcattcttaatctgatttcagcaaagagattgcttcaaggacagcaggctcaagacacaccggctggaatggttctcaaccagagaccagctgagaggatggtgagcagttcttcatgctgctcataattcaagtgtggagtatgtgacaactacataatgccatggcctgaaatccaggagaagtgtgtatgcatcagagatgcacacaaagcttgtaaagtggctgctgccatcccagctgctgtttcttattttgtcatgttcgttctgtaaatgtgaatactagggtgtcgctgcagaaattcagatgtattactacagtgtatgctcttgcttaagtatttctcgacactgaaacagagtaaagcaaagtctagtcagattcgttttgtttgcttcaattcagatcatgcagtgagcttgctttttacattctaattgtgctagtatgtgcaattcagaccacattcacccatttgtaccttttcgtcagaaaaatggaaaaatatgatcagattttgtagttacccttttacacaaggaatgtggtaaagatacacgcatcaactgaacaattgctgatgtagcttatccaattcaacatcaagaagttctgaaaccatcccaagcatgtgtggctcacaagaaaaacaagcatatacacgcttagggaattaacaaaaaataaataaaatcagtgatggcaactccttttgcttatgcaccaaaccaggaaaaaagggagtacaagaggaaaagctcatgaaggtatagaaccatctcacttttcctgtattgattttcaagaggggcatggaaacatattattccaaatgaaattcatcagtatgtgccattcttttttttcttaatgctatctatgttgttttcactggatgtaatcttcattgtagctgtcactgatcaccgaaacgaaccgctcgagccatggcagctggtgaaggtccttcatggtgtcaatgatatatgaatcggcgcagcggggcggcgactggcttggaggctcacccaggttgaaaccccctgagaggaacctctgaatgagagccagctgagctctctcctgctccgagtacccttcgatggcggttggcatgcagtcgaacgtgtcccatgcccatatctcggatgcttgggtggaatgcgctgccgaggcagcctcgatgctctcttcgtcccagaaaacacattggcatgtctgtataccattggtgtactcggcgccacaggagtagcagaactcgtgcccgcaccttcagaagtgacaaaccaacatttagcatatcgataagaatcaaaaggtgcattcatgaattagtaatccttgatgggagcgagcatttgcaatgcaatagctatctaggtgggcgagcaacacagagcacatctagttggatctgaatctacctagtgtgaaattactatgaagagtatgcccatataaacaaaaccctaatgcggactgtagaagaaaattctcttattgacaccagtaatgcaccttaggccccaactaagaattatatgaagttatctcttgtatgatatgataaattaaataactaatttgggaatccgggattctgaggccataataaggaacaccttggaatttgtactgaaaactaccaagttctttaattcagagtgtggtcagagacagagtgggccaacataatatagctagcttacagtctacaacatttctatctgtttggtaactttcaaatattacagattgtgggagaggcagaaatcagcgcactacttaaaagttgcactaagaaagcttcatcaaacataataaacattcgttcataacctgtgaaaatgtgaaatgattcttctctctcatttagaaattttaactactagcatgacaacagatctttactcttataataaacagtgtttaatgctttcaagtttcagttgaagcccaatgaaaccggccaaaaagagtgcttctctatgtagaattataaagcttagttctgtgtgtacttgtttatttttttaaaaaagaaattcctctttttagtctacgagattccataccagcaagtgtgccaaactgaaaaaaggaacataccagcaattcatatggaagcagccttgtgtgagttcaatcattcgtcggcatctctgacaacgcctccacctattgttttgtgctagccgatgcaaagacaggtctcctgcatctctttcatcaacaggcaagctctggtactcatcacagcccatcatgacatgccatggcactccacagttgatacagatatctctatggcattctgggcactcaacacaattgagatctgactgacttgatgtacttgctctagagaagtgctgactaagatctagtagaactgaacagtttggaaagggacaataaaatctttccatgtctgaggtgccagcttctgcaaaagctctctccagagaatcgtagcagctaactggaaggaatgacttacactcactagcagaaatatgatatttacaccttaactgtgggcatcttataggaaccttgttggtttgcagcttctcttgagtatatgaagtcaagcagctatagcaaaatgtatgagcacaacccactttgatcatctgagcgcctcgtttttcctcacagcaaattgaacaggtgccaacctcgtatggagatagatacatgatgcctatggcttctttggccaactgcagtggcctctcaagctcaaagctaggaagcaatattatatcaaagtcttccagcttttccaccagttcaagaattctgtgtcctaaagctaccaagagctggtcttctagaatttcagcttctgcgatctgtcagtgcaaaagaacaagaaatgacacatcatgtctaagtatgatataatacaggaaggcagtaagataactctattgaaataggtaattatgtaagaattctacagctttcggacaacataaattgaacaaactactgcatagaactgcaagtgatgaatacgatctatatactgcagctgcactgcagtagcagaatttggaatgtgcagctgtcataactgcacattccctaccttttcatcctttcgttcctctcagtttagttctgtttacaacagtcagctattaataggtagctgttaaaatctcaaataggaaagacggtttcttcattgactgattgttgaattgattagttcgactaacttggaaccaagcaagatggcatgaagtcaagtatagttatcgtggtgcggtccatttttttgtcattcggattaccagccaaacatgtggtatcctcaaaacatgaattacattattttggtagcgtatatcacaatgccaaactgcaacatacagtttagttaactaaaccttaagcgcccattaggtgatgcccaatagcagaaatatcagggtgattgaaagcgatactagcgattctgtgtaacattcataagggcaaaccatatattagagaaaatcggaaactcttgcctgaaagtacagcttctccgaattggtgaaagcaaagatcttccgtatcccattctgcaacgccaccaacaggccatccatcagcgccaagtgatcggccactagctcatccacatagaagtccagtttcttctgcacctgaagcataggcaccccaggtgacctctccatcaccaccccaatcccggacagcttcttcccctccgcctcggggctcgacacgcccttgaagaacagcctcaccgagctctcatcaagctctcccttggcgacgccggccgtgaatgactcctcggtgtcctcccactcatcctcatccccacagcagctcctgaagtcatcctcccctctcgaattgcaggcgaaactgccctccacgtcggctaacctctcctccattgctgaaatcccaatccaattggtgaaatccaatcaaatcaaatcaaatcaagacgacactctctgactcagttagaaagctgagcaatccccaatttgagcaatctccattcagctagatgggtcagcaagaagctgagcacactgacaggcaaccaaaaccaaaaaggtttccaccaaacgagcccttttgagctcgagactgcacctaatcccaactccaagaaggtgccttgttcctttttgccacaaccactatggtggtggtggtgatggtgccagtgacctatcgctccgacgaccccacagattcgtgggggggcctcggaatcgcacgagatttggctcagaaattggcggagaggatggccatgaagcaccagaaggagctccacatcgcgaattccagggccgcgagggcgaaattgaacggggcagcgaccaaattcacccaaatgttggagctttcgtcgattctcgaattattcctcatgcgagagagacgctcagtagtaattagcaattcagaccccgaggacagtgcaaatcaccgccgcgacgtgagctccaatcacctgcctgcaaggtgagaatttaccaacaattcagatcaaaatcagcaattgcgagaacgaaacgactgctcctgaaattgacaaaagaaaaaaaaatctagctcaaatgttggaaaggcccaagaaaaaaaaggaagaaaataccgaggcaacctgcctcgcaatcgaatctaacagcaaattctgcagaaaactcgtagaaacagatctagagaaggcgagcatttaggcccaaaagtagatattccagctcaagaaaaattactagaaaacagcaagagaaaactccgcccaacaagcacaaaaagaacccaacaaaattcgcagaaaaaaaaaaagatgaagaacaagaacacactccacacagaccgagatgcgcccaatcgaagcaagagcgagtgtgggtcagaaagagagaaaagcgggagcacctgggagtcacacgcatcacatcgaggagagatgaaaccgggcctccggggacaagaacccagagggaggaaagaaggaaggaattgagggcaagcaacaaatggagacaaagatgggagctttccggcacaccccggtgacggtgaggcgcctttccttgcggcagtggagagagaatttattctgaggaagaagaagaagaaaaagagagaggagtggcgttaaagcaaagacagaggagccctaattattccttctcgaccacgaggagcaggagcagcactgcaattgcaaactctcctcttctccttcttcttcctctccagatttgcactgctgtccctcaacaagcacaaatattgcacctttcaaacttagcactactacctctcttctaaaatgttcagttattttatcatggaacgtgttttaaaatgaagggtgtgtttagttcacgtcaagggcccctttgatttgaagaaaaaatataggaattttggaggatttcaatcctatagaaaaaattcctatgaagccctttgaaacaaaggattaaatcatatccaatcctttgaaattcctatggaatgcacaattctatagatattttggaggaaatttagcaagagctccaacctcttagaaaatttcctttgagtctatctctctcatccgtttcctgcgtttttcctgcgctccaatcaaacgaccattcctgtgttttgcgatcctatgttttacacttacattcctatcataatcatgtgtttttcctattcctatattttctcagccctgcgattcaaaggagccctaaaattgaaagtttggttgaaattggaacgatgtgatggaaaagttggaagtttgaagaaatagtttggaactaaacacggccgaagttcttttcatctacattatcttcttagccaatcataaccattctctatttaatttctttatatattttcttttatcaacaatgacaacttttttaatgatttttgtatattttattaatatttgctttgatcttaaaaacaagatagtggagaactaaggcatgtttgatttagattattagatggattatttagggataaattacttttaaagtaggcttaaaagatactactagcttagaccaaacggtcaatacagtgaaaataatttaaattattgaatggattatcgatttagttgtagaaataaaattatatatattgagaaataaacttgacaaataacttgaaacaagcaaaaatgcataaattattttagaaaaatgtagttttagaagtgtgaaacaaataatttattttatatttcgatgaataagaaaaaaaaatatggcaccatcaatccttaaacaagtcattattactcgttcataacgtgtccaattgcctacgtttgcttgtgccatatcataagacgactccgcattttataaacgagtcaatgacatcgatgttgcgagtgtttataatgggttttattgctccttgaaaccatcaaggataagttaaccaaaaaaactttaaagttttattgttaggtgtatgtttgtttatactttaccctcgtcaaagaaacaaacatgtatctaccgtagagaacaaatcaatcaatgcattctagtagtgctaggtggtacttggattcagggactaaacctgtcatatcggatgaatttggagtattaaacatgaactatttactaattacataaataagagctaattcgcgtcacaattttttaagcctaattaatccatataattagcatatgtttactgtagcatcacataggctaatcatggattaattaggctcaatagatttgtctcgcaaattagtccagggttataaaatgagttttattaatagtctacgtttaatatttataattagtgtccaaacatccgatgtgatggagacttaaaaagttttaatcccttttaaacggggtcttaatcaagcatgtatttattactactccctaaagtagtggaaaattaatataccctccttttctaaatacagtaactaatcttaaattctgctctttggaattatgaccacaatctactcttaaatgttaggtaaagtgaacgaaatttcgttcttacatttactccatccattcctaattaattttttcctaatcatctttcacaatcaattttcagcatcatgagattaatgttttaaaattcattgtgtaatatttatataatgtactccctccatctacttttgatagtcatattccatcttggcacacagaccaaggataagtaattctacttatcatctatttaaacatgctaccaaggataatatgataggttgttgaattgaaatatgcctatcaaagataaatttttcagatttagaaatatgactatcaaaagtagatggagggagtatatttcacatgatattgaactataggaatttctaaaattttattattgttaaagatagatatgttaacttacgataaagctaaatcaacaagtaatatgaaatgggaagtatatgacatattacacttaaataacatataacattttttatggtttgtaaatacttaaaagaacaaatgatcaaaattttaaaggtggatagtgtgcctaacgttggttattttgtaaaaaggtgacgaacacactgacagccgccaagaagtaattcatccggttttataattttaaagttttgaataataacacgatctacaaaacgcatctttaactatgattttctcttgtaatgcatataataaataaatatttaattttgttacagtatttttaataataatctatttatattttttaagtgcattcaaacttgtaaatattttagaagatactaattgttaaagaaattttaatagtttgactccagctgaattaaggaatcggatggagtaattagcagaagagaggaggtgcggattgcaaaagaggcatggaagtggttggtcgattgattgatgtcgagtttaatggcggtcggggcccacactcacactcttcctgcatctgcatgcgaacggaacggaagaagaaatcctccgttccgtttggactcgccaagttggggcggtggagtgggcccacgctgtcggcgagagcagccaactcggaccagcgacgtggcaaccaccaccgtccagtgtcagcgtcagcaactgagcatattctaccaaaatcatcttcctcctctcatcaattattattatgcttattaaggatcaggaacgactacgtgcacaggattctaatctcctaatccgattgaaaacatgcagagattcttccctgcattctgaatttctgatgagagaatcaaggatatgagcatgaacgtgcggataacaaaaaaacaataacaatttttagaaacattaattctctctaatactccctctggttctatattaattgacgttttgggcaagcttgaggttaaacttttataactttgaccatcaataactttaaaaatatttagtttaaagaaactaaaaaaacatatatagatttgtcttttaaaacactataataaaagtaaacatgcattcatttattgtatatattataacagaaaaataaggtcaaaggtatatcttgtagagcgtgtcattatccaaagcgtcaattaaaatgaaaccggagggagtaactaatgtatgcatgtgtgtttccttgcaatcgtatctttttctccttttatttttccttttcctttttactgacgacagcacctgattcaagattctaatgctcgcatcttcaggcttttactaatttttttttcttttcatcagtcttttttgaactcgattcttttctcttttcttcaagagcaaaactcagctttaatctactttctgcctgggccgggattcacacactgattaggcaaggagggtaggcgatagattatactactgtatactgttgctgattcagctagttgtgttgtgtcattaataggaaattaaccacagcttgggagagctctagctaaagaactcttgttcatctactctcgcgtcgtcctcccctggggcggcacgggaggcgacgacccagccacccatctccctccccttcttcccctccgcctcgccgccgctcgagcggccaccggcaaagccggccggccgcaaggacggcggcggcggggcccctcaccgacctttcaccgggcaggcaggggagccgccaggcgggacggcggtgaccgccagatccaggccgctccggccggatctggcggcggggaggacggcggccacggcggcggggatggcgacggcgaaggcaggggcgcgcggcgctaggcggcggcggctgaaggcaacgggaatggcgatggcggcggggatggcgatggtagcggggaaggaaccggccgcgggcgcgaagatggtggtggtggtcccgtgtgagcttgtggtggcaacggcgcggtgctcctcggcggcggcggcggcagtgtcccccagatccgcgcctctcggccggatctggagggtggccggcggcaactggcggcggctgtgcggcgacgacggcggcggtgcggcgacggcagcggcggcggtgcggcgacggcagcagcggcggtgtggcgacggcagttggcgacggcgacggcggtcgcggtagttggcagttgcggtgttggctggcgatggcggcagtggcgcacatggcatggggcggcagccagccgcatgctggtgaagggtgacggcacagcggcaggttgcggatgcgggggctggagtcggtggcagcggcgacggcggccgtttgtggaggcggtggtgacatcagcggcgaggcgaggatggcgacggcgaggaagctgggcgttaggcagcagcggctgcggtggtggtgaccgtgtctgcggtcactggaggcatggcggcctcaaacggctagctgagggcgtgggaggcgactacatctggccggcgcggcatcgtttggtggaggggtcggagaccggcttggcgcagagaagcgcagccgatgacagcggaggccggctcggcgcgagaggcgcgagcgacggagatggaggccggcttggcgcgggaggcgcggccgatggagggagaccggattggcgcgaggcgcgtccggtggaggaggccggcttggcgcagagtggcgcggccggcggtggaggaggcgacctaggggtgagggagagctgccggtgggtgtagcgcggtcttcagcgctcgaagactggccggcgggggacgccggtgcaggggtcccacatgtcggcaaagcttgtgtggtggtggagcatcggtgcgtcaggcgtggtttcgcaagtggcgagcggtgggtgaaaacccagtccggccttggtcggaccgacaacgatggttatcccccctcctgagagcgttgtcgtgctgtctcacccctctggtgaccttgtctgtgtccctttgttagcctagtggcggtcggtcacgcttagcggcggccggtccggtgttagccttctcctgggcttgtgtgatggcgttgtcgccgtgtgggtggtggtttattttttcctttttcctggttacgaccctccagggttgtaaccttgtaattttttcctactctatcaatagaacttcgcaccgtctcgtgcgagtcgttcagaaaaaaaaaaaaaccacagcttgatacaataatccagggtaataattgcctgaactgacagttcattcatagagcgactaaaatacttgcatatatatatatatatggtatccccatattgatcctttgcaatcagctggctttcatgtgcctaggcacattggtttaaagaaaaaacatataaagaataactgagacgataagataatgcaacaggtggctaaggttagataatgcagcacgttctgcaagaattagcaacagtaatcttgcctgcctgccatctttcggcgtttagcccagtaatcagttttaggttttgagggtgtactcttctgcttggaccagtcagctagcagtgctgacctactactaataataagatacttgtactaattattaaaagatacagtacttactactaattggagtactggtagtatggaatatgtttagcacctgttcattacaacaagtactactgtactaatagctgttctgtcgtctaatggtaactgtacctatcatatagcaggtggcttggagcttagcaagggaacagtactagtgttagctgtattaatactacgactatcttacactggagagagaacagctagtgacacactaaccaatcaagctgtagtagttcagtagtactagtagcttggatcattttgccatgaagttagctagatgccaatcggctcagccattcattatatactcctacatctactaaaagattaattagagtggaacagataatctcagcattcttcaaggttagtatagtattaacagtgtcagagatatggcactgattagatcatactgtcgagatgattcaataatactgacctatagctctttgacactgtatacatgcatgttatgatcaatgtgtatgcagtaggttttgcaaaaccatacgattatcatgcgtttattattagtctccttagtttttaaaaccacaataaatcttacgataattatacgattaccccgataaccgtaacccattcaaaaactatttgatgaacgcacacgatgctttacgagagaaccttttcagatacagatccctgcttccactgcattgcattgttctgatgatcggtcagaaattcagaatgaatgactctgaagcagcattgcagttgagttgatggaactttacatggcagagcagggcagctaatgacaaggcatgtgaacggcactttgcagctttctgtctcccccttgattagcacagagatcagcaacctttggattttttttccctattaatttattgatatactcgagcctgacagccgggacattagtattagtaggagtatataatgagtatttaatctactcaaagcagggcatgtatatataagtagtaaaagaaaaagaaaagtgtactatatataggcaacagtaattacagtatgaaatttggagtaatacactaatactccctctaacccataatataagacgtgatcaaagttggcacggtctccaaaacaaatctttagcttacaatttctcatatactataaaatttgtagcaacaaaattatagccatatgaaagtaaatttaaatctccatctaatgatataatttttactcctttcattccaaaatataaggcacaaccacccttaacccaaaaaccaagaaataattattatcatcttgtagtttgaatcatcctaataaatataatgcatgcatccaataggattagataacatgagagtagaggatttaaaaaagtaataatttaatggagaagatgccatagttaattgcatgcttgcatgcatgccttatattatggaacatctaagaaaaatggttgtgtcttatattatggaatggagggagtaacaaataaaatttattttatattatactaagtgttggtcaaatgtttttgttttaaaggttgaatcttgaaatacgtgcacgccttatattatggaatagagggggtactcattaattacattacatggtgaaattggtttatcttcttgcatgtactccatacaacaatgaccaagagtattaattagtacaaccttgaaattaaactcgaacaagaccataaaaaggcccaggtttgactgcttggccctttcggatcacacaaggaggcccaccacgatctggcccatgtatattacgggctgcacgtaggtgacaatccccaagggcccctatttaacacgatttccgtttcatgggcctcacgacaggctgagactgcacagagaagcccactctcgcgtgcgcatttctcacgggcagcaccctttgggcctttggcatcccctgtgagcaagggtctattttaatgtaaaattattcccctcaatcccctccaatactttttaatccattctaaatcgaacaagacctaaatgtttcggcttcgttggttgggagctccggatttatggtctatgcttttcgactccaaatgatcgcatgtatttctcgtagtcttagaggatgtttggatgggactaaaaatttttagtctctttcacatcgtatgtttgacactaattagaagtattaaacgtaaactattgataaaatccatttcataaccatagactaattcgcgagatgatctattgagcctaatcaatccatgattagcctatgtgatgctatagtaaacatgtgctaattatagattaattaggcttaaaaaatttatcacgcgaattagctctcatttatgtaattaattttgtaagtagttttatgaatatatataatgatattagtgtcataaaatatgttgttttactcgggagggtatgtttcgggttttcattggtttttatcctgagttgaacatggaggagggcctgtaggaggcaagagcttgggccaaagaccggggaagctaaggagagatagggaaacccaactgctgccggtcggaacggacaagaaagaggtggggataagctatataagagataaggccgattcaattggaaaaacaatatactcacaatccaatctagccaattgaatcgttttttcaatattgctcatagttctagcctagttcatccatctttgtcgatttgcattgtaaatcgtctgccttcgccgcaagagtgcgaaatccatctatcccgtaaacctttcgttcacccacaagacgggtgtttatcgcttgttctatctaaatcagctccactagctggtttaatctatcaaaacctattttgatttagcttttgctagattggggtggttggcgactctataccaccataagacgtttagagtgtgctgattgtgattgtcttctcgccgaaaaagttaccaacatgatctaatctaaataatctgtaaatttaaaataatatttgtgttaaatctacaaaatatgataacactggatatcttattatatatcgtggtataactatatatctcttgatcacgtaatttattctatctgatctgtaactagctctggacaataacaacaaccagaattaattagcaatctcgaaagctactaattaaccttgactacatgcttcacctgcaaggtacagttatacctacattttacatgagcaaagagatgcacgcatattgcttgtttttgaaaattttaaaaatcttatagtattaatttgtatttattgtcttttgcaagtaagcaaagtgtttggccgagctataaatcttaaattgagatggaccaaacattaaaatatatggagaaaattaagtagagtggagctaaaaacaattacagaagcatagcggtgacaccctgcttcgtaactctgctctacatttattttacgaaaaattaagatctacttcctccgtttcacaatgtaaatcattctaacattttccacatttatattgatctatatctagattcattgacatcagtatgaatatgtgaaatgctagaatgacttatattgtgaaatgaaggaagtagaaaagttcttccggcatatatagatccaaatccgcagtggagaaaatggatcactcactgagacatatctgaaatgcattttccctccatttgcatcactaatttttaaagttgtttcataatataaggcttgcatgcaaacatgtcattaactagcacatctttttcattgaaatattattatttaaatcctccatcattaagatctctaattttattaggtgcatgtattctattaaaatattattatttaaatctttcatcataaagatctctaattttattgggtgcatgcattctatttatcagggcaatctaaactatgagaagataataattattttttggtctttgagttaatgatggatgtgccttatattattttggaatggagggagtaattcattagcagtattactaggagcactgctacacgtattatatttcttttacaaaactcttacaaacaattatttcaaccatttgatttaaatagatggaagttatagaaaatttagatgtcctcaccgcgtgacacatagtgttagtaagagtttagtgtgacaaaatttagtatgtatagacttttcttattagtagcttccccgtcatatacagccacatgccgtcggtccatttccaccaattaatggacgagtctgcgggtcgggcgcccgatcggtgtggagaaaaatcgggcgctgacgttagcatgacgtcaacacccgatttacttgcaaaactactttaaaatgattttttttctcaaattaattatccaaattataatccgattgcaccattaaattcgttgcaattaaatcttcaaaacaagaccacacatatatatatatatatatatatatatatatttcgatgaaaatttttttagcttattattgaattatttttaaatgttgcacgatgttccaccgggtatatcggaattgtttcactaagtagatcgaaaatgtttcactcgtttaaatcgtgttttgtttcaccttatataaaaacaatgtttcagcaaatagcgaaagaatgtttcagaatgtttcactcgtttaaatcgggtgttgtttcattaagtagatcgaaaatgtttcactcgtttaaatcgggtgttgtttcaccttatataaaaacaatgtttcagcaaataacgaaagaatgtttcagttcactgcaatatttgatccatacatagtaaaacattataagaacgctaggtgaaacatttttcagtggaacaaaaaataaaacgaattcccttaatatgggtttctaaaatatgtgggttttttgttgcaatggaatatttcagttcactgcaacgttagatctatacatagtgaaacattatgagtacactaggtaaaacattgttggtggaaaaaaaaaccaaattcccttaactaaaggtttctaaaatatacgagtgatttgttgcaatggagttgtgtgtgtggataagtggcaggtggacagggaacatgtggtgggggccaggtacgcacgtgatgggaggagggggaagctatcgactttttcccctccccgcgcgaccgagaaggagcattctcggcaatcaatccccaatttaatttgtgttgttgaacatttcctcctcgatatcctgtggacctgtactctcgtatcggaaccaaaacaattatggagtgataacacgcacgtgattgaattatttgcagtccgttaatgcgtgtttatccgaagaaaataagacatacagaaattttttaaaaaaagaagaaaatactatattgaaaccaagttaattaattaatcaattaatccgaatagctaaaaatatatcgggaataataattaattaactaatttacagaaacaagcgggacactcacgctctatatataccaagcccacgcgcgcggccgccacgtgccacggtaaaagctgagccgaccgccgccgccgccgccgccgccgccgccatcgacgacgacgacgcaagcttcccacagtggtagtgtactccggccacgtacgccatggccgtccccaggagatcagagatggtggccggcgataaaggcgccgtcgaaagctgcaggaaccaccaccacggagaatgcgccgtcgacctcgcctcgtcctgctgcacgtgtgcgccgcccgccacgacggcggcttcgtcgaggaagaagagaccgcgcgtcgtcgtcgccgatgagacgacgacgacgaacaccgtcgtcgacgacgacgatgaggatgacgacccgtcggccttgctgcggcggcgggcgaggtggaagcaggggctggaggcggtgaagacggccgtggcgtggcgtctggcggcgaaggacgacgagatcaggcgggcgcgccgggagatggcggagcgcctccggtgcgcgtgggcggtgtcgcgggcgtggcagagcatcgccgtggcgcgggagggggagaaggccgcgttgcagggcgagaacgccgcgctgcgcgtcgagctcgaccatgtgctccgggcgaagccgcggtggcaccacgacgacgacgacgccgagtcctgctgctacggtgacaacttcaccgacgacaccggcggcaaggaggaggacgagggcggcggcgacgcgagcacggcggcgaggtgcttcgggtgcggcgagagagcgtgctgctggcagtggcacctgtgcgccgcgtgcgcggcggtggcggcggcgtgggcgtgcccggcgtgcggctactccaacatggacatggacgacacatgcatggtgtaggaggagaattgaaggagatcgcatcacatatcatatacatagctagcttcaattcttcttcagttgtagtgctagatttggttattcaatttgtgaacacaaatcttgtcattcgtaatagtttggagtattgatggatttattcttaatttgttaatcgcaaccccttggatagtgatacatgtccctcttaattaatactccgtttcatattataaagagtaaatttcagaaaactactactatagtgataaaactatcagtttgctgcaacattagcgatctatttcagtttgctacaacaacagcgtgggaaattattacaaaactgcaacttttacgtgatatgctgctacagttgtaagctacagttttgtgataatttccaacgctattgtcacctacatatactgtagcagcatataacataaaagtttgcagttttgtgataatttcccactctattattccagcaaacgactaaaatagatcgctaatgtggcagcaaactgatagttttgtcactataattgtagttttctaaaatttactctattataaatgtttgggtagtgatatgcttgccacttaattaatacctcctatgtttcatattaatatttcctccgtttcatattataaatgttttggtagtgaaatacttgccacttaattaatacctccattgtttcatattataagttgttttaattattttatagtcaatcttatttaggtttaacgtaagtttataaaaatatttaacaacattgtcgacgggtgatacccgtagaccggatatagagggtattggggtacgttggtataaggatctacgtaatacgacatcaagcaaacaaaagacgaagattatactggttcaggccccttgacaggtaatagtcctaatccagttgatatgggattatatggtggaaaacacaggttacaaaggggacaatggaacttgtagtcgagtcggatccggcgagatcgtagtcgagttggttcgactagatcccgatgacttggctccttgcaggctccggcttcgtaggctgtatgagttgtgttggctctgagagtcgatgccttaggccctccctgaggggtcccttttatatcgcagatctggaggtttacaagtagaactcggagatatcagaccctgtacgatacattaacgactcaatcttgtccgagtaggattcttcccatccatagattctgtgagggatttccttagagtacgcaggaagtatccgtatgcgcgtgggtataccataccgatatgtaacgtatatcgaagggtaaagggtatgcctaacccgtaaccctgacaaacatctgttatcaaatgcttcgtttgtatgaaaaagtttattttatcctcctcaactatgagacatgcggacgcatctttaaaatacagatgggacgaagaacaaaaatgttcactcgataaaagcaatcaaacataacatatatcgtatttatagttcaatcatataactgcctcaatcattgattatggcataactaatctgttggacgttcccacctacctaagtgacattaaaaaaataatataaaatataagtggaagccacatataagccccacaaacacgaaaatcaaccagctagcccctctctcttcctcgatggccacctactagaaacaaagtaatactgttttcagtcttgtgttacataacacatgcagttgaccatccaaatatttagtcaagcgacttaattaaatgaaattcacatgctctgtatgcgtacgtacacacaactgatcatccacatcaaccacacatgatcaatcaattaatccatgaatccatggatatactacctccgatctcttggagttaattaattaattaatggacctgattattgagtgagtggagtaaactaattatgctccttagctaaccgtagtttggtcgttattatctttcaattaattgccacatgccgatggacacggtccacacggataatgctacgtatatatatggttaagatatgcgtgaccaggccaatgtttgtccttggaatatactcccgtatgtcgtcgttgactttttttaacaagtttgactattcgttttattcaaattttttgtgtaaatataaaaatatttatgtcatacttaaagaacatttgatgataaatcaagtcacaataaaataaataataattacataaattttctaaataaaacaaatagtcaaacgttggacaaaaagtcaacggcgtcatacattaaaatggaggtagtataatttaattgtactatgacattttaatatagtttaataactatagttgcttcaattcctgatcgaagtgaaaagtcaaaaaggaaacttgacaaagtggactgcaagtctgcaagtgtcaccgcgtaccattagacgtactcactgctacgtgtttcttgacggacccgtaacaaatgaaccattaaacaaactaaaactgtcaattgaaatataaaaacaaattaaggggaaaacgtgtttctatcgacagggagcactcgatctcgtcatttgaccaaaagttagatcggcgcggttaaaaaaatgctaatgaggtcgaattattttaatctaagataaaatttactccctccgtcccataatataagggattttgagtttttcttgcaacgtttgaccactcgtcttattcaaaattttttgaaattattatttattttatttgtgacttactttattatctaccgtactttaagtataacttttcgttttttatatttgcaaaaataattggaataaaatgagtggtcaaacgttacaaacagaaactcaaaatcccttatattgtgggacggagggagtaccaattaacgttaattgataagaaaattaattttgtcctaataatattgtggttcagtttaatttcacatcgtatgaccacagtgataaaatctactagtgtcttaatagagtagagtagtacatatttatctattgcaatatatgcttattggtggacttggaccatcgctctaataatttaaactagtgatagagcttagcctgatcatacaaccacacctcaaacttcaccaccaccggcgtgtgggagtctcttttagcgtgtgaatggcttttgttgagtgttgagctcggtcgtcctgttcttgacttctcgtctacttacttggtagcttagattagttggtggaatgtatgagtatgatagttgtgtggtttttaccccgttttcgctaattaattctgtatttatggcatgatcatgttatctccttaaaatggaacactcgttctttatataaaatgtcagcaacagtctgaccgttcggaaaaaaaaaacaccaccacgtactggtgatatagttagcgctatatttttattatgaaatagtattgcccgtaatcaataaaaacacttgttaattttgtaggctcgaaaatactatttttatgggcttgatgatgacactggctctgcaacaaaagtaacactgcgactagtgttatccatgtcgtcaaaagctagctggtgcaggatgcctcgtgtgatcttctcccataccttgccagtgagcaaagatggcttccctgcagtgttttttgtttttatttttacgcgtgctcgcaaacaaaaagaagattccgtgaaatctatcgcaattttccctcccctttcattcaccgtactaactttatcttctctacagaaatttaaaagaaaagtatttcttttctacatacaaatcaatatttcttcgtcgagcgtgtcaggaaggaaggaatgttccgtgctgcctaaggaaccgctcccacctttcccactgacgcgcggggcccgcatcgccatcgccgcgtggtggcgcaccattcgcgtcaccacaactaacctcctcccctctcccctcgccgcgccgccgccgcctcggctcgatccgcccatatatttcccacgcattcatcgcgtcgtcttcccatctctcccagatcgcaacgaatccaatcgaatccaatccgaattcccccccatctctcctctcctcctccaaaaccctaacccccactccccatcggagagagatcgagaggtggttgtcatggcggagtgctcctcctccgacgactgggtcatgctcgactccgacaaccccgccgactcctcctccgacgacgactacgtcctcgcgctctcttcctcctgcaacactcccgcctgctccgacgaagaggaggaggacgacgaggtggggagcgacgctgacggcgacgacctctacggcggagaactcgaggaggaggactcgccgcgcccgccgccgccgaggccgctctcgggcctcttctaccacaccgcctccgacaaccagcccgggtacctcgccttcgacgccatccgcagcgccaagcacctcatccccgacccgcgcttctccgccttaccggagcacgtcgccgtcctcgcctccacccgcggcctcgtctgcctccgcggcgagaccaccggctcctactacgtcgccaacccggccaccttcaggcgggtgcgcctccctcgccacacccgcgaccacgtcgaccccgccgtcgtcatcaccttcgaggagcccaccgcctccgcctcctgcttcggcggcatcggcgtcgagcactaccacgtcgtcgtcgccttcaacctcgggggcggcgtctggtccttcgagtccttctcctccaggacatggaagtggcgtgtctcccccgggatctccatcgtcgagcaggtcgagtccttctcaggtgtcggcgcccacggccgcgccttctggcgcacctccatcggcttcgtctactacgacccggagaagggctacccccacgagttcgccgcgccgcccgaggtggaggcccggccgttctgggagatcggcgagatggagggcaacctctgcgtcacctgcatggaccagcgcgtcaccgaggtggcggtgctcaacctcgacatggacgtcctcgccgccgatggggtcgggtcgtggtcgtgggccggccagttcgagggcagcagcctcaggaaccgcgagggcgtcgagctgctccgctcgcagggcatggcggaggtcgtcatgtgggacccctcggaggagcgcgtcgtcgccatggacctcgaaggccgcaccacccgcaacatcggcccgctcacaggcgaggactactcgagaggtttcatcccctacgttgcctcaatcgccgaaatctccaggtacctagctactggctactgcattcgattcgaatttgccgctcctacttgtgaattaattctgtgatgtgttgttaatcttctgcatccgattcgttttgatttgccactcctagctacttgtgaattccgtgatgtgttgttaaacttctgcatccgattctatttagcagcgctactcctgatgtgttagatcgatgcgatcgacgagtcaattggagtttcgtaccaattcgtcaattcgtgtattgctatcgagttggtttggatctgtagcccattcctgattaattggcgattagttaggatttctgtaactgctacgtacgcgtcgtttttagctgagtttttgcagtgccagtacgttttttgagttcgttatagtcagatccagacaatactcgcaggatagcttgtgtatcgaggctgatatcagcctactacattcccaaacgaaacgtgttgttgacgctttaaatcgaattgggatcagttgtctgtaactgctacgcgcgcgtcattggtcagtcgttgtctatgtctagatgatgcttgtggagttgtgatgtactgaaatgtggacatggatgcatgttactgtggagtggagttgagtggagctgatagacaatagataagatctctgtttgaccattccaatggcttagctggtttgattttgtcagtcttcaatagactcccaaagtcggtctccttacccgagtttaattaatcaaccgatgataagatttaatggaatgagacccggcaaaaaagataagatttaatggaatacattgtttatgttacttccatatatgatttgttattaatataagagcacaacacactggaatcatgcattgcaatttagtttagttaatgatccaaattcttactgtattaaattgtccgatgtcttgtttcccatatgtgtatcctgtacatatatatcctggcattaccgcattagactgagaatgagtagagatcgatagctcgtcctgctttgtcatctgcttaggtgtagacattttaccattaattgctgtctgtttcattgattacttgaaaaggtgcacaattttgtgataatagtcatatctatttcgttacattataattaaatttctatacccatttgtatgcaataaatcatgcatgggcaaaatctgtactgtactgaatgacaatggtttgcacttgtgcttttgagttaccagaatttggatagttcaccattgcatagtctgagtaaatattcagagcaacaacttctaatgctgctgcaacagagtaacaagtactctttagctgaacttttctgcatttgtgtgatacatgattagttggtcacggactgtcaagcgcatgcagctttgcattcgttgatgttgatgtgttatccactaacagttgtgtgctctgcttatgtttatgttgtcagcgatcaaataagttcaaagtgctctgctagtgctgctgatgccaacacgcccaatcttggagcagcagatgcgaccacgctcaacaacctcgccgcacctgctgcgcaagttcactgaagcttcaactaatctgtaagtcgtatcgtatctcgtcaattccaattcagacaaataacataacctgattgattgattgataatataatctatctgtgagatatgatgatactctgtttgcattgcaatttatttatcggtggcatgcatggcttggcaggtaccaatagctagcaggcagacaggaagattcgttgacgatgaccaggaataaacgaggctagctttcagattgatttgtccagcataaaaaggaaagcgaaaaggcatccttgattgagtggcaactggactactactgccataagcattctttttgcagctactccgtatcggatatgaacactaagtatctttcttgttaggttttgcgtctgccttgtaaatattagcagtagcaggctcccttttgtgtccgtccgtcgaactatcattgagtccttcttgagttgcattcagtcagtcagtcagtcagtcaggtccaaactagttgatcgagtgggtaaactttgaaactaccaccgtctctggtgttcctgatatgtcattctggctgggctatgcaattatttcttttgcttaacccattcattcatttttagtatttcctttttgttattccggttgtttctttgctgtttggaatcaaccacccagcaatttttgctttcctgggttatgacttcttttcactaggaataggaattaccattttgttgtacagcgctttgttccatcttccatggactgttgtttgctttgttccatgtactgattgctgctatacaggagaatgagcttcatatgcaccctgtaattgactggtgcaaagcttgttgacgctgcaaccccaataattgtttgagatgtgtagatggacaatgctaatatatgtactatgcttggtgcttttgatttggttttaccaatcctaggatgtattgcggacattgcctcctcctgttgttgttgttagttcttagttatataatgtgaagcgagtaaaagtcagtcagtcaatttcaggaaactgaaatcaggagatttagtgaagaaggcctgattctacaaagcactgttgaaatctacaaagctgctttgctcaaatgcaaagcagatttgattgatttgagatattgaggtctacggagtagtggcttgcacttgcagcggaataagctgcctacattctggaatctggagattcagatacctcaggtacatctccaccgcgcagaccacaacgtaccacatgacacagtgccatatcaatcgtgacaacggaaagcccttgcaactatctaaaatatgttgttcgatgatagtttcatcaaaatttacatctatgaaagttattctagcaaattaacatggaattttttttttttgccacagtcaacaatagacataatatcaagcacaataactaaagcttgcgcataagaggctacaacttgaaaagatgatctaaggtacgtttatacctaggtagtgtttagcaaatgggaaagggaaatgatttcccagccatctttaaatcctaacaattcattcttcctcttccatttaatcctaacccttcattcatttcccaatcccaatcccacccccatttcccattatccaaacacacccctacagtatggagaggttgcaataaggttgcggcaatggagacgacgtcttttgtgtgggctcctaaatgagtaggtgccatcagaggtggagcattgccgatgtcacgaggagatgacgacgatggtagtggaccacgagacgatgcagacgataagagaaggctaaatattagtactactataaggaagatgactaataagagggaaggaaagaactaggaagggattacgtcaacgattcaacgcctctacacggtctttttctctttcctctcttttttttaaggcaatgtgcaacttgctagggaatcaaggaatccaagcgcttgcaatggttagagttggctatgagctctataaaagagtaagaaaatatgtcctaccacttcctcaccggaggtgtgttgggaaggaatactatttaatacaagaaaaaccaattcttcgcaactaaaaaatatcccaaatcctccatggtaaggtgtgaactaaaaggagaaaagtgctcctacgtcctctacgttacacacgacatgcagccttacaaggaagagtaatgcactgttcatagaaaaaaaaacaaagcaaagaagcaaaaacttgcactgttgatagaaaaaaacagggagagaaatggacagtaaaaagagcaaagaagagaacttgcattgttcatagtaaaatattcatagcaaaaatatggcaggaagaagagagaaaacttgcagtcttgcactgttgatagaaagaaaaaaaagaaaggaaaggacagtaaaaaaagcacagaagaaaaaacttgcagtgttcatacaaaaacagggcagagaaggaaaatgttcattgcaaaacagggttaaaaaggaaaggaaaatgttcatgcaaaacagggcaaataaaaaaaattactacgcgccaggtaggggtcgaacctacggccttctgcttaggaaacagacgctctatccactgagctacaggcgctgttgtttacttgagagcaaacaattattgtgacaaatactcttttctccaaaagaatcaaaagttatgtaccgagctaaatctcctcgcatattgtatcggttgcttttgcaatggaaaatgtcgtctaaattcgtttttcagatatatggcggcagaaagaaatggcactgtggagattggtcacagatagcactgtgttcttttctatggaaaatgtcgtagacattcattttccagagatatagcggcacaaagaaatggcactgtagagattgatcacaaatattagtatgttattttcagctctttttagctacctcaccatacggatatgcatagaccacttgttccaagatatttgataattgttaaaaaaatatttaatttatcctacaatcaagtagataatccgatgaataatatatttcagacaggctgcaaatagaagagaacaaatgcaaaatatcttcatactgggaaatagggtcaggtggcaaagaatgttcccctctctaaactagaaagtcggccaattaattcagaaaatgtgcctctcctcaagaaatgtttgtccatttccttaatatgtgagctcacatggcacaggtgtttatacctgatgtctgatgaggtgcttttcattctgatggaattcggttgcttttgcagtgcagtgcttgaacgagacccagcctggtgtcaatcaccgtttccatgtttcctcgggtcaccatctattttgtcctgagatcttccaaaacaacggaggcagcgttacggcccggagcgcccattaccccacctcctgggtgtgcaccactgccacagaggtacaatcccttcactggagttctgtaatctgacctgaagaagtggtgacgacatgttcacggtcatgacagatgaaccttgacaggcctaagattcgccgagtagaagggtgaaggaatatgcatgttagaggtatagacataccatcccttggcaggcctcatgaggaaaagtgaatccaagcccattgcgccatgaaagatgttaccacctgtgaaaatgtgaatcaaatgctcgtttaacaaggttttcggatgaaaacagcaacggtcagcactccgcaagaagggaggtacactatgtataccacgcaaacagattacctgttaggccaaactccctttcaagatcaggtggagtcagcatatcatagcctaccactgatgagctaaaacccggtgcatattcatcaatcaaggaaaagcatctttcagcaaaggatttctgaaaattggtttcaattaaaatgtcaggggtgcctctctgtggatagtaactggtgacaaacaataatgcataagggcatcatcatcatccactctgttcgattaaggagaaaggcatatgtgggaaaacatacacagcaaaatctgtgcagccatgaaagcataaattaaacgaagtgcatcatgacatcaaacttcaagaaggaactacttactctaacattagaatcctgccagctgccttctgaaagtttgtatggtgtgtactgaacaaaaaggttaataacatgctggcctatcaaaggataaagcaaaggatgaacattgattcagattatataaagcataagaagaaggtgaggtttcacagccacatatccaaattaaacttggattttttggggggtgaggaaaattaatcttggatatatgaactgtagggcacaattatagcttatacaaatcagacaccacacttttatgcaactgcaatgctgggaacaagaaattggcatacctggtggggagatggtcttatccaacacagaaggaatcgtcatttctataacaggtcttgtggatgagacgccatttgcagcttccctgtacgctagatcgatttcctccatgctggagttccagtaaagttcaatatgaaaagataaggataaagttcaataacatgaaaatataaggatttgcatagagaatccaacaaaacgctacatcatccagtagtttccaatcaccaaaataatgagaaactagcagtaggctgcatgatcccagtcaaatgtatttgacgttgggagaactgagattagtttttccaatgtcaaatgtttttgactagatgtagtagtatattaccgttaacatgttcagattacactcagtactgtcctaaggtactaatggagacatgatatttctatatacacgtgcaggtcatcgatttggtacatagaattgagacaccaagtgtatagtatttccaaagtagaagaatatgttaacggaaagatgacatcatggaattaagagattatttcacttgcctactcattactcatgttggcaaccaatctatactacacaggaacgggaggcaatataaaagctggtgtctcaaagattttcaattgtgtacagctacaacagaacaaagattaacacaactgaatgcaataacatgccgcagatcatcatagttgaagtagaaaaggttccataacttcagtaacctacctttcagatccaatgtgtatggtgcccatgtgttctggaccgccttcaggattaaagtctttgcaacaggaaaactgtggcagcctgtcaacagccacattaattttcgttgttgcctgctctccacagaatcatattacattgttatcaatcaatattataacacttatttattatgttatgcttcaaagtacgttcttacagagctataatctgcagttttgatagcagagaggaagttgtctggaagaacattggcaggcactaggtcctgaaaaggaaaccagatatcagtgtacaaatatttgtttcattgtgtctacaaaattggaacaggtattatatcttcacgttgttatatattctgagtagctcttaccacaaatgttctatatggagttgcatttgataaaacaactgatgtcagcacctctgttccatcagccaaaactacctacaagttcccataatttcaagaggttcaaagaaatgaaataggagtaccatttatcggttagtcaaagaacttaccccctgtaccttcccagaagtgtgatgaacagatatctgggaaacctatataaaaccactagagtgaggcatgttgcttaaacagaaatctgggtgcaggataataattcaccactaaataaaatttgaccttttcttgtagaaaaagccagcattttacagctgtcaataaatagttactcattttttctattcaaatttgaatgctgctccaccatacgtaatcaaagaggtaatatcatggcataagaagagaaaatgcacctctgcatttgttaaaatttccacacctgcttcaagagctgctttgcttatagctgacgatactgaacccataccaccttcaacatacctgaagcgaatgtttttgttttaccacataagtttttcaacaagcaaaataagaagaatcaggaaaccaactactaatgaaccaacaatgctaaaactagcatatttggctagaaaccatatgaccattatatggcatttgccctgtttgactagacagtggagatatgcgccagcaaaacaattcctgatgctagggccacaaaggcttggacatggtttcaggcctagaacaatgaaggacctattatttttctgcgggaacagaataacagagagaagctcaggttaagagtcatacgcccatactccacgttggccaccagtttcccccataacatgatgcagaagaacataaccagatcctggagtgtggacaccagcctgtagaaagtccatgcagcatcaaatgctaaaccattaccattggccacaacacatttcttggttcatccaaagcacccttaccatagaacctatcacagcatcagtcgcaagagttgccttcaacacatcaccctgcagttaaaaaaaaacacaattgtccatggttacaagaaaaacatgtgaatattgtcaattcaatagtgaaactccacgttgcttcatatgaacaatgtgataagaagtatttcagagaacgggtaaacaagatatcaacctcaaaccagttgttcaagatcttggatgctggtgaaaggagaaggtcaaagaaatccctgtgaataacatatttccaaggaaacagaaaaggaagattaaagttacacatagcactgtcgagtcatggtgttgatggtggcatttgcaaagggtcagtatttatactcacaccatgtccttctgcccctgctgcatcacaatcccaagaagtttgctccagaacacagacttgtcaaccttatccttcatcctgtccaccatggagaggtggtattcatgcctcatctcagggggaggcgagtctatgacaaagtccatgagtttgcagaacttctccagcttctcctcgtacctacatttacatgtacactacccaactaagatcatcataagataaaaaaaaacatgcacggtcatttagtcacatgaccgattctacctaaatttcacaatgaaaacagagttcatataatcaagcactactccaagattttataactgaaaacaagagtcaaaatatcagtgagtctatcacctcgggtatgcaccggcatcattctcggagaacttgctgatctccgagtggttcagctcagcgtcggggccgagaaggagatacctgccgtctaggcatggcgtgaatgacgacgggctccgcggcaagagcttcagcccatgcctctccagctccagctccctatcaagaaaagaacccacatcaaagctagcagcatcagaattcagttagtacagtgcaatattataacccgcatttgcagaatgattacagaaatgcatatgaacacagagctgtgggaattccgattgacaaatagtatttgggtgggtagggggggttttactggatcagggcggggcggaggaggctgaggaggtagctgcagcgggagaagcggaagcccgggacgaggtcggactcggagacggcggcgccgccgatgacgccacggcgctcgagcacggcgacggagcggccggcgcgggcgaggtaggcggcggcggcgagcccgttgtggccgccgccgatcaccaccgcgtcccaccgcttccccttggggaggagctgctgctgcggagtcgacgacggggcctccgtcgagaagcggcggcgttgacggcgggcggccgatagcaggaggctcctcgccgccggcgacattgggtttaggggttcagccgccgccgccgcctgcagccggtggcgaatatttctctttctctccgacggcttgtttcgattacgtctacgctactagggaggcggatttctggattacgtgtctccagtctctgcctctattggctcatagtttgaaaaaggttattccgaccatatcgtttttggctatttatattttttgttttttaatttctttatgtattgtattaatattgacattgaatagtttaaatgataaatatagtcaattaccgaccgatcgagtatcgtttttaaagagatgctactaattccgaccgttttcactcaagtgatgtgctttggtagcaagtacaaggtattatttgtaaaagaggggggggggggtttctcgtcgtttgccctatgacttataaaccgataccaaaatatgcactaaaacataattttgatgttttttcaacgtagttttcttagtttggatttaagtcgctaaaatacatgtgcaaaagttttacctataaatcatttttagtcgctaatcagtcgtaagtaaccaatcgatgtggattgtgatgcgctggttaaagttgatcattcatttgctattgataaagttatggtacacacgacatgattatattcaaagttaattggtgtgattttgcatcaatgggatattcaaacttattacggaaaaattcagccattcttgacctttttgtatttatttatttgtttgtttgttttccaaggctgggaggaaaagaaattgcattgtacaggcatgctatgttgaagaactccaaggacataatgtgcaatcaaacgaggtgaatgagtgtgaaactgtgaatagctttagcttaggattccagtggttgaaaccagggttcaccgtaccgccggtaaccgcgcggttaccgcggttaccgggcttaccacgggggtacggtaatgtaaataccgcggtaacctcattaaattcaaataaatttaaaaaataatttgaatttttgatgaattttgtacggtttttcacggttaccgcggttaccgcgcggtaaccgtgcttaccgttggggcacagtaaccccggccccgacggtttgggaaaccctggttgaaaccaatccacagaattttagtaagacttagcacgggtactcatatttaaaagcaaataaattatacttttaaaaacaaaaacttgacgataatattgtaaacaggtgccgccactgtcatctactactctatcttctagtaatatttaacgttgattagtaagaaagaaaattaaaaacgaaggagcatttttcttttaagaagcaaactaaaccaaaaaaaaacttagagaagtaaccaaccacagcacaatacactcacataaacagccttggtcaagtaaaaatggtcgcttattactgttggtcatttagcagtttttacactaaataaaaaaccatattgccattcttcagaaaaggtcccatggtctagcggttaggacattagaccctgaatctagtaacccgagttcaaatctcggtgggaccttcttttttcccctttttattttttattttttatttttttcccattaaaccttaatgaccttttttactgcaatcattaaccgaggctgttttaatcaacgggcaagattttccaggatctgatcagacgtgacagcaagactttgactgtgcgagtcaacttttgatctgatcggtcggttcaggcagccgcgtcgcgtcggctttgccttcgcgttcgggtcggaccggaggccgacccgtgggtacaaccgtcatttcgcccgtaagatatttttaggacactgtcaggacacgccgacgtcagctgggccccacgtgccgacctatgcacattttttgctccgtgtcccaatatcacccaaatcctggtgctcaatcatcatattgccgaaagcaacctctcctagtgtactatatatatatatatatatatatatatatatatatatatatatatatatatatatatattctcttgtaataaatctatcatttagttattatgcttttaatataaaagttgtttggaaaagaatcttgcaataatgtcactactctagtcatgagttatagaatatatatggatggatatgaatatatattcttctacaaattttagatatgattttgtggatctggtgcgtgcaatgatagatggtgatacaaaattccactttgtttaatctaaaaggaggttccactttattttctataaaagcccctaacaaagaaaacaacaatgattatcttgactgaaatgatatggattaccatgtttaaagtggatcctttttctatacaaagtattattgatatctaaacaagaacatatatacttaaaaactcaaaagctaggctatccacaaatatttttatgagtagagtctatccacatatttttttcgctaaaaggaaatggaaaatgccataacagattttaagaaaactagcaataaaatgtgaatttttcccattaaatagtaaatacaacataaattccatcgctagccaaaacgatacaataagatttgctcatttacttggaaaaaatcctctccaccaaagtgaaaggtgaataaaacctttcaagtatgtggttgtggttagcattgctaaagaaagaaacacatagtcatcaaaattgatcccccatccacataaaaagtgcacaagaaagggatgctcatgagctaaagtgaaaatacacacgagtgcgtgctttacaaagaatatgaacattgcgtgcaagaaacgttacaaatgaaatggtgagacaaaatgtgctccgtgcatacgtggtggtgactcacattcgtatgaatacggacaaacaaattcatgcttcgtgtatatatactagttgcaaacgtatcggcatgtaagtaaattaagtgtacgtgcttagcctaacttagtaagttaaccacactaaaaaaaaatgtatacgctataagcgtgcgtgacacattgctacgcacgcaaaaccaaaagaaaaggaaaaaaaacactactccacgtcatgtagcaaaagggcggaattctttccattatctttagaaaaggaaaatatcatgtacagtatactactagtggtgtagatacttggcgtgagcgtagcaaaaacacaaagacaacttgaccccccgtatattccaaaggcacccacctcatatccttatcctgcgcccctcaccccccaccgtcggatgcgatctggacggccacggattcccctgagccggctataaatcccacctgaggtgcagccttcttccccgtggtctctcagaggtgggttggcttctcctccccctcccggttcggttcggttcgggtccggttcgatttcgtttttttttcttcttcgtggggttggtgggaaagcatggcggcgccggatgttgagtaccgctgcttcgtcggcggcctcgcctgggccaccgacgaccgctccctcgaagccgccttctccaccttcggcgagatcctcgagtccaaggtccgatggattgattccctcttctctgtgtttttttggatgtgatttggtggtggtgttcttcagatctggttgcgtagatctgactatgggggttgtggtatgcggtgcagatcatcaacgatcgggagacggggaggtcgcgcgggttcgggttcgtgacgttctcgagcgagcaggccatgcgcgacgccatcgaggggatgaacggcaaggagctcgacggccgcaacatcaccgtcaacgaggcccagtcgcgccgctccggaggcggaggcggaggcggctacggccagcgcggcggaggcggaggctacggtggcggcggcggctacggtggtggcggcggcggtggctacggccagcgccgtgaaggcggctacggcggtggcggcggctacggtggcggccgtggcggcggcggcggctacggcggtggctacggcagccgcggcggcggcaactccgacgggaactggaggaactgagcggtggggccctcatggccaagttatctatctatctaatcgagctaccatcatcatcatccgatcgttatcatcgttagttttgtgtggaactactatctagtttgtgttactgtgtggttgcccatctgtgtttttgatcgcaagaagaaagctcgtctcgtgtttgctttgatcaaatgaaatgaatgaatgaatcttagtgtgctccgctctcgtcaaatccatcgaattatttaatttgtcatggttgtgaatcatgggggttgatactatttgttgttgatgctagtgcaaatgatcatcatcatcacgatttgatgatttgctaagcataagcagcatcattagctaccactcacactgactgtgatgaagctgtgaactcacactgatgctactactgaagcgtttgtctgatttccttacgattggatttgttgctaaacagcatcgttagctagcagcggtgacagtgatgagcagtgatgctgctggactagagatctgctgatctgtgtacaaatagattggagcaaagcttttgcaatacagatttttcttcagtcgatgagaatgccggcagcgatcgatggcctccagcttgagcacttgcaaacaaaaaccacagctccatctatccagtttccccatatttaacaacacttgaaacagtctttgcaattgctaatcttagaagccatgattgccacaaactatgttttctttgctctaattttagcagagttacagctgaccaggtgacgcttgttgtgcccggtcataatacaattcagagaacatgaccatgagatgtctctgcgacagaagctcggcctagcagtgtgaatgtgtgatggtaagatttgtactgtgttctactcctatgttaatcccggggatgtatcggtacaacgtgtatgtccaaatacaccgccttggcgatttctgccggcttcaatgcaccttgattgtcttgcttattcgccaaaacgaaaaacgatgcgccggccaatctctgacatcaaagctccaaggattactaactttcagaagaaagattcagcaaggggaaaacatgctctgagaattaaaactttgcagtcttcacagtttcctggtgcagaataaacacaaaccatttggaaactgggtgccattaacaattagagttagtggctaaaatcacttgcaactcttctttcaacagactctggagctcagcattcggatatcagaactatcaatcacccaaaccaggcagttagcctgctcaaatacgatcggattgtcttctgtccacccacatcccatatgttcaaagagaacctgccacaatcaccatatgtaaatctgaatttggtgacctgaacatgtcacaatatataaccctgtaacaatcctagatttctagtttcttttctgtgtttgccactcaaaagcattaaaggcaaggtgcactctcatgcttctgaagcaatcatcaaattttgaaagtaggtactgatcagtgtcatgtcttaacataataatagcatgttaactgaataataactagagaacttcgcgaccaccttatgctgtccacccaaaaaaaaaaattgaaagcagtcaagcctactaaagtactatctattttttttcgaaaggtgctaattctacctattatattgccagaccatgtgaggtgaatttcctacaaaaaatgttgatctatgtgaatcactaggcactccatggcataatctcacattggaaaatgtttgttaaaattgatcttatggaactaaataagctagggtgctatgaagataacatattctagagcatgtttgagcatattctggagcatacttcaataccttatacttgtagaggttaagagaagacacttgatatcatcaagcagataaaaaatcaatatagatcagtaaactcacactctattgactaaaatgatgaatccacttccaccattccacatgcttcagtcttatgttacatgcacttaaattgatacgaaaattttcagaacactacagccagtatgctctcggagacttccttttttagataatggtatgatcccggagatactatagcatttaaatgataaatcatatcatcatcctggaatttccttgtgatgccatatttataacttgataattgacagaaggagaggttgcaatgcaatgcatacttgtggtacttgatggtcttgatcctgaagccaaagtgtagggctaatgacgctggtgtcatcaccattttttcttagcacaattgttgtcttaccctagttgtggaggccactgtaaaattcttcacatcagtgatgtctccaagaaaatgaaaggaacaacaagagcaaccaaaccaatggtacaaagtacatataaaccctggtaaatcaagaaacatactacaacccaggaatcaagaaaagcatcagcattggaagctggaagaggaggggaggatcagcttacaccatgagaatcctcatcaccttcttctcctttcgcttgatctttctgattatgctgaggagacccattctagagccggcacattcacacagcagaaatgactctgagccacactctagctggacaaacaaggattagaattcctcctatctgtaaaccaaatcttgcgcgctgcaatcagtagtatctgaactaggaatcctgacaagcgagagatgacagaatcggtgcaggaaacaaagaaacggaggcgaagagggagagggcactgaacctatcggagggaaaggggtcggatcgccggcggcggcggcggcggcggggggagacatgagagatggaggaggaggaaggcgatggatacatgggctgatgttagaggcccggacggttcattgggccgtcggatttagtgggcttaatgggctttgcctgtgcctttaaggctgttttattttgaacaattttccaacttctattctctggttttgacacgtacataactgctaaacggtgtattttttttaaaaaaaatctctataaaaagttattttaaaaaattatgttaacttttttaaaaaaattatatctaatacttaactaatctcgtgctaattcgtcgttccgttttgtatactgagaaggaagtgttcccaacaccaatgaacgaacagaaccttattacttgcatggtaaaattgacttaattattagtcagagcattttaggagcaagaatatatttagtttttcatataatctttgttggtaaatcattggtaacatctaaatactgatattccgattgattctcttcatcgcatttctttatttttatctatggacatacacatacttactggaaaaatgtaagtttatatataaaaaagcctattagcttgacatacaagcgtgtagacatatccatgtactatgggtcttcaaacgtatacaacgattgtaattaagcttgctcaggcttcgtaaaattattgtctctgccactgattcaaatacatgcatatattaataataaggctagggaaaaaaaaaggactgatagatattggggaaagttcttcgcgttctacactacgaggcagttcaaggcgtcgactatcacatcttttggtctccctcatccagaccatgcttctgcatgctgcacaaccatgtgtcagttatttatttttaaaaggaaaaagtcaagtaccccctaaattttagatagaaatccgtgtggagataatggataccccatacccacatggcatgtatatccgactagatatgggggtaccatatatggatacaatatctttagtaaagaactcggttgttttcctaacttgtgtatgaaatatccgaggattctagtcggttacgattgcaatttttatttacttgcatattctgttaggaacatgtgttgtatcttgtaatacggactcctccccctatataaggaggggttcgggtgcctcttggggcataacctttctctcatatcatacgatcaataatacactcggtggatcaatccccgaacagaagtagggtattacttctcattgagagggcctgaacctgtataaaccttttgtctcctaacccatccacttttcctgcttgatagccaccccctttaagtattgccgaaatattgtttcgacagtccatctagcaccctaaattttaaaaccggacgtccaaccccttaaactttgcaaaaccgttcatgttaacccctaagatggttttggatggtggctttgtatattttaaaatcttaaatgaacaactttaaataactaatataacatatttgaatatcatcagttgtaagtcattaatttatacttatacagtgatatcatacgattattatgttggtacttgtttgtaagtaagagctaacaactggtaaaatgaaagatttaagtggagattataataatatatcccctctgtcccaaaaaaaaaaagaccaatcctacctacgaacctagacacatatgtgtgtccaggtttgtagctaggaattcgtttttttttacagagtagtatatgtccaatgtgcatggcacatgatcaaactcatccaatttatacaaattagataaaaaaatcactatacaaaaccatcttatgaggtaatatgaacggttttgtaaagtttagggggttgaatgtccggttttcaagtttagagtgctagatggacttctatctaaagtttaggggaggggggggggtggtatttggactcctttttaaaatgaaagatgttgaggcatagtttgagagcatttctagatcgagataagttttattggtgaccttttgtcatagtgttctcataaaaatatgcttaaatcattttctcacagttgattaccatttttgtaatcttttcttcacttcacatatattttctagatctatgataccgctttattagttattttcataacctcatatttcacttaaatatcattctataaaatcccgcaacattgcacgaggtatcatgtaaataattagcaactcatgactagtcgatggatcggttgggggcgttggttgtggcgtaagcttccgatttatcgcgctagctagctacggggatagtggcttcaaaaagaagtgcatgtgaaggaaatggaaagaaaccgccctatcaatacagtgtatatgtatcacagacccagggttcgacttaccgtcggtaaccgcgcggttaccggccttaccgcggggtacggtaatataaataccgcggtaacctccttaaattcaaataaatttaaaaaataatttgaatttttgataaattttgcacggtttcgtacggtttttcgcggtaaccgtgcttaccgccggggcacggtaaccccacccccgcggtttaggaaaccctgcacagaccaaccaacaaatgctacaactccctctgtctcattttaagtgcagttgtggatttccgtgtccaacgtttgatcgcccgtcttatttgaaaaatttatgaaaaaaattaaaaaaataagttacgcgtcaaatactattaatgttttattatctaataataataaaagtaatgataaaaaaattcaaataagacggacggtcaaatgttggacatggaaatctataactacacttaaattgggagggacggagggagtacaactctatgtgagagtgagatcagaaatatattagtgaaagcaacaataacacatccatgtcaccccttctgaggcatcaaaaggaaaggggaccagttgatgtgtttgaatgtaagcttttgtgaaagagatcattgtgcagcgatacgacaactaatctatgaagaatagtattgacagagaaacaaaatgtacgcattaatcgccttaattttcactcccactattcaggaaatctgaaagatgctttcaggatcaccatttatctgttgttctagtactacaaagtacaaaaccctcagtaacataggcattcagcatgccatttcgatactttttttttccttaagatataatgcaagcttttaatcaagctgatacaaccacacatactgttgttatgtacaacaaattcagcctatgtagaacaacaggtataagaaaaaaaaatcaactaaaagagttaatttagttgtacaaaaagtgtagcagaaaatattagttatacagaaatcaaatattatgtgctcgaatcctaccagtagagagattcttattgttgcctgagtatttactctctttgagacaattttgtaataaatggttatagcttctttgaagcaaagaccgaaatttttattccattatagaaaaaaaaaaaaaaccagcagacatatgagattaagatggatccgcatccgggtggtcctgactcctgaccctgaaagacaaccgctgggacagtgtctgcatcctactccaggatcaagagttgtatacactaattgtacactaatccaaattaggacaatgtgagcatgcagtgggcacacctaactacacatggcattgacttgagttgaagtacttcaaatatttttagtaataaaaagactactcacaacaaaataaatgaaaattacatattttttaaataagatgaatggtcaaacgtgtaaaaaaaaaatcaacggtgtcatctaataaaaaacggaggtagtatgttctaatgttcacaaaatcacagttaaggtaaaaaatatatctagatagaatgtatgaaaagcaagcacatcggtagatttgctttttcataatttttgtttttctcataatatttagataggatatatgaacagcaagcacataggtatatttgagtcgaaataacttttagattatgggtttgacggtcctttattattattattattattattattattattattattattattattattattattattattattattattattattattattattattattattatatgaagggaaaattttcttatttttttaatcaatttataattttataattcccacttatttacccgcaaactctactataataattgactaaagctttgttgaaataaaaaacaaaatttatttatcgaaaaagataatgattggatggatggagatacatgcgtggtcctgcgcagccagcactgtacgtacctactccctccgtttcgaaatg

SEQ ID NO: 8789 - DNA, 90513 bp, Oryza sativa
  unsure (1)..(90513): unsure at all n locations
aacaaggcacaaagtgattgatacgatgtagaagcatagcaatagctgtcaactttatctattttcctaggaataaattttttctttatataatctcatcaatttttttttgaaggaaaagttaaaaaaaaaacagaacaattctgcttaggttacctaaagaagctgagatcagctgagaattcataatatactcgtacggtccaataagaagaccgacatgatctccgcttggaagcaactaggaattaaccaaatgtcacaaaagaatgttgccatcaagctcaccaacctaatgacgatgactaatacgcaatcctttcagagataggcatataaacaaccaatttgcacatgcacatttctatggttgactagtaaccttagctctgtggttcagttctgtaatcaaactccgatttccaagacagaacggcagcaaagccatcctcttggccctgaagctgaaggtagtagacaaatttatccagcaggggagcaaatttccaagctcacaaacccaaccaaatttttacaggacaaaaaaaaagaaatgcagttttgagacctattgcagctcatgtgtttcaaaaacgctctcaggtgtcagccttgaggtagaagtttgcatttaacgaccgtgtcacactacatggtacgatcccgaaccagatccacgggctctcaggtttcgatctggtacaagcaagatccacccgctccgcttggatgactgactcgcgccacgcatatggcgggaggagggaggtggatgtaaatatatatatatatatatagagagagagagagagaggagaagcacacgtactgtcagtttgggagaagacggcaacacggagcgcccagatgttgaagaagccgaaccagacggaggcgaggcggagggagccgaccagcatcagccaccatcccaacaacggcatcctcccgcctccggccatgctcccgctcctctgcggcgacggcgccacctctgctctgctcgcaggatggagatcggcgccggcggcagacgggatggatggaggaggtcgctctgcggccggctgcctatggcctatgggtcatacgcacaggcccatcaggctggaaatatttcttctacgaaaaaagtaaagttcacctaaggtcccttatcttgtcgtcgagttttaaaaccatccctgaaccggaataccagaggtaatggatcattaatctggtataaactgagtcaccttttgatcccaaagcaatattgctctccgattttggtgacatagtggctgagttagtacggccccacatgtcagcccacaatcttctttcacctctctcctttcttcccatctcaacccaaaccttcaagggagctgacaatgggtggggagaaaggcggcggccagcggggacaagctcgacggctgagtagtattaattctatctctttttttatttctctatgtgtgagtggatttttattttaagattttgtgaaacagtagtattttatatgttgtacgaatattgttaattttttaaagattcttttataactatttaaatggtgttttcagctaccctctcaattttaaaactatttccccacatggtagcagcagcttgttcaacttagatacagtacagtactagctcctagatggcaccttgcatggcgggccagatgtgtagtactgcagctggttgctgccactgtaatgaatcgagagaccatagatgagtttacgcacgtcgagacgtgcaaacatatgcaggtgctgcagatagatgatcatataccactccactatagatgtgcaacattatctgaggaggagtaaaaaacaaggagagatcgtcgatgtgtgcgtggagtggaccatgcaaacacctgatctgatctcacttgagtgagagactggcagtaacagtagtcagtcctagcagtatacggacatacaattaaaatattaaacatagactaataataaaacaaattacagattccgtctgtaaactgcgagacaaatctattaagcctaattaatccgttattagcaaatatttactgtagcaccacattgtcaaatcatgatgtaattagactcaaaaaattcatctcgcaatttgcatataaactgtgcaatttgttttttttcatccacatttaatgtttcatgcatgtgttcaaacatttgatgtgacgaaatttttggaagttcgaaggaaaataaacacagccatagtctatttgtttttattttcacagggtgagtagacaacacctgctgcctgctaatagtagagcgcatcgatcgaatggtgaagctagcacatcgatcagtgcaaggagtagtctgtttacaaaatcgtttgatggtactttcaactttcagatgagtcgtcgctgcagtctttagcaatgcaagcggcagccttgatcagcagagcacctacttcctccataaaaaaaaaaccttaaactagaaggagacgtgaccgacgatgaatagtcgagattcgtagttccaggagtgattagtttttttggacggatggataaaaaaacttgttggattgagtagctagctagttgtgcaggcctctcaacattttggcttcagccgcttgtgagcactgaccgcagtccgctgagtaatgcatgaaggctgaaagcttgcaatacgtacgtacactccagtagaagtatatgaaaatccatctcttgcaattcggccttgtttagtttctaatttttttttctgaaaacatcacattatatctttggacacatacatagagcattaaatatagataaaataaaaaactaattgcacagtttgtatggaaatcgtgagataaattatttaagcctaattagtttataattagccctaaagtactattgaccttaactcaaccaaaagaggaaggaaaataaataggagaaggtgcgggagaatgggagatgacgagaatgacggtgaccaatagctagccagtcatttttctgtttataacggaaatctcagagaggtaataaaagtgtaaaatatcaatggagcataagaatcctctcgattatttttctttgtttaattttacagcacattcaggcaacagttacatttgtgcgctgtattacaagatagttatgttgggatacgtataggctacgatagtataaaaattaaaattttctatcacgtaaaccaggaaccatgcaagtattagatcatagattgttaccactcgacacgctgcgcagcggaagaagacgctgagaagtcgaaggaactctcgcgaagtagcgcgcgtcgatgtagaggaagtagtcgatcgcaccggctcgaccttctcctcctcgtgcgttctcctcaccgtactcccacgccgatcagcaccgcaaaccagcggcgcctttaccggtatccgcacgtacgtacagggacagaacgccacgcgcagatgtgctagcacccgcgcgcagctagggttttgctcggggaggaaagtgacggctagggtttctcacgtgatgcaatgctccgccagtcagacccctcacgaatatataggatccatcactcgggccttcaaggcccgtaggactcctattcggatccctatccgaattaagctcatattggatctccattgtcacgcccagaaatttagcccaaatttccagactattttgcgtattaaatccctgtccaggaccagccagggtacacaaaacgacaagtaatatacagttccaaacgtaaatacagcgtaaaatacttacagaagaggcacttagtcctcacaccgaaacagaacgacagcagcggaaaaaggcgatcttagcggggcttcagctccactccacaggcaagactcaactggggtctgagccttggtcttctaacttcgtcttcaactcagaagtattacacttctgaaaagggggaacaatagcaaggctgagtacaaccaccgtactcagcaagccacaccaatgatgcagacgtgcaaggggaacacaaggacggtttgtggctatttgcataaaagcggttgtaaagcattttattaagcaaaacagtaaaacagttgagtaattaaagtaaccttaaatctccactgatcaacgctacaccacgttgaacaggcccaaccaacccacctgaactacagtgcattaggttgatttattaagtgtgagactaatcacggtgaatctggtcgaccgcccataaccgcgggcacggctattcgaatagttttactctgatcagaggtgtacaactgtacccacaagacacagccccacgacacgtttccgtgcgccgacatgccaccacgacataccggaaagaggccgtgacaggacccttcgcataaccccctctaaccaagcacaccacaccttgtcacaccccaatctgataccgccgtacaacggcacctgacaggagcgtgtcgtagggaaaacggcgcgaaccgcttcctacgaaaccgcgatctcggtaccagtcccaggacatagtgctggtacccacggtgacaaatatgaatcatagcaatccttaagataaatagaggacttatttaccttaacttaggttatagctcagacagcccgagaatacaaccgacgacacggacgaggcgaacaccaacaacagcagcagcagcggaaccaacggtctaacacccaacaccacaggcgacggctgggaaccaggacgaaaccctaatcttcacttcactttatcttctcttcagggccggggaactatatatatatatatttatatagagcaagggtgagtactttcgtactcagcaagtcacgggaacttaggtgtttaatgcaagcttggaagagaggcaaggttgttttgcaaatcttttatttgaagacattttgaaatcactaagtgatttatttctttctaagtttgggccgaaaagagacttgcgtctcgattcgacattaagagatgtttttcaacagctcatttagtaatgtaccgacctcccgggtcagatcattacttctcggctcccagagccattccacttgattaatcggctcccagagcctttttcattttctcggactcccagagtccagctgcccagcagcacaacaatccgcttccactcgggaagcctagtctatgatgcccgcagacatcccgaatcacacagatttgtttctgaccactcaggtcgtccatctgccacataggctgattctggttacgattcccacaccacaacaacttttcacaaagcacaggcaaacaaatctacgcaacgggaaccacctcacatccgcccatgaccgtgggcacggctgttcgaacagttagttaacctctgcagaggggtacactttacccacaagatacgaacttatttcgaacacccgtcggtatcggaggttcgcaacaaagcctttcccaagccgacccagggttacctcatgccacatagaaggatcaaatcctcacataaatataggccatttcagttttcacaaatcaaactccaaccacctcgatcggtaacctggcaagcttcgcattcttgccttaccaggaacccgggttggctccaatcgaccccgccccggcgttccccaactattggcatgcgaggtttccctgaaccgactagttacttagccagggtgtcccattccaccttgtggttgcactttgattatgttcgatgagtttcccataggaatcggtccttatatgcgaatacgggacagtgccacataggcacaacctccgcatcgcgagttttcacaattcattttattttcaaacacaccgacaccacatgtcgggttttgatggcttcacaaacccatttcccaagttttcgacaaacaacggtgtatgtgggatatttggtatacgcgctcagagagcacgaataccgaggtaccacaagggtggagcgacaaggaatcagggtagtatgacctacgaaaattagtgcgactactgggtaggtccgtcgatttggcatgcaaaccgaggccaagcaagttaagtgtgtgattctaataatgcaagttgcaaacgaaataataatgacttttcaattataggagcaattgatcaaagggtgacttgccttgctcaaagtcttcacgaagcttcacgaatcttcgagaaaacccgcgatcgacgaaaatccgataaccgcaactatacgcaaacaatcgaaaacctaaacaaaagaccaaaagaaagatcctatttagactaattattagtgccattaaatagatatcaattttacggaattactggaagtggaacggagtcaatcggatgagcggttgagaagatatgaattttggaagtttaattggagtttctggaataggagaaatggtttatggaattttatagaaataatattctcaagaatattattgacagtcactgaccaaggaaaatgattcatggaattttggaataaggaattgatttatgggacaaaggaaaaaggatttattacatcccgggaaaaagaaaaggatggagggatgtatattagactttttcgggcggcaagggcgcggcccaagggttgaaggaggctcggccaagccatttgggccggcgcggtcgcgggaaaggtggcccattagggcgcgcggaagggggagggagcggtccggtggaccgagcccaccacgcggggtcccgggtggggcccatatgtcggcgagacggtgcacggtggaagcggcgcacgcggggcgggcgctagggttttgggtgcaccggatggatcgaggcgcggcgggcccacgtgcagccgcatggcacaccgtggtccgcgcgcacggagggggaaacggaagggaggggccgaccgggtctgttgactcggtcgtgccgaggtggcgccgacgtggcggcagccacgcgggtcggcggaaggacgaagacgaggccggccgggatggacggcggacggcggcggcgttcgcaggagcaaggcgcgacctcaatggaaaaaggaagcacaccgggggaaggggagagacgagacgaagcgagccgacggctcggattcgccggaggatggccggaatccggcggattgtggcggcggcaatcgccggcgagcaaagaggggaatcacgacgagacgatgagggttcgattcaaagggggtggagcatctccggggttcaaggaatccgtttccggtgtcggatggggcggagaatcactgaggagggctggcgacgagcagcggccttcgggagcggacggcaatggcggcgaggctgtgctgggcggcgacggcgctagggaatggtttggggaggtcctagggagctcaaggacggtggtggcgcgaggtattggcgagagggcccacggcggctcacaggcgggtgcggcggcggcgaagcagagcaacggcggggcggcacgtttaaggggacgagcgagcaaccgaatggctcggggcttatccaagatgatgcagatggcgagaatttgggcgaggagctcaccggcgtgcgggaacggtatcggcggcgatttggggatggaaaggggtggaaggccgatggcggcacgcgaccgagcggcggcgcacggcggatgacgccgaggcggcgcggcgtcgaggcgagtgcgccggggaagaagagagggagaggtggcgcccggagctcctcgtcacgcgttcacgctcgcaccggctcctccggtgctcggcgacggacgacgacgacgagagcgggacaagcggcaacaaggcggcgatggtggttcggtggtaatggcgctacagcggtggagactgaagcggggaaattgagaggagggactcggctttataggcgaggaggagaggttggtttggaggagggaaaccgacattggcagtcaagggatgcaagggcgacgagctggcggtcgtcgacgcgtgcagccaaggtggcggcaggtgatgacgccggcggtgtcgggcaaaaggaaaaagaagggggaaaggggcttggtcccttgccaaaacgagaaaaggaggagggagagtgaggaggaggaggagagggagagcagctgcttctcccactcttggacgggtgcggcgtggagtggcgggggccatggatgacgtcgacgatgacggcggcggtcggtttggcatggagcggggccgggtggctgcgcggcgcaggcgcggcagggctgacggcggcaacgaccggccggtcggccacgcgcgagcgcgggaaaaggcgaaggcggtggcgggttttgggcggcgacggcgggaagcggcgtcggcgcgggagagagacatcgagagagagagagagaaacagcgagagcgagagagacagagagagcgagcgacgactctctctctctcggctcgcatgcgtgcaacgcacgtgcgagggggggatgatgggctgggagggggagatgggccgggggaggagaatcggcccatccaaaatcacagggaggtaaggtagacttttgcagagaaaattgatttggatagaattggagagatttagggtttggattcgaattcaaatttgatattcgaactcgagggtttagggatgtatcaaggggaattcaaggagaagtcatgggaaagattcaaaaggaatacttgggtatttgttctcgggatcatagggtggagtcaaggaaaggattcgaggcgggatttgaataattctggattcgtagaagtatttggcgaggattcaaaggaaggatttgaatttcagaatttgatttcagagactcgaatcggaaaaggaatttggaggtagaggattttggtttcgatgagagggaacaacgggattaaattgagatcattggcacaacttagactcaacactcaaagaacgaaattttcgcaattaggatttttgccgaattagtttttaacgcctcacgaaaagcggagcgttacacacctcaggtttcacccccactcctcgcaaggcagcgggcagtcccctctcgtgcctaggtgaatccggaagccgcataggccgtcgcagggcccatccaaactccatcacgcccacccttgcctggatgcgtcagctagaggaaagctacactacaagcccagccgttgcccacgctggcttgtggtaagcacgataagttcttccagggcatcccgcgaaccggtccttaattgccatgggtgcgactagcaaaaccatgcacccacagcccaccattcagtcgcattttagttggataattacgaccatgaagcatggccagatgtctcgagcacgcagctcattctgatactaaaaaggtctaatactgtaattatcccatcaactgagctagtggtaattaagcatggctaagcatacagttctagctaggtcacataagtaacatgagctagtcgatttattacccaaggttgacaaaggacagatatcaagtaaacatggcacacgcaagcagataggtaatacccgaatcccatgtaattagcaagacatgcatgtttatttgtaaacggtaaaacatttataaattgggatcaacatgttcaaggggaatgtgtgacttgccttgcttcttcaaaaaaatcttccgaactcttttcctcgcgaccgcggacttccgaaacaacggattctacacgctggcacgcaaaacgaggaaaaactctaataaaaaccaagaaaatagtacataaaaagtaaacaaacatgtagagctcaattttagatgaattttgcaagttgaacggcacaattcagagttcgaatgaattagatatgaattttagaagttttgagccatttaaatgaatttctagaattatcatcgaattatgacgcaattattatttatttttccaaaggaaaagagacggctgacgtcatcaagagaaaggggcgcgccgacaggtgggccccgcacgtcagcggcacaggggagggcgcacggtggactcggtccaccgcggcctgggcggcaccatggacccggaccacgggagtggtccacgggcggccaaagcacgggcgcgacgaggagccggctcggccgagccttggagcgacgacgcgcgcggctaccagcgacggctaccggcgggcggcgcggggagcggcgaaggagggagagaaggagggaggagggtgctcaccgagctggcgccgacgaggggcggccgccatggggcatggcgacggccgatggccgtcggcggcgtgctccctgggatggaggcgaggcggcgctccggtgacgggaagtggtggccgaggctctccccgtccttgcgaagccgaaggaggcgacggcgtagcgcgggatggacgggagcggcaacgattggtggctggaggcggcgagtagaggtggtggctcggtttggtggtggaatgggaatttcggtggcggtttggggaggaaaagtggatgcaggggtgcagcacggcgtggtgaaactagtggcggcggcggcgcgtcgcggcagtggctagggaggcggtggtgagcggctggaggcgacggcggagagaggtggtgcacgaggcggcgatgttctggaggtagagaggggaaatggagtaggggccggggtgcagcacggcgccgcgaagccgacggtggtggcggattggtgcgacagtgggtggagcagcgggaaaaggtggccggtgaactccggcgagcggcggcggctcggcttggcgaggggagagcgggcgagagcgcggggagctcgggaaagttggggaaatgggagaggagagcacggggatcgtttttatagcctcgagagtcgacggggaggccggttggcgacggatttgaagggggaaaggggcgccggtgacgtgggtgagtggggcagtttggcgccggttttggaggggagaagtgggggaaatgggcgcggggtgaatgataccggtccacgcgcacacggggtggggtggagagcggaggaagcggcgacgtggggatggaggccggcggccatgggccatggcagttgcgggaggggaggctggaggtaggggacggcgctgacatgtggggcctcgggtcccacatgtcggctggagagagagaggggggagggaaaccggggacgcaaagcagacttttctcaaggcgtgggccggccgagagagggaggaggcgcgcggcccgcgggaggggaaggaggggttgggccgaaaatggcccaagggggatggagggagattttatttgttttctttttattttatttgattatatgaactttgtattgttatagttatttcttgagctccgaaaattcacggaaaattccggagagtacattagggcacaaagaatattacaaaatattcccggccatgatttttaaaggaaattttaaattccctcattatttcactttattaaattgctttaacttttatttaatttctagaaaatgcattattaaatgattttttaatcccgaccgaaaatcggggcgttacctccatccaatcctcttattccggcccattaagcgtgcgaccctgtagtttcatatatactcagctgtaacccgaaaactcattttcggtccacgcgtcaacagcggcccctagcagaacgtattgactcaccgggcatacataaagatcatatcggctgaacctctagtgtatacttgtatgaacccctttgcctcacgatatcgattaagttcaaggctagatatatgccatcctctaatagctcaatcattcactcgaacctgtcgatagattatataacttgtgattgactcctcaatcacctttggcatggccatgcacttccataatctacaacatcgaggggcccagagatatctcttcataggaggggcaaatcccatgttgattattcatatcccactacatgtttcatagcatacccgaaaactacttttataactacccaattacggagtagcgtttagcagtctctaagtaagctactacacatgttgggaatcatgataatctcaagtctaaggattcaacaccaacactaaatgagatcactgatgacacaacatatatggttcttacagtgtctcatgttgggtctatcgaacaatatgttcactaacatgtgcccacattattaatttggtatctctataccatgatccaacatgtgcccacattatcaattaatacatgtgctgatcatctatacatatttgttccacatatgatatttgatcagtgatcctttagaaatagcaacacataacataaagagtcttatgaaagaatcacacattcattaaccaataataagtttatctatttcaaggaacaaagtcggataaatatgtaaacatagtgtgtgatataatcatctctatgatagcctctagggcatatcactaacaagttaagataacattaattaattagttataataattaagaatctgatgcatatatatattattaataagatgagacgacgacgatggtggatgcatggatgacgatcgatcgatgatgggtgagagatggagggcagcagcaggggtggtggatcgatcgatatgatgaagaatgaattagtagggcttgacgccgacgtagttgccgggcggccagtagctgcagaccatgatggtgtcgccggaggtgcagacgacgcggccgcagccgacggcggtggtgttcttccagacgatggcggtgtagtgggtgcacatggcgccggccttgcagctgttggatttgtagtcgtagctcttcttctcgtcgctccactcgtccaccgtcttcttccacgtccactgcttccccgtcccgaacatcatgttctccccgtaggggccatgagagtgctccagctggcaatcccctctcctcaaatccgcgtactcctgcgcgtacttcgccagcgtcgcgttccacctgccattattatatatgccattgtcgatcatcgccattgccattggcattccatcgaacagcttgcgtgcgtgcatgatgcttacactatgggtggcacgtgctccctcgtgcggaacatgttgtgctccctcacgatgtcgctgatcgccttctcgttcagcccgtccttctgctcctccgccgccggagtgttgctggtcgccggggcgtacgggtcattggaaggaggctttggcaccgccgtcgccggggaagaaggctgcaccggcgccggcaccacgcctgctggcgccgccggggaagaaggctgcaccggcgccggcaccacgcctgctggcgccgccggggaagaaggctggttcaccggcaccacgcctggcgccgccggagcatactccttattcgaaggaggagacgtcgacggcgtcgccggaacagctggcttgggcgccgccggcgggacgcaattgtccttttggaccgccgcgaccgtcggcggctcctccggcttcttcggctgggtcgtcgcgtagtaatccacctgcacctccttcgacggcggcgatgatcctgccgcgccagcgccgcccttggccggcaggacctgcgccgccggcagagacttgggaggattcccctcgtcgttgggatccggaatccatggcacgtcctggtagaattgcccggcgtccgccttctccagcaccggcttcatgacggcagtcacccccggcgcggagttcgccgcgccggcggtgaagccggtgaccagagcggccgcggcgtcctcctcctcggcggcgtcctccgcctcggcagccgccgtctccgccgccaaggccttgttgacgtcttcccccgccgccggctgcttcggcgccacggtcgccgttgcgccgccgtaggattgttccggtgcggtggtggccgtgtgggccgcggcgaggaggccgaccacgacggcggcgatcaccgtgcgcatcatcttgtccatctttttttttcccttgtgtgtgtacgtagcattggacaagttttaatttgaagagaggcgacatgctaattttggcgcgaactaacgcacgcatgcatgggttggtttgtggcgccaaagctatttttgacgcgagggtgaggtccactagtaattacttgtaatttcttttttttttgtttggttattttcttactttcacatgatatgcatgaggaattccgtactattatccgtctattaaatagggagtgtgcctatatctatatctattctatacctaattaaaaaatacataaggattccggtaaatgtttggtctgtttcttttttttttatttttttccgttttattttcttttcgctgtccgttcctttttttcccgtttccgtttcctcttttttttttccgtttctcttctttttcgttttttttccgttttattttcttttcgccgtttttctttcttttgtcgtttttttgcagtttttctcgtgccgaaccctgcaccgcggtcacgttgatttgctttcccatgtgttttcttctccaattgattgcaaaaaccgattctctactactctctcatcatttttctctcaacaattttagggatttcgataaaaaaaatggaaaaaggagatcaaggggatcaaaatccctctaaattttggagatcaagaaagattcaggagaggatcggctccatcatcgtacagacactggactatgcgagctcgaccccggattaaattttgaagatcaagaagattcccgactactctctcatcattttcccttaacaattttggagattttgattaaaaaggaatagggagatcgagtggatcaaaatctctcaacaattttggagatcaagaaagattcgaccggatttgtcattttcccttaacaattttggggattttgattaaaaaggaagacggagatcgagtagatcaaaatccctcaacaattttggagattgagaaagattcgaccggatttgatggagaggatcggctccatcattgtatggacactggactatgcaagctcgaccggattaaattttggagatcgagaaagattggaccggatttaatgggaggatcggctccgttatggtacaggcacggtattgttcgagctgggcctacagtttcacttgtgggctgagccgaagagaggtaggctgagcagagggaggtagcggacatggctaggactgaagctggaaaggaaggaatgagcgttcgatccaaaaccaaggaagcattcggtccaaaaccaagggagtaaaatgtataggataaataaaacgtttttacccccgttgaaacgtacgggcattttttctagttctcttaaaaacaaactcaggtaagcttgacagtatccagcccacacagtgtccgacccaaatattctggcccagttattgttatttcggcgaaagcattatcgtcccctaagataattcttactacctcttgctagaaagtcttataacctgaaacagaggaaatatcttttagtatgcaagcatagtatttattagcacttataaaacctatgtgcaaacatgccacatcaacccattaagcacacaaaactcaacatgtaagtatatagtctacaatttattttattctaaaactaaacatacacatgctaaattatcattctcaaatcatttttataatatttcaatctaaatcatttctccaatatctaacttattatatcccgcagcaaaacgtggggcatcatctagtaatttgttatataagcatttatgtgacgcttttactgttttgtcctttcagtacccctcagtaattttttttagataatgggtacccctcagtaatagtggaccctttcttcccactgtttcactttctaaagtgcatttaattatggacattgtcgtaaaaaaaactctttcgatctttaattctttcacttaatctctgcttaaaaaagatatcaatgcttatatttgtagtgtgttgtatgacagctgccaccaatgtatattacacaataatcctagcttaaccggccggtttctgatcttgaggcagttgagtgcctgatcagtgtgtgaggctcaccgaggaaacgtgcggatgtgaaatattcatatcctgattattgaaatgtgtttgaagatcatcatccggtcactactgaagtctccatccatgtagcttccccctaattaacttcaccactactacagtactatttgtagaggatgcgcatgcaggtctattggtctaagctaaacactttgcgatgagtttgatccacataaattattcatttcttcggaaatcgttgcatgcatgcttggccatatactcccaattcgtcgctatttatggatcgatcgagtcaattagctactaggatgtacttaacaactatgatttccgactgatcatcaaacgggcgagattgagttattaccttgaaaccggccgccccattatgtttatagtgatttgattagtccaagcaatgaatcaactaaccatacagacatcctgatttaacttactccctccttattttaatgtatgacgccattaactttttgataaacgtttgaccattcatcttattcaaaaaatttattcaaaaaatttatgtaattataatttattttattgtgatttgatttatcatcaaattttctttaagcatgacataggtatttttacatttgcacaaaaattttgaataagacgagtggtcaaacgttagttaaaaagtcaacggcgtcatagattaaaatacagagggagtatacagtatacctagctattaatgccatcacctcaacaactacgtgcatccatcgagaatgaattgtagcgtccttttgttttaattcatactccctcctttcaatttgtcacgaagactaaatttgtttaactcattccacgtgtaacaaactcatcccatatgcatgcagttaaaaactgtatgcatgcatgcaacgtgtattaaagatggttactcgggttccggtaaacaattcaatcgagcaccacaaaacaaaacgacaatctctttatttaagtgttgaatgtgtgaagaatgtgttaggttcctagctatattttatcaccatttaccaataaatattatcatacttatctaagttgaggcgatgtacatcttcacaagcttaaggaaatcttgctatatatactttttgagtaattttttttttgcagggacacttttttttagtcattgacgtgtgggatctggtttattggaagaaaatcttgtcacatctatagctacaaccaaatggttgtcaaggtgatcaaacttaactaaccttagaagtggcagattgtgaatggcaaccaaacacctctataaatacgatcatctcatttggaaaaatcacaaaataaaatatattaagactttaaaatggagacagtaccgtttaagtaatttcgcagcggtatacttatagacaacacaccacctgttaaaaaaatgaattaaaagtacattttatgaacacaattttgcatcgcgtaaataatattacaacagagtaatggcggttcaaaaccttatattatcctaacagagagaaatagagatagtacataggaagatcacggataggggagaaaactagaatttttttagaaataatattattttaataaaaaaattataaaaataggagctgatcagctaaaatcgcaagtttaatatcctgtcgaacaaccgcagttcgacaggttcgatagggtagttggtccataaaaaaaaagtacatgaacagtgctacgcattgttcggcaggggcatatcgaacttacaaagttcgatatgtcccgcatgaacaatattgcacagtgcttgttctccttttttttaaaaaaatatcacctgttgaacaaccgcagtttgtttgatatgggcccccgttaaactgcggttgttcgacaggatgctaaacttgtgattttcaacttctatttttataatttttcattaaaataatattattgctaaaaaaatcagaaaactaagccacatatgttgtttatagtatataatcaattgagcaggtgggcagaacgagcgattagtcgcatgcatgaaaaccatactcatgcagtccaagcaacgacgaacacacaattaagcagacacgccatcaaattaacaacaactcgatcgatctctagctagcttatttatacctggccactctcgcatctccctttcgatcgagcgagcgagcgatggggaggtcgtcggcgtgctgcgacaaggcggcggtgaagccgaagcgcggggcatggacggcggaggacgacgagcggctgcggtcgtacatccagcagcacggcaccggcggcaactggatggcctccgccgctgcggcaagagctgccgcctccgctggctcaactacctccgccccggcatccgccacggcgccttctccgaccacgacgaccgcctcatcctcgccctccacgccgccgtcggcaccaggccggtcctcctcctcgccgcccaccagctgcacgttgctagcaccagtagcggcggcatgcacgtcggagtcggagaagaaggacgcggctacgacgacgtcttcgccgccggtcattcgttgtagtcgacggcagctacgagcggcggcgcaacggagctcgacgagatcttccgttccaccggcacgagcggcggcgattgttcatcatcagctcagaatcggagcacggacgacgcgctgatgatgatgatgaattggcacaaccaccaaaaccagctacaatatttgcaaggcaaattacaaactggtgtgcagcagcagcaacttgtatttggcatgccttactggtgataattaatgtaatcgtacattgatttacagttgagatgttttgattaagttttctcttgttaattttcttaaaccacctggcatgcatacgcattgtatgttttatgcatatgcactagttaataaactgttaattaatgtaggtgtttaatactacataatacttttatatatgtgtcctatatatagtgatgagatgaaatgaaccccctggaccatgcatgattatactctgctgttctcttttgatggttggttcatttctctgaaatttatttattgggtagttcaggataagggtaactactgaagtaaaggtcattgtcaaagtgtctcgctagctgcggtggttcacttcgttgcaacctcaagtttattcgtacgaacgtacggtatgttgagagatcaaaccatcaatagattagagacccaacagttaactgatcatttcttcgttagactctatgattattgagatcccagattagctctaagaattcatgcaggcaacaagtaaagtacctatctgtgacgaaatatgatactgaagacctggaagctagctgctctgtccagaaattctagtgtacagatcaccgctgacatcaacaagatcagtcatcctttacacttggaaagttgaagtcgatcgatcgattgaaaattggaacagattttgatgactggtcgcagcatcactaatctgctgacgtcaatgactctgcccttgtggttcaaaacttcaaactgtactacacttatgtcaaattcaaacacaaaccagttttccgcaaggttcaaataccgcgggagcagcctggtgagaaaaaccaaagctgcaggctaactgccctgacctgatcatcacaagtaatgtgtggaataatacagtgcccagaccataagttgcagcagcaaaaacaccacccaaactgtgtacaagcactctgaaaatgttctgcttatgttacagatcaactcttaaaagcatatgctttgagggaggcaacaaaaagttcttgcttaatttccctgttcaaagcactggcagcagtcaaaaatcagatttcttttaagagtaaattgcatcgtcggtacacgaacttatcaggtgggtgcaatctagtgcacaaacttgtaaaatattcattttgatgcacgaatttgtgtggtgcgtgcgggagaagtcaaaaaggacatgactaatgttattgacttagaggctgattaggatactatgttaacatatatatgaggaggatgccattagacatacacctattcaataaaatatagaataggatttagtgaatgtagaaaaagattaaaaaaatcgagcactgatataagggttagaaacatatgaaattcatcatttcaatgatgaaggataaagtagagactaaatttataaatattgcatgttttataataatcactgcacgtatgcacgtcacatcctaatcaacatcaactttataaaattaacattgccaaattattttggttctcgttcgcacgaactaggcaagttcatatactgaaacgagcattttataagtttatatactaaattgcacccacctaacaagtttgtgtaccaccaatgcaatttactcttcttttaatcttttcaagaaacagtagagcctaaagagatggagtactccatacaaagaggaaggaaacaccaccaaggacaaaagaaaatattcactgaaatcagcatgcaccagatttgtgatgcacagcacaaaggataatcccctgagctcttttgatgacaaagactgatggtggctgtaaagtttgatggggaatatgcctcccaacagctacagatatgtatagattgcagcccaacgctaaatctcaagaactgccaccaaatacaaaatgatggcacatgctttttgacaaatatggattaaattaaaaaaatgtgcagtccaggacaagctctaagctaacaggcatggaaatttcagttttacattctcagatgagttgaagttagaagaggagggtaattgagttgcagagtagctgaggttaccaaagaaacaagtttaaatttcatgtaacagaatgacctagcactacaacaatatctgcatggcaaaggcttgaatatactgattaactagcatgtcctagagtcactagcttggaaatcaaacggatcaaaacaacaaaattgcttttcaggtatcctgatgctctctcaatgtatgttgtatgatgtatgtggctgtacattttcatcgctgaacaggctgatgaaggggttagtagttagatatcctattctattctgacaaacctcttttctgcaatctgacaaggaaagtaatcgacttcacagcatgccgaagacggctaactgggagtccattcagtgttgggtgagacaactccgctctgggttcctcgaagctttcttttccattcgacttatcagagctacacccttgttcctcatcgctcccgacagtctgaattttctccaagggtatatcttcagtgtcgtggaactgacaataggcagaatgaagccggtggtgaatttcatccattcttcctgaccgttcgtcttccctgtccatgtcaattaaatcctgtacaatcaaaatgcagtagtcaatcacccacgagcaaaaatctctaccagtcaccacaatgatagaatgtggagaccatggggttattttttaatttgttgtccacttaagtccatcactatacactatgatggaactaatacgaacctgtgctggggtagttctgaataatgggagaagtcgatttctgcaatactgattgaataacagagtgaggatgataagaggtatggtgaagcctgcagctactggtgattctttcaggccaaatacaccaaggcagataatctgtgtgagcacgagagagaatatcactgcgttgtgtgcgattggccagtacaaaccccctgtgtcatatcttgtgcggtaaacattgagcaactgaaaacaccacgaatagaatatcattagcatggggaaataatagggttgaagaatgaagctaagaaataagaaatactatttcagtaaacattttttacaagaacatgcaattttctttccaaatttaattgcatgaaacagtgcgagctactcaacaaatataatggtgcagtaaggttcatgtaaaaaatgttcaccaccacggttacaatttgcaacataataaaatattcattgatgaagatattcatatttgagaataaaaatatgttatgaacatataatactccaagtagaaatgaagaggttcctcacctgattgcggtacacgatgtaaccaaggaagaagtacactaacagaaaaggtaagatcaaaggtgccagtacagagcatgtgaagcccagtagtccgaacagcaaaacttttggcacttctgtgtgatatgggaatgagggaacaaactctgtgtcttctggcatacgtagaatatatttcctcacaaagttccatattaaaccaaataattgcataagttcagatgataaactggcccatcctgatgtcagaacataggtgataaagaaggtagcctgaaaatatttacagaatagcagagagaagttaagaaaaaaactaagggacaaaaacagtatctttttggagaaacctttcatcatgtactccaaactattcatatcttctgaagcacaaagacaaaaaggtgtttggacaatatttacctggacaggtatagctctagcaagctggacagggatgtcctttgggcttgataacacattcaattggcttatgacagtaccagatagtacatttccaaagaatatgttccaaacagtgaagtacagcactttacagcaagcactcctcttcctttcactgtgagatataggcccctctaatgtagaaaataatatcattatcggtgcaacggcatataaaaatatttgcagtatgacactgggaaggtacccagttacaagctggctcatgtatttcctgcacacgaaagagtactcagtagatgctgcatagaaatgaatagaagcccgtatttctacattaaatattgcctcagcaacacaagagaaaaggaaacatcaaactgtgttcctttacacatttgaattgactaactgcagaacatgttaaattaattggtctaatcacaagaatagggcctcacttttaaaatatatatatatacatgagatacgattcgcactacaaataagaacaagctttgtaataacaagagattggttccattttaacatgtatacttacttctccagtatccccttcaggaaaggaagcctctgctgcaactgctctagctgagatagtccttgtataaatgtcactggtatcagaaagaataacataaaaacaattgaaccaaggagcgtagctattcggcgaatccaaagctgcttataaggtagccaaagatttgaccaatacacatcatctggttctggagctagatcagtaacccatttcatagggttagatgtttggagtatttctgaggcaacaagagcagcataccgagttctgaaatatacaaaagcagctgcacattcctggtacaattcaacagttaaagttactggttttatactgactaattgacgaactaccagtaaaagagctaatatttgtgagattacaagttcaacctgatcatctagtttcaagctggaatcttgaaggtcagatttcccctgattctgctcaagcccagttgccaacagctggaaagaattagatgaggctccgcacagacagcaccggtatgaaattgctcgacacctctgatcaatagtgctgtctgtaaaatgtttgaatttcctgtatgccttcttagcaccagtctgccagaatatgactagaattgttacacaataagaagaaagtgaaataaaaatatgcaaagccataaattcaattcaaggaaccggagattaatgaacactactctatataaaagcacagagctgagaatcaaattagtgggaagaatgtgataggttttgcttgtttcccccagtgattacccaactacaagatagtagacccaaaattaatatcaaatgacaacaactatcaaggccgtcttttaaaattcccaataaacaatcagcaatattctttattacaatatgttcaaatttatatgcagctcatcccttcgagtgcagattttaccattatcttctgaacttttccaactttgtaaacaacttgatggaacaggtagcttgatccatggtacttggtgaagaaatcatcaatagcattactgcatgattctttggtttcctttggtattccacgaacaaggacagtaaaatggcttggattgggcattgcacaagtaagatgacggagcctcagcctagcaatgtgcttgtactcctaaattatcagacaaataatgttatatcaaatctactcctcaatatgaggaatgagaatgtttcaattactcctaagagaaaaaggccttacaagatataggagaatgcaagctactcctgatattatgtacaaggctacacaatggacccaaagcctgcaatgcaaccggcatataaatcatatctttctcaaaaaaaaaaaaaaaaagaagaaattattgattctatgaaagtacttttgatgacaaatctattttcacatgtctttttttttttgcatttattagtgatttgattgcacacattctaaaatgtcgtctatttgagagcggagggagttctctaaatgccagcactcaagaggcgtaaatgtcatgtagaacattggttaaactaccctgtagtaaaactacaagaagtttctcatctcaccatcttgatctcactttcacattcccaattgtaaagatatccaatgattctgaaggaatccgaacatgatgtatatcttgcccaaagtagttcagtggtagaattccaaacacacacagaatggcagctagagagaagatgcgtaagctgttgaaaaacaaatgtattagcatgtaaatttggatagaggtaaaaaataaggaatataaatctttaaataaaagacaggggatgtgctactgtgcattacaacaagtcaggaacttatgctttatacagctacaaattttcttctccttctgattcatgcccatattgaagtttaaaaactcagcaatcagataccaccttctaataatatataaacaatacagggaagtaaaaatacctgaatactagaattctattgaaaacaacagcatctagcccagcagcagccaagatctcttcctcggtacactgcagggcttttactatccagccagtagatggtacaaatctctccaagataaaagcttctcggagccgattatgctcctcggcaatcctcctcccaaagtagaccctgacattggctggctgcttcctcagaacagaatagagcgatataaacagcacagaaagagcgatattgatgccagcagaggtcagaagtccgctgattttcattccttcctagcaagtgcgtggcgcgcttatgtcatccaaatacaagcacaaatttcatccttggtacccagaggctcagcacctgcaggaagagatcgctaaagcaaatcaaatcaatcctgcaagtacaaatcgctgcaaattctgtaatctccacaaagagaaagagaaaaaagaaagatagcaaaacaacagataacatcatcactgcctatttctacaccatgaataaacaaacgcacattccaaaagtggcaccaaggtaaaatcagatttgagaatgaagccaattcctcggagtgggtgtacggacagtggaaccttggagataataagtagtaattaattggctaaaacaaaaagtagtggtagcatgtagaacactccagatgcaatgtcatgtgcccaaatgacatgagggctgcttatatattattctactaccaagtggagtagttaattaaaaagaagaacacgatgcaagaggcgtcaacatcgttggctgcaaggctgcaaatagaggaatccaagctgtctgaacaggttgggtttagattcgatggttggaaccggtgtttgcgtgtgagcatccgcatcaccacaacaccacgcgacagaaagcggattgcctgcaaactgcaactctacctgaccctgcaggcttagtatagaaaccaagcagaaaattactactacatcgcattaaccgcgactcctcccccattaacagattaaccgcaaccgcagcaagagaaggaacagaatccaactccgaaatcgatggacaaagaacggggattaacaactgaaatttctgtctaaaccaacgcgtagtaaatccgacgaactaaaacgaacaagtagagaagacgaaggaggaggcgagattaacttgcctccaagtcgaccgcccgctcgccggcgcaacacagcaaccgccgccgcctcggtggagccctgcgccgccattaagtgaaaccccaatagaatgagaaggaaatcaaccaacgaagcagcacaaagcagcaaaaaaaaaaaaggcagcaggagagcagattaccacggcgacgaggagtgggagtgggttaaattaagcgcggccgcggcggcggcaatggcggggagatgcggactggattggagcagacgagacgaggcgaggcgagaggaggaagaagaagaaggggatgatgaatccaaactttttcctctctctctctctcgctttttcgatttggtttcgattttggtttggttttgatttgggtttggagagagtacgagacgagagtggaagggaagaagcccccaggagttattgcaaaatcaaatacggagtactacagtgtcctttaagttttctttttcttttttttcctccgaggaataaaggattggtgcattttactactcctatcaattttttttaaaaaaaattaaaattgagatgagaaaaaggagatgccacgtaaggtgggcagtggagaacgtggtgggggtggattggtcccaacagtggggcccacacgcacgccgtgatgacacgtggttctcaccgggccattggaatcagaggccaagcagtgtcttgtcatgcttggttaccaacaagtaaagcacacaattcatcacatcgatcgatcttgacatcaaattaatcaaagagcatgatttgattttttgtttatccagatcgtggccaaaaagtcccttgtaagttactcctatgcaattagcatctttatttgtgtttggatttgagttcggggagccttacggcatgcaccattcatccatttattcgtactaacattataagatttataaaaaaaaaagtcccttgtaagttactcctatgcaattagcatctatattcacaatgataaatactttcataatatataatccaaatattgttaacggtggggtttttttcctaattggaatgtatcatatcattttttttaaagttaccaaagatttgcttggatttattttttttcgccaaactttgataaatacaaaaaaaattctgtcataattttgataatattgtcaacttaccgaaataccaaaatttgtaaggtgtgttttagctacaatcttaacaactccctaagtgttaagttcctgtaaaaagtcaagctaacatccatatatataatatgaaagaggttaatacatagtatagtcacttatttacgtacgtggcagctgtctaaaccttaattaggcatcatcaatggaagggcacaggcaggtgagctaatccaagaccaattgatcaagccgaccaagacaaggacactttgcttttcttttccccatttttatggactttgacgtggctataagagaagaaaaatcagtgggcatgtgtgagattaccatctacgagtagtttccaccagaaattccttccatacatatatatatattatataaaatgcagatcgatcagcgtttcatccaaaaagatataatacatcggtttcttaatatttaacgccgttaacttttaacgtgatatttaactactcatgttattaaaaaaattatataaatattatttgttttattgtgacttttttcatcaaataaacttttacatatttacacaaaatatttgaataacatgaatgataaaacatcgtgcgaaaagtttacgctacgtgtagtataaaaaaaccgaggaaatatagaattgtggtacatattgagaaaattcggcagaagctgtctgtccaataataacaagacagtgatgacacacgacaaagatccaccacacatttcacatgcacgttgcgtacgtaccggccagccagcctaacatgcagcgtcatccacgagaaggagaaattctaaacaacacgtacgccagccaaatatacttgctgatgatctacaaattgcatgtcaatttctctaaaaaaaaaaagaaattgacatcatctgtcatccttccatcgatgatgctttgtgttgtctgagtggctaattgttaggatcagcctaactctttgttctcaaaatctgaatcgtaatagggtcgacgagggtcggtgttttaaactcggaataagatcactttgactccctcaactgaccaccaaatctaaatcgtatccctcaatcgcaataccagaaatcttgacccccgaacttacaaaaccagtgcaatttaactctctcggtggttttagagggtggttttgctgacgtggcgcatatgtggcagtgttgactcggtctttgtgccacgtggcattgacgtggcacttatgtggcactaaaataaaaatatatatgcggggcccatttttcattctcacaaaaaaaaaattcccgccgccaccgccgccgccggggaaggcggaaatggcgggggcggcggagggagggagagcgaaccctaccacgaggcgccaccagaggacggcgatcaacatatctcctcctccacggcatggcgtggtggcgcctcgccggagtgcgcggcggcgcgtaggcgtagcagctcagcttaggcttcgccctaactctcgatcccaatccccatgcggcgtctctacctctaccaatcaggtcaggctccgatccccattcgctcgtgctctcgtcggcgtggaacaacaggtgcaagaagctgggcaggctggccaagatgtccagcgccgacgtggaaggggccgagaaggtggaggaactccatctcgtgatggaagagtagctgcctagctagatgctgcatggctgattggtttcaagtaatttcatgggtcttttgttttttgagacagtccattttgctcagtttgatgtagtgatgttcatgcatggcgtgcaaagtctgaggacttctctcattttgctcagagagaattaatccattttgtgcagagtatgaggacttctcaagcaaatgattttaaccaaacattgcaaatgattttgtgcagagcctgccgccggctcatgtaagggcgggagagagagagaaataagggagagaggaggaagaagaagggtagtgagagagaggatgagatgtgggacctacatgttagtggatcccacaattttttttaatgacaaatgggcccacatattttttttcttttaatgtcacctaagcgccacgtcaatgtcacgtgggataaagaccaggtcaacattgccacgtgcgcggccacgtcagcgaaaccgccctccaaaaccaccaaaggagtcaaattgcaccggttttgtaagtttaggggtcaagatttctggtattgcggttgagggatacgatttagattcggtggtaaattgagggagtcaaagtgatcttattcctttaaactccgaactcctatggctatttcgtgcgctatctgtaggcttagatgggcctgagtgggaatgcgactctctcttctggttgggccagaacagtatcaatgacatacatgcggcccatatttattgggccggaacgggattgctacttcgtgcggtctgtatattatggagtcccccagtttatctcttctctacaattataaaaatcgaagatatttttgccggtactttgatacgttatttgagttggtttttaagttcgtttgcttttagaaatacagaaggagtcaaataagaaatctattttttttaaaaaaaactcgcatgttaatttgagatgaacagcctgctaactgcaacttattatgattttctaaaaatatacatatctaagcgaattcctatagtcaatttcaccttaaataaacataacaataataagattaaaatagttttcacctgttaaaacgcacggatattttttttatataagaagaagaagaattgaagaagaagaacggtgaaattttctttaccgccttcacccacgtgcaagccgaacggtgaaatttcctccgtccatatccgattccgtctccattaatccgtcctaattcatgcaatccatatcctcctcaaatagaatgcatgcagtagctagcgaatctcatattttaactcaattaaatttcccaagccagcaacgcaattaagctaagctagctacgcatggactgctgctcccagctgccgggcgaccttgtcgccgcgacatcctccgccgcctgccgctacgcagcctcgccgccgcgcgcgccgtttgccacgcctggcgtgccatcgtcgacgaacattccctcaccacgcaggcggtcgcgctcctcccaaaccatctccgcggcctcttcgtctgcctcaatgaatcgtgcctccatggcttcttcgcccgtccctcgccgccggccaccatccccggcatcgacctcgactacgacctggacgacgatgccaccatcgaagtccactgcaacggcctcctcttgctcgatcgccacatcgtcaacccggccacacgccagtggatgcgtctacctcctgtccccccgtacgcctcactgcccaacataatgtacggtgatcggggcctcgtcttcgacccagcagcgtcaccacactacgacgtcctctggatgccctacctgattcttcatcgactccctgctgcgtctctgtcggatcagtggccgccgtcgccgttcatcctgcacgtcttctcctccacgacggggcgatgggaggagaagtcgtttctccgggaaggcgacgccaccatgggcaccatggctgatgtatccttggcaagggtaccttaccactgcaagactcactccgtctacctccggggagcgctctacatgcattgccagaatgattgcgtcatcaagatcacacttaacgaccacaagtatcgggtcatcagattgcctggcgactctgcatcaaacagaaagactagggaccctttcctaggaaaatcaaaagacagagtgtgctacgtattggtcaccggtctaagtcgactccaaatttggctcctcaacgaaacttcttcttcttcttcttcttcttcttcatacgacgacaacgagtgggtgctcaagcatggtgttgacctagggccaataatacaaagctacccctgcaaccatggtcgtcagcaatggatatggcataatgctgacactaaacaagacaaaaccagggaattaccagctgtaaatgatatggaggaatttgaatgggctatcgataaggactctgatgacattattagtggtgccaatgaaagcatccaccataatggagaatacatctccgctgtactcggatttcatccttttaaagacatcgtcttcttgcacgatacaaatttaagagttgttgcatatgactacaacaaggcaaaggttcaagacttgggtatgatgttcctataccataatacagatagagtggtaagctcatttccatatacaccttgctggatacgtgatttgcctggaatgcactacggttgattttaatgtatatttatggatatatgcccacgttggacggagcggagtttgattgccctatagctttttcactcgtttatcatttgtaacaaagagtgatttatttgtttgattgtatatccggaagactggtccggtatattttgaaattgacaaagtaacccaatcccttcttcctataaagttatcccccactaagtgcaattaatctcctaaagctcaaacctcaatgttccacgtcatcattaatttacagccgttggatcggtagattacatcccattttagccgtcggatggaaaggctcagggttcacagcacgtgaggcccatgtcaccttcctcctcccatctcattctcatctcaccatcccacgcttttggactcccaaacgacgctgttgcctttcgtcaacccccacttctccttccccgccgccgccgctcgccgcccgcccgcccgcccgccatggatgaggagtacgacgtgatcgtgctggggacgggcctcatggagtgcatcctcagcggcctcctctccgtcgacggcctcaaggtacctctctcctacccaatccgattgatccgccgcctcccgtgctcggatcggtgcttgatccgtagaacggccttccgcccccttcatctcatctgggcttgacgcagccgcactcggatgagctgctgctggttgcttttttttttttacctcgccatttgatcgctgcacagagatcgaagggagggcctgccatggccgctcaacgtactcccgccccctctccgccctccactgccttctacacatcggctcctccctctccactcccccgcttttgcacccaccaccgcatcccccgcccggagaccggcaacgacggagggttagcttcgacgagcgaccgaccacgagatatgatatgagttcatctgcgccttccctcacagcgtccacctgctgatcatcctccaaaacccggcggaatggtaaagccgcctacctcttgcgtccgcctgagggatgcagtcgctgaacatgtgttgctcatgtttgatcattggcatgctttgcgtgaagcttcctgattgtagcaattcgtttaatgcggtttcaaatcgaagtgatttaatatttttttcccatgttaattcgttttagagttcaaaccgaaacatcattttagagagatttttattttgtagtttatagaggattacaatgtttctgcatatataggtaaaacatgaatgcatttaaacaccattgtaaatttcccaatgacgaatggaatcatgagaatatatccaattttttcttctattgctggggcgaaagttaatattatagtaggttctcatgtttgggctgaagaccctgaacttgcctgggtcgatggagaagttgttaagatcaaaggcgaagaggccaagatccaagcaaccaatggaaagaaggtaagctgctaattcgtttttggccttcagtttgatgtactgctacttatgtttgtgctgtcaattcttttagatcattgcagctgctggtggagttgatgatatgacaaagctatcatacctccatgaaccaggagttctgcagaatttggcaaccagatatgaacttaatgaaatatatatatgttattctgcatggccatttactgtaaatatgccattgtttcagtcgtactgtatgacctataactttaacattttgacagacatatacgggaaacattctcattgccgtcaatcctttccaaagattgccatatttgtatgatccacatatgatgcaacagtacaagggagcaccatttggagagttaagtccacatgtttcgctatggcagatgttgcatacaggtaaagtaaatatgataggtggtatttgagtcatcagtgtttctaactttctactcctataaatcgtggatcatcctgctgtctttttacatgaaacagagcaatgattcatgaagggaaaagcaactctattcttgtgagtggtgagagcggcgtgggtaaaacagaaacaacaaaatgcttatgagatatcttgcctatttgggtggccgagctgctaccgagggaagaatagtagagcaacaagttctcgaagtaatgaatcgagttcttatttttggaaggccattgtattattaaattagttatattccaattgaatttttgctacatattctttttatgtctgcagtcaaatccagtccttgaagcccgatccgtagatcggcccctgcccccttcatcttatttgggcttgacgcagccgcactcggcactcggatgagctgctgctggttgcttttttttttttatacctcgccatttgatcgctgctttacttacctattcaagcgtagcgggatggtaaattgttcatacatcgtggctgggtaggtggtgcgccatggttgtggtggttgcttgcgtttggggaggaattgtgagtgcgtgcctgagcttacgacttccctatcccacttaaaagagtagcggcatagtgattttgggggagttcagctaacagaacgatgtatttgtcatgtatttgaaggtgttgcacatggataggaatgactactatgaaagagattccacctcgctcatcgttaaccaggtaagcaattgcaataaacttaatttgagcagtagagagtctctatatctgtgtgctcatatcatgtcaaggaatgcttatgttattacagagtacattatttgctataagatagttcaaacaatcatgtatgtctcaattggcaacctttcattcaacattatattcctcctcatattaagttgcactatactataagtcattatgtgttgcaagcagtaaaacaaagctccacattgttagcttatgagcttgatatcatttcaagtatttcttacttcagtgcctattttacctatcaatttgttttcagattcaaataatacaatctaattgttcattcttacatgcatatttcatcttttctaatgtgcccgccgcaacgcgcggggtttcacctagtttaaaaagatgaggaccggggtttaatatttatgatattttgcgatttaagatataattcgaactcggtatcaagatgagtaacataacatgaacttattcctagatatgttggcataaaataaaaggcccagtgagcccagcccactacgcaagttgaatacaccagtcatgatggcttcttcttcttctctagcgcggtggtagcatcttgtcgaggccgaagcgcttggcgaagaaggcgtcgcgcgcccacagcggcgccgccgccagcgccgcgaacagcaacgtcatgttcccgtacacgatctcccgcggcggccgcgcgctcatcacccgccgagccacgtgcgccgcgaacacgccgccgtccgtcgcgccccccgcctgcgacgcccgcgccctctccgcgatcgccgccgcgaactcccggtacagccgccactccgcctgccctccggcgagctgcgccgtgttggcgtggcccagcccggacctcaccgcgccgggcaccaccttcaccacgtgcacgccgaacggccgcagctccacccgcagcgcgtccgtcgccgcgtgcaccgccgccttcgacgcgcagtaggggccggcccacggcgtcgccgccgtgcccaccacgctgcccacgttcaccacgcgcccggaacgccgcgacgccatgtgcggcgccacggcgcgcaccatccggagctggccgaggaagttgacgtccatggcgcgacgcacggcctcgccgcggagctcggcgagcgggccggtgcacccgatgccggcgttgttcaccagcacgtcgacgcgcccgtgctcggcgaggacgcgcgccacggcgccctcgacgctctcgtcggaggtgacgtcgagcgggaggtggtcggcgtcgaggccggcgaggtcgggcacgcggtcggggacgtcggtggcgacgacgcggcagccgagggaggcgaaggccttgcagtactcgtagccgatgccgccgttggcgcagccggtgatgagcaccaccggcatctcgggcttgtcgtcgtcgccatctccggcgtcattaggcggcgccatggattattagtgcggcaatgcaatgcacgtaattataattgcaacattgtgattggggtttccgtcaccaaggaatatgcaggagggatatgcggctgctcatggcgtcttccgcttggaattaatcgttttcgttgccgttcatgcatgctcgatccatttcgttgtgtgtatatgcttgtttatttaggatttcttttcaccgtctgtgtagcatgatttcgatcgccaaattaagtataaacgctctgcttctcttcactgaaaattcagtttagtctcttgttttactttaggcccattgttttggttttgggctctgctttctgaaacagtgctcttgtgtcttcaagcttcaatccagaattccagagacaaagcccagcatatgctccaagcttatataatactatcatgtagcttcagctaagttttctccattcagatgaagatttttacggtacaatctactggcagtatacaactagttttgttttctgaaggaaaaaaaaaaaacctactcctggaggctggaactatcaagattcagtctatgtctatctgcaggtagctagggttggtaatctgacttaagcgtacccaggttataacagaattcgattgctctgagaatacattagttattacttgcacaattggactgacgaatcttgcttacctgcttaatcagcatgtattaaaacgtctaaacagcggcagaatgggcaaaaaaagattcatgtgttcctttctgctgattagccatttgaaatgcttacaagccagtagcagcaactaaacaaaaagacacacgctagatgcaaccgtaactttgtaagtttctgtagaatgacatatgaatcacattactctgactaattcagagatttagaaacgtagtactaggatagggggcggctgcaaaccaaaaccatctctagaaagatttccggacatgattaactagtatagtcattttctgatggaaaatttgcccttcgatcgtcatcatcattatattatcatcatatcaccccgtttgtcactgtcacgcagtattttgaaaattgcatttgggaagatttctattttttttttggatggatctacttgtacggtattgtgcaagacaaaaatcagcaaggaagcttcattcttgattgagctgcctgttttgttgaacaagaccagtcaatattccgagcacactaaatgataatattagcagagagtgactagaatagaagtcataacaaaagatagagaataagaaaaagaattatatatgattatgcaggccaaatttatgacgatgttggaatagtcatttgcaatcagatgactgatatgcgactaacatacgtagcattaaaacacatatgtacatcatggccagataagtaagttttactagtaatttaaaattaaaaggacaaaaattctctaagatagcgttgtttttgcatgcataatattccaaagcattaaagaactgttggcgagagaactatccaatttctgattagttgctattttgtagttttcccggcaatttggtgctcctccttccgggtgtcagtagtggtcaatgttgatggtttggcatttttttgtggcctaccacggacatgagaaggattttccaactccttgatagctactgcttgcaataatcttttggaatttatcgagaaaattccttatatgatcctcatatataacacctaatcagtctataaactcaaatttggaataacaatttttcatataacacgcagatagctaaaaccatcgacggattaagcaagatgaagtcttcgattttcaaatagtttgttgcaaagttaatgcgtgattgggattcggaaacccacatgccacatgcttgactgttaagtctgtaactgacagacaggtaaacaattggcattctacagcttagatcagatgcctccttatatattttcgtaggttctgaactatgttttctttataatcacaaaattcgtaatcaaattacatgacagtactctgtcctaatatactccttttattattaattataaggtatattttgttttgttacaactaataatctctttactaatatattatttatgtaatgtaaaagtataaccataagtttttttagatgcgaatctaataacattaattttgtaaggaaaaatcctaatagaaagggagggagtagctaaaacttgtttcttcagaagagtaatttgaccctaaacttgtagtatatgggaagtcaagaacttgctttgactgttgtattgtgagctgtaagtctgtagtaactgatcggcacgaggttataggaggtttcatgtgtaaacaaaagcctctgccatttctatgaaaggtcaaatgtagtgccatcaacttggcatagttaattttggtttctactattatttcccccccccccctcaatggattcaagttttggatgtgttattcaaatcgatcacaaaccaaaccttccaaatggatatgttttgctcaaaaagaaaatccaaacaaccaccaaacacgagtatatagaacctaacccaagaatgaagccccatcttctagatgcaatataatgcatgcacgaacgaattaattcatcctgctttgatgatgttacacaatttttatagctagcagtcgtactgacgaacacattgccgccagttttgttgtactggatgacatgcgtgtgtttgtgttgaaaaacaccaaggcaaggaaagaacaaaccaatgacaaaaagaaaaatcagataaggatgcttgtgtatgtatatgatgtcaatctgtcgctgttgaacttgaagctcatctactctttaacgaattcatgctaatgtactgtacatccaccctttgcttgcaatctctgtatttctttgcttgcagcaatacatgatccattttattttatagctacgtacataggcgtatatgaatgaaattcagttagaaaaaccatgggaaattaaaataagtacatcagtgatcaatatcgtcttgcagttgggctgttggctaaaacaaatactactaacaaacaggaaagaaaagaaaaaggagaaaaggagatgaggtcacatgttccaatccgttagccttccgtgttccaagctacactaaactgtaaccgaaacaaattaaagagcataataagctccattttgaagggcacacacactacccacacgattggcatgcatccgtgcatgattcattcatgatccatctccatcaatttctccactgctaaaacccctctcatctcatctcatctcctatccttcttccaaaccaaccaactccctacttcttctactcctcgtcttcgttcgtcttcgtcttcttgtacaattaattcctcctctttctccgcccaagaaacccacaccaaaaacatcttcttcttcttctccgtgtcaaaacaaacactgtttctctctctctctctctctctctctttctctgtgttcagagccaagaagtctctgctctgcatgggtcaggaagaagcagcagccgcgccggccaccgtgatgttctcgtgggagcaggagctgggcgtgcccaagcagaagatggcttctgacgacgacatgcccgagagccccaggaaggcgccgccgccgccggcgcggcggctgtcggtgccgccgcctccggggcggatgctgatggcggggagcaagagcttctccaaggcccgggccgtccggccggaggacgacccgttcttggcggcgtacctggcctgcaccaagagcagcaacggcggcggcggtggcgttgcgcgggagagcaaggggcagaggcggtccagatgggccgggcttgggcttgggcttgggctcgggctctcttgcaagagctcaaatggagttgtggaggacagcatggtgaagatggccaaactgcctgaggttcatcctagggatgcttagtgatgatgatccagttaaatatattctcatcttctaccagtctaaaaaaatcatcttctgtctcaattctcttgtttgttttctttgatttgtttcttgatttggaatttttagtgatggtgatcaagacttgcttgcctgcttggtacttaggaattaattagaggtatagaggaaggcacatgtagatgtgtgcttgtttcatctttctttgcaaaatggagcatatcatttgtgcaggagattatcaagctcatctgtctataagttcaagattgtgtgtgacttgcatgctcttttctctctcgctctctctcttggtgaatggcgtccgtttttgtgtgaatggcaacttagcttgtcaaagacacagtttgaccaaggtttcctagaattaattccattgatgttttaatttgttcatattgaatggctgaatgtttagtgaatagagaattgctatggttgttcaacaaacgcaggttggtgtatgcatgcgccaccctaatacctgtagaaattaagataaaagattgtacttgtgttcccggaaatatatatagatgtcacccaaaagaaaaaaagaatcagatgtcgtcagatcccaagctgattatccgtgatattttgtgaaagcatccttagttcagtttttcttttcattttatttatttttttgagaaagcatcttcatcagtcaagttctctctctatagacgaaggtgccaaatcgcaatggatcgatgtttagtactcaccgagaaagagctgagctgatgaagttgaaatatatataaactcttctttttttatacgttctataattgattgatcaccgctgttaagtccagtccagatgtaaaaaggacattatttttttccaaaattttactccccagtcgctaaatatctgatgctattaactttttaaaatatgttgaccgttcgtcttatacataaacttttgtgaaaaatataaaactatacttacgtatacataaaaagtatatttaacaatgaatcaaatgatagaaaaagaattaataattacttaattttttttataagacgaacggttaaatatattttaaaaagacaaccgtgtcaaatatttaggaacggagggagtcggtactggggttcctagggggcgcgtgcgtgccggctgcttaactggcgcagccgcgcgcgtccccctgacgactagttcacgcgctgccgccggtaattatgataattagtgttaattactgtcattagcattatttttaaaatagtaacaacatacataattcataattcagttaccaatctttttagaaaagtaattgaaagttttaaatttgtagtcaaaagattttgaaatttgagttgaaagttttaaatttttatttcaaattttaaaattttgacatagaagttttcaagttgagttgaaagtttttgaaattgaagttgaaagttttcaaatttgagtcaaaagtttcaaaaattaagttgaaagtttttgaaatttgtcttgaaagtttgtaatttgatttgaaagtttcgaatttttagttgaaagtttttgaattttgagatgaaaattctaaaattgtgagttgaaaactttcaaatttgaatcgaaagttttcaaatgctgagtggaaagttttcaaattctgagttgaaaacttttaaatttgaatcaaaagttttcacatgctgagtggaaagttttcaaattctgagttgaaagttttcaaaattttcaatttaaaaattaaatcttttgttaaaaagtttagttaaatgttctaaccactgtatgcatgtatgtacgtgggttttccaattacaattagcacatactactaccaattgagtgtgttactattgaatcatcgttaatcatcgttgaaaaagtcattaggcccagcaggtgtagcgctcgttccgtcgtggcgcctagcggaaaaactatctcttaaaaaccctaattgcgaaatccgttcccttgcttgttgactagtgtccgtgccatctcagatctcaaatccccgatctgtcgccaagttcaatcccgaatccaaatccttcccaaatcaaatccctccgcaaaagtctatttgcctccctcgggttcgatgggccgaattcctctcggcccatctccccctccctccccggctctctctctctctctctcgcccgctctgccgtgagccgcgccgagccctccctcccgctcttgctgccattcccgccgatgccgccaaatcgccgcgccacccgcgcgcgcgcgccgtggtggccgaccggccagtcgccgccgctgtcagcacctgccgcgcctgccccgcgtctgccgcccgtgtcgccgctccactccaaaccagtccaccgtcatcgccgtcgtcatcgacccggccccgccaccgctaagcgctggcttccaagggacgaaggctgagccccgccccccctctgccgcatcgccccctctccctcctccttttccccgaagtggcaaggaggcaagccccctttctctccccctttttcccttttccctcccgctggcgtcatcctccccccctgtcgccgctttggccgcgaccgcggagcgctggctcgctcccttgaccgcccaaggtcggtttccaaaccaacatcgccgccctataaacccaagcgcctcccttcctctttcctctcccaatcttccccgtttctcgcccgcgccattgccgtccctctcgccaaccgttcgtcgtcgcgcgtgtcggaggagccgccacgagcgaggacgcggaaggggactccgggcgctcgtctccttcctcttccccggcccgaggctagagaaatcactcccgtgccagcggcctctcgtcactgcgccccatcacccctgcacggtagtgtctccctccgttctctctcctcgttccatcttctccccttagactcgggtagtagcacgagtagcctccccgtagctagctggcgccgccccgaccgttgccgccgcccgctgtgtgctcgccgccatcgccgcccgtgctccgtagcacccgctcgtcaccggcctcgctcgacgtagctccgcccaattcgacactagcaacggattcccgtagccgtgtagatgctctcgccgccgggaatcggcccctcatgacctcatcactgtttcccccttctcccaccgccggttgccgccgccgcaatccgccgccgtcgagcatcccccggcgaatccgagctgttggctcgtctcccctcgtcctgtgcgacatcccggtgtgctcgccttcgcctatatcgccatggttcgctccgccgctcgccgctgtcgttcgccgtctgttccggccggcgtcatcgtctacctcccgacggtccgcgtggcagccacgtaggcgccacgtcggcgccacctcggctgcgaccgggtcaagcagaccccggtccgccgcttccctccgccccctcgcgcgcgcggtccaccgcgagccgtgaggctgcgcgtgggcctgccgcaccgcgtcctccgcgaaccgcgcgcatgcgccgcatctcccttcccaaaccctagcacaccccgcgtgcacctcgctcacggtgagccgagtcaccgacaagcgggtcccacccaggaccacgcgggatggacccggcccaccggctctctctctcccctccccgcccgcgcgcgccttgggccgccttcttgggccggccggcccattaagctcggccgagccgcccctttctctcaggccgcgccctagccgcccgagtaaagtctaatttccctccctccttcttttcttttctttttcaaaaaggatttaaataaatccttttcctttagaccaaaaatccaataatcttagaaattcaatatcttcccaaccgtaagcccatttgactccgttcaacttccaaaactcctcaaatcttgagatctatctaatggcacgcctagaggtccataatagggctttattttcgccgtttgttgagttgtcccgtttcgcgtgtagtttcggagcctgaagacccgcagtgcgaggatttcgaggatcaagctcaagatctcgagtaaggcaagccacatttgaacatcttgaacctatatttgaatgtaattatgttacttgaaaaatattatgcattgataggattgcacttaatctgtttgccccgtctgcaaggcagaccggtgggcctacctaacttgttgcatctgatccttccattgttaattgttatatcatgtttccttgtaaccacctggtcacgcctcggtattcgtgcactccgtgcgagtatcgacggtcgcattcaaacttaaaatctgagaaacatcttgggtaaaacttgggttttacaaaagacttggaaaacccgacacctgggtcggtgcttgcgaactaaatgagtttccaaaatcgtggaccggggaacgtaccgggtgtacggtttcccgctcttgcacttaaggaccgtttccttggaatttcatccgaacataagacaagtgcgaccacatgggtggaatgggacacccctggctgagtaactagctaaacgggggagccatgatgccaagagacatgtggatttaacggggtggtgtcggggagaacccccgggtttcctggcacagtatggtctgggacctaatctggtgttggtctgggacccctctcgttggcatatggtgaacctgtgtcggctttcgaaatgccttgtcatgaaagccttaaggtctctagtcgtggccgttctgcacgcgctggatgatccgggttagtaatgtcgtgtgggtaaagtgtaccccctctgcagaggttattaaactgttcgaacagccgtgcccccggtcatgggcggatgtgaggtgattcctagcgtagttttgtttgactactgctttgtgaaatttgctgaggtggtttgggattgatgtttggaaaatctgcggctgatgggatcagccaggcccgggtggccgtttgaaagctgttggccgggtgccaatcttgatcaattcaaaagactgatatattgcacatactccgaccggacgagacgcactatctcatccgtgtcgtttgagaagcactcacttagttgtttcagacaagagtttaaataaaatcaattgcaaaaacaacagcctttccttgaagcctgcattaaacacttatttcccatggcttgctgagtactcctgtactcacccttgctctatataaataatccccccccagttgctgaagaagatgaagcggatcccgctgacgaggagttcttccaggagcaagtcagctacgatgagttttagggttttcggcctagttcccaagtcgcgcctgtgatgtttggtccaagtcttggtttccgcttcccttttgtaatgcagttgtaagctcgggatctgtccgcagcccaacataactatactcctactctataataaagagacctctgttgctgtgatattctgtcttcctgtgataccagcactgtttcctgggactggtatcgattaacaggttaatttggagcgtcacgggctagttccgctcgggactagttcgaggcgtgacagcaggcccatgtcagacacgaagttgaggcattgccgtcgcgaaacgctcgcgacttgctgatctcgcgcgtacgcgcgaattagcaatctcggtaggtactagtctttttttctgccataccctaattaagatggatgattatgagccgtccatcggatcaatcggattcctgtagtacgttgcaattgcaaaaggaataagttcacttcatgacccttaaaagtgatcgaaatctaaaccatgaccctaaactacaaaactggatatctcgacccccaaactcctaaaaccggtgtaatttgactccctgggcggttttgctgacgtggcgccacgtggcgcctacgtggcaatattgaccgagtcgttgttacacgtggcgttgacgtggcacctacgtggcggtagaaataaaaaatatgcgtgggacccgtttgttattcacacagataaaaaatgtggggcccactgacatgtgggccccacatgtcatcctccttccttcttcctcctccctctctcccttctctctctctcccttgttcaccctcggccggcggcggggcatgggctgcggtgtggtggcggccggtgggagctgaagcgccggcggcagcaggagatagctggaacgggttctggagcgccgccggcgtggtggacggaggtggcgcaaggagctcgtccccgggtcaacggcgatggacctcggcgcgacgaagaggcggtcacccccctccgacggtggcggcggtcccccgagtggaggagtcaacgatggcgaggctagcgcttggcgagatggggtcgtcgtcgtggaggaagtcgaccggcggtggttgcccttggcgtcgtcgatggccgaagacggaggcggaggtcgaaggcggcggtccacgcggtcgaagccggcggcgcagccgtgccggggtggaagagcgaggcggccacttggggccgctacgagacgagcaggacggcggcggtggccacaagttccggccctccgagttggagcagggccgagccacccacccgccaccgctgccgctccggccttccaccgcccgctgccgccgctccagcccaccgccgccgccactccagctagctcccgctgccgccgccggccgaagaggatgaaggggagagagagagagagagaagggaaagagggaggaggaagaaggatgacatgtggggtccacatgtcagtgggccccacaattttttttatgtgtgaatgacaaacgggtcccacgcatatttttttatttctaccgccacgtaggtgcgacgtcaacgccacgtgtaacaaagactcggtcaatattgccacgtagatgccacgtggcgccacgtcagcaaaaccgcctctcaaaaccgcccagggagtcaaattgcaccggttttaggagtttgggggtcgagatatccggttttgtagtttagggtcatggtttagatttcgatcacatttgagggtcatgaagtgaacttattccattgcaaaaggagaagggctgggccggcttgttcatgggcctagtacggctgcgaaaaatacagggcggcccagaccatatatgggccaattggaccaatgtgttagctttcctcggatcagccttggactctcgattgaatcaaataatggaagtttttgaaagaacccatcgagctggttttatattatagaagaagtgagagaaactgtacagaagagaaggcaggggaggcgttcccagagaaactcttcctgcctgcactccctaaaaaaacaaaagcctaatctcttaacatatgataatacacttcactcccttgacacctgccatttcccacaaatgaagctcatctatgatcttgctatggaacaaactgatctcaatcgaaattcgatagagctttgtaaacgcgcgtcaacctgttaacagtgaaatttggtaatcggcaaagacgtcatcagcttagaatcattatcggctgcagcatctcggaatcagccgatgggagttatcaagtcgccaatagtcggattcctgctatattcggttaaggaaatcaatctactaaaggaagcttatccctaagtgaccgagtttaaagaggatgcggcatggcagtttatctattaattaggaatagtttgttagtttccttttatctttaggaaggtgtgtttagtgtccgataaggactttatgttttccttttatctttaggttagtttctttcttgtctgacaaggacttgtatcaacccatgggtataaatatgtacacccggggtctatgtaatctatctccacgatcaatacaattcggcgcatcgccaccttttaccttttctactttattttatcgtccggtgggacttggcacttgacgcggggctgcatcggtgttcgatctccggcgaagggataagtccaatgttccgtcggtccaggcaattgtatcgtctacgtcggcgtcgttcaaggctgcatcagtacattcgacctcttggattactctggtttggataatatatttgcctagctatttatcatatgtctatgttaatctagtcctagcatctcaatttagctctatcggttgtctctcgctttagggtttccgccggtatcggctaaatcgccttgctatattagattagcctagacatctaccaccctgaaaatcagtcaacggcttgattgtctagatattgtgtttcttttcatacttagtgctgcatcagttaagtttgatctactaagtcgtgcttagaaccataatctctcgcttgctttttgactgccaataagggtttcatcggggtttcagccgatgagttatctggacgttgcatcggctcataaggattgcatatacatataagttggatttagccgatcgcaacatagatttcactgtttaatctaatcttgtagatttcatgacatcggacctctgtagcgcccgttccgtcgtggtgcctagcgggaaaattatctcttaaaaaccctagttgcgaaatttgtttctttgcttgttgtctagtgtccgtgccatctcaagatctcaatccccgatctatcgtcgagttcaattccgaatccaaatccttccaaatcaaattcctccgcaaaagtctattttgcctcccccggggtcgatgggccgaatttctctcggcccatcttcccctctcccccgacccatctcccccctctctcccgggcgctctctctctctctctctctctgtctctctccctctcaccctccgcctcgccccgcgccgcgcgcgagcgcgagagccgcgccctgcgcccctccgctctgcccgcgcgcgtgcgcgtaagccgcctgcgccgagccaagtcctccctctccgctccctcgctgccgcttcccgcgcgccgtgttcgcgtgcgcgcgcccgcgcggacgccgcccgttgcaagccgcgcgcgcgagccaagtggccgaccgcctggtcgccgccgtcgtcagcgtctgtcgcgtctgccgcccgccgtcatcgccgtcatcatcgcccggcccccgccactccgcgcgctagcctccaaggggcggaggcagcgtccctcctccctctgccgcgtcgcccccgctcccctcctccttttcccgaatcggcaaaggggcaagccccctttctccccctccttttcccctttttcctcctcgccggcgtcatcctcctgtcgccgttttggccgctagccggagcgccagctcgcgccttgaccatccaatgtcggttcccctctcccaaaccgacatttccgcccatttaaacccagcctccccccctttcccttcctctcccattcgcccccgtgccattgctgtcgcccctgttcgccgtcgccgttcgtcgtcgcgtgtgtgccggaggagccggtgcacactaggacgcggaaggggactccgagcgcgccctcttcttcctcttccccggcccgaggccggagagattactcccgcgccgtcggcctctcgtcacagcgccccgtcctgcacggtagtgcctccctccgttcttcctcctcgctccatctccccccttagatttcggtagtagctcgagtagcctccccgtagttagccggcgccgccccgagcgttgccgtcgctcgctgtgtgctcgccgccgtcgccgctcgagctccgtagcacccgcacgtcgccagcctcgctcggcgtagctccgtccaatccgacgctagcgtcgagttcccgaagccgcgtagatgctctcaccgccgggaatcgacccctcgtggcctcgtcgccatttccctcttccctccccgccggttgtcgccgccacgattcgccgccgtcaagctccctccggcgaatccgagccgttggctcgtctcccctcatcacgaacaaaagcccggtgtgctcgcttttgcccgtatcgccgtggttcgctccgtcgctcgccgccgccgcccgccgtccattcgcggccgggtcgtcgtctacctcccgccagcccacgtggcagccacgtaggcgccacgtcggcgccagctcagccgaggtcgggatgggccaaccccggtcagtccctccccgtgcgcgcgttccaccgcgagccgtgaggctgcgcgtgggcccgccgcatccgcgtccaccgcgagccgcgcgcgtgcaccgcgtccttcccccgcccgcgcgcgtgcgccgcgtgctccctccgcacggcgagccaagccactgacaagcgggtcccacccgggaccgcgcgtagtgagcccggtccaccggactctctctccttcctccgcgcgcgcgcgtcttgggccgctctgggctgccttcttgggccggccggcccgttaagatcggccggtccgctccaattcccttgggccgcgccttagccgcccgaggaaaagtctataatcccccccctcttttcttttctttttcttttccaaaaaggatttaattaaatccttttcatttagaccaaaaatccaataatcttagaaattcaatatcttcccaaccgtaaatccgtttgactccgttcaacttccaaaattcctcaaatctcgagatctatctaatggcacgcttagaggtcattaatagggctttattttcgccgtttgttgagttgtcccgtttcgcgtgtagtttcggagcccgaagacccgtagcgcgaggatttcgaggatcaagctccagatctcgagcaaggcaagccacccgaacatcttgagcctatatttgaaatttaattatattgcttgcaaaatattatgcattgataggatcgcacttaatcttttatcccgtctgcaaggcagattggcggacctacctgacttgttgcatttgatccttccattgttaattgctatactatgtccccttgtaaccacccagttgcgcctcgatattcgtgcactctgtgcgagtatcgacggtcgccttcaaacttaaaaatctgagtaacaacttgggtaaaactggagttttacaaaagacttggaaaacccgacacctgggtcggtgcttgcgaactaaatgaatttccaaaaccacggatcggggaacgtaccgggggtacggttttcccgctcttgcacttaaggaccgtttccttggaatttcatccgaacataagacaagtacgaccacatgggtggaatgggacacccctggctgagtaactagcttatcaggggagccatgatgccgagagacatgtggattcgccggggtggtgtcgaagaggaccccctgggcttcctggcacagtatggtctgggacctaacctgttgttggtctgggacccctctcgtcggcatatggtaaacctgtgtcggctttggaaatgccttgtcatgaaagcttggaggtctcccgacgtggctgatccccacgggctgggtgatccgggttagtaatgtcgtgtgggtaaagtgtaccccctctgcagaggttaacaaactgttcgaacagccgtgcccacggtcatgggcggatgtgaggtgattcctagcgtagttttgtttgactactgcttgtgaaattgctgttatgaaaaaggggttcgatgtttgaaaaatcagcagctgacgggatcagctaggcccgggtggccgtttgtaaagtcgttggcccgggtggccgtttgaaaagctgttggccgggtgccaatcttgtttcaattctaaagactaatacattgcacatactccgaccggacgagatgcactgtctcatccgtgtcgtttgagaagcactcacctagttgtttttagaaaagagttcaaataaaatcaattgcaaaaacagccgcctttccttgaagcctgcattaaacacttatttccctggcttgctgagtactcccgtactcacccttgctctatataaataatcccccccagttgctgaagaagatgaagcggatcctgctgatgaggagttcttccaggagcaagccggctacgatgagttttagggtttcggcctagttcccaagtcgcgcatgtgttgattggtccaaatcctggcttccgtttcccttttgtaatgcagttgtgagctcgggatctgtccgcagcccaacatgactgtacctctactctataataaagagacccctgttgatgtgatattctgtctccctgtgataccagcactgtttcctttgactggtatcgattaacaggttaaattggagcgtcacgggctagttccggtcggtactagttcggggcgtgacaacctccagccgatgtatgctttaaccttcagatcagtgcttattatatattgtttctagccgattggtttctatcggattatattattgttattttattacatcttcatcagccgattgccttcatatcattatctacgttggacatatagccgattgcttaaatcctatcgctatcggctggtattagcatcggctattatcggctatcggctggaactactccatcggcttgtcagccgatcggctgtttggatctactatttgcatatcttgtcagttgcaggatcaaactgtctggcacgctcgcatctaatcaagatttggacctgcacaggagctaaacagatctcccaggccggtgtgttctattttctcgtcaacacagattcttggtcccaccgcggctgcgctcctcccctgcacgctccgcggcatctttgtccagatcggcgtgccaactctcagcggcttcttcgcccgcccctcgccgtcggcagggacgaagacgacgaggccacccatccccggcgccctccacctggactacctcgacaccgacgaaatcgaaaaatcccttctcaccataatcgaccactgcaacggcctcatcctgctcgaccaccacgtcgtcaacccagccacccgccaatggacgcgccttctcccttactcgccgccggagtcgtcgccgccgggcagcgaaatcatcctcgacggctatcacgccctcgtctttgaccctcatcgtgtcgccgccgcactaccagttgttcttgatgccctacgtcctcggacgacgagccacggtgttttctccatgtcttcgccaatttgaaagttttcaaatcttgaattgaaagttttaaaattttgtgttgaaagttttcaaatttaagttgaaagtttttaaattttgagttgaaagttttaaattttgacttgaaagttttcaaatttgagttgaaagctttcaaatctggattgaaaattttaaatttgagttgaaagtttttcaaatttgagatgaaatattgaaagttttcaaattttaacttcaaaaattcaaatttcgagttgaaagttttccattttgtgttaaaagttttcaaatttgagttgaaagttttcaaatctgcgttgaaagttttcaaatatagggtgaaagttaattttcaaaatttgacttgacgtatatatattttttaacctgttacttaaaaagatcgtgaaaaaattcatccgtgcttgattaagagaaaacacgaaaaaactaactcatgcgagtagaaatatactccaatccattcacacggtagcacacatgccggataatcgttggacacaggcctgggcctcacgtgggacgtggcttgccagaaagtgcgcgccgccagcgcgtatgcgcttagttttctcggaattataatggtatattttaaaacatgaaaatttataatggcatggatcaaattaaccccatctttaaacacagagcagagttagttatgtttgccagctctaacattgatttgcatacatttaggttcttcattgatgtttgtctgtctttcagatcaatgattttttttctttttggaagtggaagcttgttttcagatcaatgaattccaggttacttaattttccttccaattaaccaatggagtacttgactaaccaatggagtacttgaacaatattttaatactttttcccaattaactctgtaaccttgctgaatgatgcaactgccagagtcttcggtttcattttgacatggtctcctgctttgcctctaatattgttcatatcatagcacagtccataattaatgccatagtgaagggactttttaatcctggtatttttaatcgacgtagattagcattaataaaattaaaatatattaaaaatcggtccaggagagcaacgagagacggatcggccttagactcgctggctctgcctccctcgtccgacgacatacgtccacgtatgtatatactactcgtactcgtactagtatagcatatatctatgatctctcttattaaatcaatcaatcaagactaacgcgcgtcaaccgtagcggccatgcacctcttacccgacgacgtcctccgccacctgccgcgacgcagcctcgctgcctcacgctgcgtctgtcagtcctggcgcgtcatcatagacgaccgctccctgctcgccacggccgcgctcctcccctgcacgctccgcggcatcttcgtccagatcggcgtgccaactctgagcggcttcttcgcccgcccctcgccggcggggacgaggaggccacccatccccggcgtccttgacctagactacctcgacaccaatcaaatcgaaaaatcccttctcaccatagtcgaccactgcaacggcctcatcctgctcgaccaccatgtcgtcaacccagccacgcgccaatggacgcgccttcccccttacccgccagagtcgccgggcagcgacatcatcctcgacggctaccacgccctcgtctttgaccccgccatgtcgccgcactaccaggtgttcttgatgccctacgtcctccgacgagccacggtttcaggccagtggccgccttcgccattgctcctccatgtcttctcctcgaggacagagccagaggggagtacatggcggtgggaggagagatcattcgtccgggaagggaacgccaccatgggcaccattgatgaggtgtgctcaagctcggggtgggaaccctttgacacctactccgtctacttccggggatcgctctacgtgcattgccaaaacaattgcgtcatcagaatcacaattgcaaatcacaggtataggattatcaaattgcctggcgattttgtgggaaatcaaaatattactgtcgatccttacttaggaaaatcccaagagggagtgtactatgcattggttattggtttatgtcgactccaaatttggttcctcaaggaatatcaatcatcatattcttcttattcgaattcatactgtggtggcatcaatggcgacggcggtggcatggagacgacgacgatggatcatgagcacgagtgggtgctcaagcatgacgcagacctagggccagtgctagcagcaggctacactctcaacgacggtggccagcaatggatatggcataacattgacaccaaaaagaaaaacaaggaatcactagtaaaggaagaggaattcgaatggaacgactctgatgatgaaaatggtagcgccggtgaagataggcagtacaaaggatacatctctcaagtatttggatttcatcctttcaaagagatcgttttcttgtacgacacagacactagagtggtagcctaccattataatagatcaaaggttcaagacttgggcgtactacaagtacgtgaacgagtgtcaaggtcattttcatacactccttgttggatgccggatttacctggaatgcacaattaacattttgatttgaaatacatcgacgctggagattaaacaccagctcgatcgtcggcttatcatttttgtaaacaaaacaacgtgttaacatacgagtggaatcatgctagctttgcagagtttgcaggtgtatggtacaggacgagatcaatcaatcgagcgtccaaggtggcatggggatatttgattacaaagaaaagtgttgctacatggtttgctaactgcatccaaaaactgcagctgattatggtagctgatacttgtagataagttagttaattgcatagcaagtagttctgctctatgtgcacgtgtggtcctatataagtacaatagtaatcgactagttagtcatctattactgcatgtcccactgttaattaccatatctctgattagattgtaaggtcgatactaacaacctgcaaattaaatgactgagcatgcaaagttagatgggtgtagggccatcagcaaatgaagctgcagtaattggtgttaacaaatacagtgactgtcctcatggcaaacatgtcataccagcaatttttttctgagcactattgacaaattgcatttggagtttatgcatgcatgggaaaaaaacagtgtttttcaatgtggcagttcatatacagaccagtgcaaattcagttcaccagcttgctagccacacatgtcaaaggatttcagacttgtagattttgaatatatttcagactcttgtgaaatgtcaatggtaaacagatttatctgatcccaactgcagctgcagatttctgcctgtaatgtagtatacacctcagtacctgcctgatattgtccagctgctccaaatctatactctgatgagatgaatcatgaatcccagttaagtggaccactcctcctccatttccataagaaaaacaggaaatttcagagcaccaatcagatgattcaggcaggaaaagttccagattcagatagagaaagttgcagatggggtcaggttaagtctagagtgttaattaagattgtatgatgttgtcactagctctgagatttcatgatcagatctaatcagagctcaagtattcctcgagcatctgaagaagtgtagctgtcataagaaaggaaacatgcaggagagtggagtatatactatatatgcacatgatacccaacatccaattggttactccagacctcaaatccaattgccatttgtttaacatgccagtatccacatgaaagagattaactactagtagcagcagcagagaccaaacacacaagtgcacatattaataagtaccctgaattaataatgctctatgaatcttgagaggattccatattagtgcacgtattgtacatttgatttgtcatttagcttcttcactttatcagaggcaaacaacataggtctacaacctgatacaataacacttttacacacaaaggagacctgtaattcctaccactgaaaaaaattgcactagaaaaaaaaagaaactacttttgtctgaagaacagaaaagaaaaactcatttgtgttacacatcaaagaaccctatccagttgttttttttcttttcgttttacagttggaatcatcaacaagatgttgtgcccaattggaatttatttacattcaggaggtgtcaaagattcaggcaacaagcatcatgtcacgcacagcctccactctcatctcctcgaagatcatggcctctatgcttgcccctacctgcgatgcttcctcctccctgagccgcctccattgctgcagtgagccggtgaggtcgagctccaccagcgcggggatcctcgagatgtcgccggagatcctctcccaggaggagatgatcatctgctcctccagcttggacctcgtcgtctcgtactcttcttcgtctcctgtctccgctttgcaattcttgccggcctcgtagaaggtgaagcatggagcggcggcggcgtcgagcggattctgctccggtggcggcggcggcgagctcttccctgaagtcgacggcgactcgtcgtccttctcacctgtatggagaaaacagagtcagaattgaattcttgaaatggcgaagcagcagagatcagggcttacggtggccgacgccgagcatggaggacgattcgtcgtcggagttaatatcgaggtcgagtacggacatcgggctgagctgcctcgcacattcctcctcctcgtcgtcgtcgacgtcgcagccagcagcaatgtcgccggcgccggcgtggcgcagccggcggaagctctggcgggcgccgcaggagaagcagccggcgaggagagccctcctgacggcggcgccacagaagacggcggcgcccaagccccccaatgcgcggctcttgttgctgacggcggcgcggcggtggcagaaggcgagcaggcggcgcctgcatgcgtcggcgagggaagctccgccggcgaggaggaagggctcctgctgctcctggagcaggtccgagagcctcctgacgtagcagctctcgcccatgaattctctctctctcactctctcaatctgaagaagaagcagaattatatattctgtgtgaagaagaatcaggaatcaggatgaaaatggtggggtgtggatggcgacgggtgcgtatataaagctaagctcgacatggagacctctcttcgtcttcttgactgtctcgttggaaagcaaaaggaggcagcagcagctacaaacaactgcattaggctgggcctcacaagtgttatgtactcttcactcttcactgtataagtagaagtgttgtttgggcttttggatgaccaggatattaattaaactgttgtagtaggaaattaattagagcaagtttaatagtatagtccactgctaacttcaattcatctatagtcaatctaatagccaattcatataatagttgcttactatatatactatcaatatccggtcccacatgccatacacatattacgtcttagagttcgtgctacagctggctacaaatctgtagcccgctgctcttctctctctttcttttatctctttataatatgtttacagctggcttatagcctgctattgtacctgctcttagggaagcaagaaacacaaagtagatgctgtgtaattaattaagaaggtcccctccccagtaaggtaaggtaaggtagttgctgaatactgtagtgtggaagaagagaaaggtgtgtgtgagtcatgtggtgcttgctactctgcaaatctgcagtgcaatttgccggtgggaaatagatgaagaaaacaacactgctactactgctctactactagtactaaacagcaattaattaattaaaaagatttgattttgattcgtttgtggaggagtatatgaaagtgctagacgccaatggattgtggattcaggcgtggttgagctatcatcaggtggagtacaagaagacatgggaagagacaagcagaaagctccatagttgtagtactcctaaatgaaatgaaaacacatgttgagccgaagtgaggagaagatgtgagagagtgagctgattcactgaaaaaccaaagccagcgtatcatatttgccgtagtggcacgcagaatttgcagatgcagcagagcctgccgaattgtttgttaggccacgcccacgcagctccccttgttgcatccagacataagtatatggatgcatccagcagttctgtactcgtagttaattataattgtaccaccatgcttagcactagcagtgcaggtttgtgtcttgtttcatttgttcgtgtcccatgatattcaaaaccatgtcaaatcaaaattcagagctagtaatactccagtcaatattcagtcactttggtaagatattcattactagccttacaaccaacatcagcagcagctgtagtagttgtagtcgtagtactcgtcatcttttggctgtagggctgagctgagagggggcagcttagcaaaaaggcctgcaagagatgggctccatggcagcttgcatcttgcactgcagcgccaaccttttcccctccctctctctctcccactgatcactcagcaggaccatgcatgcatgatcagcgtcagttcatcgtcaggccattcatgcataattcattgatgcaatgaaaatcatgcaagcaaatgcatcaagaagagcagtggagtgtagtaccagtgcaaatgagtccttgcatgtccttccattgggtacctttctgctgtgcagcacagagttgttcattagctcaagaaaatggccacagcaacaccggttcagttgccaacgagtgtaaaagtggagacgaagttaggtgcatggttaatttacaacagtgtcaatacgcgtttttgataaatgttggcgtttgcagattcaaaatatttgaatttctctggcctgacattccaatcctgtgcaacaactgtatatattgctgttgtatatttcacccaaacaatgaatggatgaaacaaatgcatttgctgctacatcttgctctctattagccgatgacgagatggttcaatgcaaaaaaacgaccaggagtatcttttttatctcttcgatcactagcctcctcgccatcacttcacttctttctttctcgtcactgaatgaaagaaaagagtgttcaagaaagaaaaagaagcgacgaaaggaaggtgagaaagaaaccaaacagacagctttgcttgcttgcctgcacaaaccaaccaaccaaccagccaacaaaaagtctcatcaaaaaaatgaaaacaagcagaaacactgtagacagtaagcttgtgattgtaaccacagctgctgcttttctttcctgccactgccagattgtcaccctgccttgggactgatgccatcttgcctcccttgtccttgttctctttcaacgcacatttcacctgcattttgttttttgttttgtttttctgaaacccagcaaacctgaactttcaaattcagtaattctagtagtatttgcacataaaaacatcatgcggcgtgcacgagatcttctgtcagtcatcaggctcagtaattcagtatgcaagtgtaatcttacaatactgagtagaagtaacattttcactacttcaagtctccaactatagtactgtagtatggcaaccaactagtcatcagcctctctgtaccaacatctttctttttccttttccttttatttgtttctaaaaaaacagagaacttttgagaaagctgctgggcctctcttgtgttggtatagagaggctgatcaaattggcctttatcgaacgggttaatggaccaaaatgcaaagcctctgctactgtaaaatctgcagcccatagctcacaggctaatgggccctgtataaattgtactccctctgagcgaactttctttttttgagaaaccctctgtaactaactgacactgttaacgatggccgcctatcactaattactttcagatggttatattaccataaatgaaagttgtattattatatatttataatgcaacacattacacacgtctttttttaagataatggaatatagcattttggtcttttttttaagataatggaatatagcattttggtcttagtacacacttctataatataagaagaagagaaaaaattatacatgcctacgtacaaaacaaccttgctcgtagctctcctagctcctcatgacaacattctcccaatgtgtttagcgccggccataccacaccaacctaactccttttagatacgattgagcatctggtgctgtcgtctccttttatctaaagattcttccattccttctagattttccaagcgatgagcaataagagagatctaagtcttttttttttgttttattacttctgggtcacttgtttcttatgtccaccaattcaagaggtttctactcttattctatttcaggatgaagtgtccttggcacaaccatgtgagaactccaaaccaaatttgcttcgagcaggcatttgaacgataggttttaagattccggaaacataactataagaaataattatttggccatcccttgatctgtaaccggtcagttgtccacaggtagtcaaagttttaacttaaataataccggtgtcgattattcgagaagcgaaggaataccagttggatatagttcagcggggtaacttagtccattcagtcatacaagttgaagaggacaatgatgcctcctgcaaattttgccaagttatttaagataaatttgtccacttcaggtgtatccatcacaaaaggcagcacagtaggacactgaaagaggatcaacaacgaatcgccatggtgtgatcctctctttttcctgaaggctccatccaaagctgtccaaacatctgttggatgcaaacacatccagctacagcaaagcacagtgattgtttcagattaatgtatctaccagcttgcatctgtagacacatactaccagaatccagaagtaacaactcaacgaacaaacgaaaagaagagaaagcaattagacatgttaattagctagtaggcttaggctcccaggatttctccatggaatcaaataaacaaattaaagtcagggcacgaagtaattaaaagtggcgagagcaacacaagcgccattagcaaacgagacgtaaaacacattgctagctcgaatcgatcgatcgatcgcgtttgtgctttcgacgtggcgatggtgactcgccaccagctcgatcaaattactgaaaaaaaaaatcttgttctaatacttccctctgttttaaaatgtttgacaccgttgactttttagcacatatttgatcgttcgtcttattaaaaattttttaaaatatgtaaaactatatgtgtacatgaaatatatgtgtacataaaagtatatttaacaatgaatcaaatgatatgaaaagaataaataattacttaaattttttaaataatacgaatggtcaaacacgtactaaaaaagtcaacggtgtcaaatattttgaaatggagggagtacatgtataaaagccagccgccattggctcactgtaactaatgttctgttcagcaatgaaaacgacattaattgtatagcatctgaccagctaattaagctttgatcaaccacgggtgattagctcagctcaactgaccgctagcttatgatcttctgctatcgattatactgtaaactctatgattgtgagtgagaagtccgtttctgatggatgcagagaatccgatggatctttgatcaaatggttcatttgtgtatatgcatctcatatatcactttcgcccatgcgatatgaaggaaaaaataatattaattaaccgacaagaatatgtgcaattcaaacatcaactttagtgatcaccaaactcaattccatctctgcttgctcgagagtgacaagtaccaaatacccccacaggatttgacagcacggaacgaaaagtaaaatggctgatttgattgatctcggagaaatttagcccggatagatcgatcaattggtgcactcaagttcatgtcatgacatatcaaatttcatcggcatgatatattgaattcgggacaattcgtcctccaagatcgagaaaaatgagcaactgatggtcgagcgatagtaatagagcgttcgttcatcgttagctttgctcgtccttgccaatttcatctcactgtgattattttttatctcagcaaaatgattgctacttttatctacagccattcgagttcatcagttcatccattcattcgagttggagaattcgtttaaccggcccaggtttgaccaagtcaaaaaagtcggcacgtgcatgcatgcgtccacgtgggatcgatcgcctacgcgatcaacgaggcgagcgcctgcatctcgaagccaccgccggcggcggcggcggagtagagctgccggagagctatgacgcggcgggcggcggcgaggcgaagcgcgagcttgccggcctcgtcgcggagttgcgcgttggtgagcgccacgagcgcggcgcgcgccctggcgccgcggaggcgcgcgacgaggtcgcggctggtggcgcggagcgcggaggccttggcccggagctcgtcgaggtgccgctgcttccgcgcgcgcgaccggcgcgccgactcgcggttcgagatcctccgccggagccgccgccgccgctcctcgtcggcctggtcgtcaccggccatcaccggctcatcagtagccgccgccgccgtcgtgtccggatgcgacggagacggcgccggagcagcttccggacatggtgcgccgaagccaatgtcggcgaggaaggcctcgagggcggtgtcggagtcggaggggaaggggaggccggccatggcagtggaggtgagaggggcagaatggtaattagcaaccaaagagagggggtcgagtggaaggagagggaaaagggagggaacaagtgaaggaagggcccattttatagccgtcgattcgattcaacccagtgggtttgtggggcccactagtggttttctgacgtggcagccaactttgtttgctcttccttccagtcccctctgttgaagctttggaaaaagcttcatttcatatcatagacagacaggtggattgtcgtcgcatataactttgcaagtatactatgtccactcgcattgacgatttgccaaattttgtagaaagtggtaataatcagcgaatatatatatattctgttttccttttcattgccgtggtttttgatccattgcaaagttacaagttactgcttttaattaatccaactaggaaggtagcccgcgcaatacgcgggcatatgtattggcttgttaaaaacaggtatggcaaattaattttaaattagaagtaagatgttttttccatttgcttttttctttcagtgagctgagtcgaatgatttggttcttttttttttcaatttgagtcaaaatcacgcgctctctccctcgtgaacgaaacatatatgcggagtacatgcggctgactcatggatggcatcatcaagcaatggaggatagaatcatcttgaagtttttaagtaggttaagattaatattagatctaatgattgtaaatattaaaaaaaatcaatggttagattattttaaatataattcctgtgattttttataatttattagagggtcgcatgtcatttaggagcagtcacatgtcatttaggagcattggtatgattgccgcgtggcgatttaggagcgtttataggatctaaatttaatatttgtttaatatgttgtttaaaaatttgctcttaaacatttatattagaagtttgagctatgtatatggatctcgaattatgtatttaattatatatagcacaataattcaaaaaatgagaaaaaaattaacttgagatttacgatcatttagaaatccaattattaatttttgatagattgagtcttagctaaaaaatagaagttagcttaagaaatagaaaaggaggggagagttaggagggttatgtgcgcacgcacgtatggatgtggcggtgagggtgcaggtaccagattttcttttcaaatgaagatcgtatggttaaaattaatgggttcatcaacttttataaaattagaatttttatgatttttattaatttgttagctagaagattaaaaaaaggaaggaaggaaagagggagggagggatgtacgtaccgcgagaagaggtggcccaagaggagggggcggtggagatgggttttgggatttttctaataatgtagaatattgggtccaccgtattaagtgaaaatcgagggttagatgttttgcttttttcttgtaatttcttcgatttctctaatttgttagagtgtcatgtggcaacttagaagcgtttgtaggaagtttaatagactttagctagataataggaaggggaagaggagaggagagcactgagcttttcggagagggaagggtccatcgatttaaataaaactcatggtcatatgcttttttttttctcaaaatttttatgttttttttaatttattatatgtgaaatgtgtagacatagagatgttgtaatggacatctaacagatgatgatatgatataggttgtcaatttttatacaacgtttcgttgctgtttagttgtcacggaaaggatataggtttatgcctaacaatatatttatcagatatcaagaaaggcctaaatggatcaaactaaaaatgaatatattaaaaaaatataatcatttagctatctattgtttatatacaatcatttatactatgtaacgatccgccaccaaccatgcatgtaacagaggaactcatatcccatacttatatctcaaacggctaaattttttttacccattagatacccatcacatgtctatttctatataaaaacatagtaaatatagtgaatataggacttagcttgttgattaatttaaataaaaaatacaaccattcaagcgtatatcataaaagtatatatcgtccataaaaaaaattactgcttgcaggttgcacagccagcttgttgctccatgcaagaagggatataaccatttacaataatacgttatggtgtgtatctcgtaataactaccttaattagaaaaaagaaaaaaacgagaaaatgaggggaggatgcgtacgtacagaagtcgggaaagtgcacgtgtgggcccaggagagaagggtgaggagagattttattttgatctgatggttaaaatcactgggtccactgttttaaatgaaaatcgacggtcagatatttttgtttttttcttatagtttccataatttattagagcgccacatggtggcttatgagcgtttgtaggatgccacatggcggcttgagagcgtttgtaggaagtttaatggatttttagtatataatagaagattgcgcatgtcaaaaccatatattctttctagtttctaccctggttttacccttacctgcagtatttggtacaatttgcagatgaaagctacaccagttcagagttgtttcacctttcaccctatgaaagtgcaaaactttaactgcaaagtaaaaaggttgcatgactagctagttcaattgtctacaaattaaattacagatactgcgatgtttaccaactttaacctgacggccgtgtaaccgcacatagatagtacacatccgtgtagcatcatacttagcaatagaatcttgtgaactacaaaagctcaagaactattcacatgtatctagggtggctgtgttctgtgtacaccttatgatgctttgggcatattcttacatggacaagggagaatcctagattatcatctgtgaaaatgaaaggtaggtagcttagctaggttggtagtcttcactctccagagaagaagatataggatcgaatcacaagaactaagccaaccagaggggggtgaatggttggtatacccaaaaaccgaaaacttttagtggaaataaaagttaccctcgaaatcgacgaaagtcggtctgactgaaattgatctgccggtctgaccgagtggatgccgccggtctgaccggtgtagaatctccggtctgaccgccgaagtcgcctgctacgcctgtcgccgctgccggtccgactgccgtgctcccgccggtctgaccgccgcttgccgccggtctgacagccggtagatcgccggttagatcgccgaaacccggtaaacacaaatcaaagaactcttaaagtggataacgactttattgattctctctgtctttacaaagtgtatcaacatcactccttacaaaaatttcgactaaactcgaaaccctaactcaaaactcaattctattgctctctaaagcgataccgggaagcctcacgctccccctctatttatacatgaggtaggcagcctaaagccacgaaccaaactcatactaggagtcctaaacaccttaggaaaccctttagtacaagaaagaaactttacataaccaatcgtatcaaatttggactccttccaaattcgactccgcatcccatacgcacacaataactccatcgtataccatatggaatctccatcaaccacgtgcatcaactctagcctaagtatcccgcatgatctctgaccaccacggacgtcgtcttatccccaagccgactccccgtccatcactgcaaatactctcctgagacatcgagtcacctacacatggaacaaacaaagaaaccatattctgagaccaagctatctctaacttgactcattagcagcaaacaatagtattacatacgtatagtatccatctagaagtcataatcatgaaataaactcggatatccaaataaacaatccgaaaccgaaaccgatacagtgtcggccggtcagaccgcgggttgcgcctgtctgaccgcgcaatacacaccggtctgacggtctgactagtccacataaaatgatagatcctgcgatcacctgtaaatccgatcatctccaaaaccacttcgtgaataaattccaaataacaaaaccaataatctccaatgcccaattgtttatcacagaataataataaaaacacctttaattttacagaggatcgagaagggaagaaaaactagttaaagcccgacctagttactctcattgagaagctctaaaaccttaatcactaaggaaagggagaggtatatagctagctagcaggttcttctaattgttttttgcacgcccacaagatattggatagcaaatcttatattcgatttttttttgctgcctagggccagcaagatctattgatttgcatgctcagctgtcttatatactgataaatgattattctatgactagcaatcgaaaagtttgtttaaacccatccttagtcagtctgacctgaattatttgataagatgttgttgaatttcttgctggattgcaccatcgatctatatatctgaaagcaagcgacagttaaacagtactagtataactaacagaattctatattatattattacatggacacaatgtaatcgtgaaattaaattaatatatgtagcctgatagtagaaattaaaagccattacattatgacattgaaaccatggagcgcacccacaccactacttttgggacaccagcaaacctgcccttgatttttatgcagcaaagctagtgcattcttactgatcatgactgttcgatgataggtcatcgaaagctacatgtaattaactcaaaaggggggcatatatataaacattctggttggccatgctaccttagctctttcatgaaggaatacagatatctggtcgatggagtatatgctcagccactggaatatatagcatcaaagctaatgttacactagtcacccatcatcatctcaaagaataaaacttgtagacaacatatatctatatatgcttccatctatgtggaatattctagtagtattgcatatcatagcaagtaagtaatcttccactgttcctctaaaaaaggtaattgcatctttcctttaatgatcagcacagtgtccacccatgcatcaatatttagtgactgtcagtgctatgtgcaagtaatttgattaggtagagatcatgcatgcaagctgcatggtcgcatgatgcatagcaaagctttcagaaagatgggattaactccaatttgtaagtcatactctagtgcaaatctcaaaggcaacattcacaagttcaaaaaaaaaaacaatgatgcatcattaattatgtttaaatgtatatgcattattatgcataagatctaataagtactaaagctgcctcctttagctagactaataaagcaggcgatgttgaggcacgacctttctgttacagcaagtgggtagcacgagacaacacagagaaggtatggaagatcaaccagacaatggtaagctctagctagctagctcgacagaaagatcaacatacctattgcttagtgaaagggaaaaggagacagtctgagaagagtactgtgagctagggtactaatcaagaagagtcattggagataaaagtatagtttagttagctaacagtacgagtataatcacataatatagtgaaataaaagcagggagttatgttagttaagtgccatggatggacagatggcctccatgcatgtgtagttcctatccatcaaagcctgaattttggtgtctgtacctgaagtctctgaagatgcatgcacgcacgatgagatctagcgactactgcatatatttgcaagtgcaggcacatggtttgcctccaggtttggagaaaagaccgcatctagggaggcttttggaaattcagaaattggaatcttagtttcttgtttggtttgacagggaggatgcactgaggagattgggccaggtgtccggctatatgctagcaacagttctctgcatacacctttatcttatataattagtttttagtagtaattattgtggcttgtcaactttattcagtgtcacttgaaatatgttacttttcgattaaatgactaaatctagtagtaaaagagtaggcaggcatgcatcttttgtagtaaatgtataaatatggtgtatatagttaatttcctactgcctttggattaggaactagaattaagagtcacatattgcacaacatgtgacaggtaggcatagactctcactacaaaaggtctcacaataatgttcttttttcttgttgaagtaaacactcctatgtgagtctgagatcaggagatgatgcatgtagacagtataccattggttgttttcaaagctaaaccaagcagttaaaacagaaaaggcagggcacatgcagttgtcatgctgcctggggccattaggaaatgggcaagtgatgggttaaaggtgttaatcagagttgagagtacacccccgcaggttcagataatcagtggatctccctaataggtaagcaggatcttgagaaaaagaaagcttagttaatgagatgttgatggagaggcactggaaatgtgaattgtgatggacatttgggcatgtgggcttgggccatccagctgctgggctgctgtaaactaggcctactctgtagaagcaacggcttctaatcctagctagctttatgctgatggatggtgcgaatcaggccgtgcagaaaaagagagaaaagaaaaccagtctaaaaagaaagagagaagaaagaacaaacacaaggaacagattcatcatcatttagttaggattaagtgatatgtatgaaaaccgaggtcttttacggtgcttgaaaggtacctcaggtaccttctatcaacagtccagataaagagttttttttaccgtccaacggccggtactgaattcctagacccgatccaacagctggtagagtttggtaccgtgagataccaattctgtccttggtacagtaccgacctaagaactaaggtggaaaggcaaaaatataatttcacgtgcaatagatggatgggagtcaagcggatagtgtgatagggttcccaccaatgccaccgccgctgcctggagtgcgtcgacctcgtccgtgcggcgccgcgaagaactccgcctcgtccgcccctcgccgctaggaagtacgtactcatcctctcggcaccgagaaagaatcctccttctccatccgtcgccgccaggaaggactactcctcctcgggccctcagcgcagggaaagtatcctcaactccgccgcccctgctcacacgccgtcggtgctgaaattgagcgcaccactgctaattttctctcccaatcctatccatcccgaattgaacggtcggatgagttttggcaccgaccggtaccagtaccaggcggtacaacttgctggacagtaaacatgctcccagataaatcccaagcaccgtagaaaatctcatgaaaaccacgtaagttcatccgtgcaatcaagaattgaagatgggggatcagtacgtaactgcacgctaaatattcctacatttcaaccagattaaattaagctggagagcaattgaaccgaagaccattggagtgtgatacacatataggagtatatatgtaggatgattcatccaaaatgaacttatgacatagtacaattcatcagcgagaaactaactaacaattggtttattcatttgcaacatgcatactgcaagaagaagaattgaagactattgattaattagcagtggtggtgttgtcacaacagcgaaagccacccctgctgatcttgcccttcccggccgtcgtagtcgacgtgctcttcttcggcgccgccgtggtggcgcggggcagcagcggcgccgcctcgctgacgacgacgacgtcccggctcctgggagggtggtcgtcgtcgtcgtccgtggggaactcgacgcaggagcagcgctccagcgacgcgaagaaggcggcggcgaggcacccggcagctcggcccagcgggcggccgcagctttggcccaggtgggcgtgggcgcctccgcggttgcaggagaaggacgcgcaccgcggcgaggaggtggcggcgcgcatcggcatatcgatcgatactagtggagtggagtggagtggtgagtcaccttggcttggatcgattcttgcgcgcgaatatatcgatcgatcaaagatagatcatcctaggcctaactattatggtttgacggttttgttgagttgtattccaaattcatttgcacatatataaagaccagcttctgtcagagcgaagcggaagcccattattggaggcttggccggagcgaagcgtagggtatcgttatccttttaagatttcaccttcggtgctgtaatcttatcccaatataataaagatatttttgttgactgatgttcgtgtcttttgtgattgatctatcattgtttatcgtttatttgcctaacgtttcctaacaggttttgcccttgttatcgatcgggtcggatcgccgtcgacgtcaaccagtgagtctcctctccggccgttggccgcactgatcgatccggtaggcgggcggcggacagcgagagcgcagtggagtgacgacggctacccaccaatcgtcatcatcgtttgctcttgctagctccagataaagatgatgacgactggtgggtagtggccgtggccatcggcgagaaggacggcgattccctttccttgtggggaagacggaggatccaacaccaaacacggcatatatgcaaaggaaatacgggaccgctatatgtgctaccattaaccaaaggggttcttttaaaaaattcctagcacaatcaaaatgggcttcacgtatgtcgcattaccatttcggcccaacaaaaacaggcctcttgtaggttagaaacccgtaccggcccaaacatttcgcccgcacgtcgcattaccgacttacagttcaggcccattttatatgggctgcacggatacaaccaacatgggccttcccttccagtgcaacaagaatgggccaaacttgtgacagggcttggaccaagatgggggtttgaaggaccaagaatgggccttttcaatattgatcgatctggttctgtggtgctagaattatagctaaaaaaatctatgtgatttaacgctagtcaataataaatgggagttggggatttgtttcatcaccttatttcttattttgatttatttttatctttaacaaaattttggatgtgtcttatgattgaaggcggagatacaatctattttcattattaaaaaataatacatgtttgacgattgattgatagaaaattttgagatgcagagcttactggtgaaccgctgaagcaaacatctaccagtagcaatttgtgtagaagtcgtcttgtaaaaataaaatgcgtggtagggcataaaagcccaggcatgcatcgcatttgttgatatgcaggaatagggatcgatggatggaaagagagaccgggattcccctgtcggccggcaacaatcctctactattaattctttcgtcaactgaacctgaatggatatctgtatggttgttcaatcccatccatccaagatgcaggccagctctgagctcctctatttcatctagtgcatgcaatgcactggctgcagtacttatatatgcatctgtctgaggttctcttttctcatttggaggggatcaaatcaaaacacaattaaacagaggagtatacagttagaaagagcatgaaaagttggtttacgtctgcaataaaattcaagcagggatcgcaaccactttactttgccaaagaaactactttaatacttctcttcctgtacgtgtgaaagagcagaaactacgttctactactttactactacgaacaaaatcatccagcttcctttccagcatgcacctgacctcgcgatcgaatcaattcgatcggccgacgcatccatcgatcaatccatgtcgctagttcaaaccgtttacaccaacatatactccctccactaatgtatgacgccattgactttttatctaatgtttgaccattcatcttattcaaatgttttgtacaaatataaaaatatttatgtcatgcttaaagaactgaatcaagtcacaataaaataaatgataattacataaattttttgaataagacgaatgatcaaacgttggataaaaaatcaacggcgtcatacattaaaattttaatgaaggtagtattagatggacatgaaatgatgttgagcttactggtagctttagcttattattgttagcaagtgtcgctagctgttgctattgcaaatgtggtggtggtgcgagacagccatctgccggccggccatgacaagagaaagttacgtatggagtatcatggatgcatgctcatgctggggcctttgctaccactgcctcttcttcctctcaaagtcctaggttcccagctttctagttttgagagcctgttccgaaagtttttgatagctgcagcttttcaaattcagaaggttcctcaaataatttagctttccgttcagattctaagaagttgtagttgtagaattcaaaaattaaactaacaatcaaaagccgagtttctcagcttttctagattctcataatctggcgaccaactagttgtttctcagaatcttaaagcttctccaaacatgaccatatactcctcgtcagggatgggctcagagcgcgcgattacatcatcttggtgtaactgactgagggagtgtttgagagaaggagaaaagagaaaatgcataaaacaatgtgaaccactaacgcatgattaattgagtattaattatttttaacttaaaaatagattagtatgatttttaaaagcaacttttctatataaggttgtcatcggttggccaattacggataatacgccaaatgtttggctattgtgaaaaaaaatttgggttaaaacttttatatatgtgttttttttacttcaagctaaaaaaagaaactacgaaaaataaacctcaaaatcaacttttggtattggcatataacttatactaagacaaaaaagatgtgaccctaaattttttacaaacaacacatcttttaatagtttagaaaacgtgcacgtgaaaaaacaaggtgaattttctctcacaatcatctgtggacgaacgtaacccagtcttaatagagcttctattatctaaaattagactcctctcctctccaagccaatttagcttccattgcaccacctccctccctccctccatccatctctcttaccacgtaccaacaatggccaccatggctccaaggctgctcatcgtcgtcgtctccgtcctcttcaccgccggcataatcgcctccgccgccgccgcgcgcgacctcaccgccgacccggccggccaggccccgccggcctacgacttcggcatcccggcaggcttcttcgtccccggcaccaacaacccgtacaacggcgatcctgcagcgtgggcagctgggtacggcagcgccgccgccggcgacgtcggcgggttcgggaatggtggggcggaggcgccgtcgatggtttgctccgacaaggggccatgcaacggcaagaagctgacctgcccgaagaagtgcttcgtctccttcagccgctccggcaatggctacgccgccggcggtggcggcggcggctgctccttcgactgctcgaccaagtgcgaagctacctgctgatcattttactacttcatttcctcacccatcgaatccaaggcctcctcttgcatcagctcaatacttcatctatacacatcatcatcagctgatgataccgctccagatatctatctatctatctatctaatctacaggtttggtgcttgcttgctaatgtctactacgtacccatcttaatctgcttaattaattggtgcaaaatatatttctacctatatatgttcttaactaatcctgcatatatattctggaaaacggacatgcacatctgtttttttttacttgttcgaatgctgcatgtacgtgttttcattacctctactgcagagactactacttgtgtgtgtaaccgtacctataaacttgtactccatcacgtaatgatgaatgaataaaggagcgtgtcatatttgtaacccgtgttgtatctgcgacttgtgttgtaaattgttatgatggaggagaatataataccgcatgtttgcctaaccctgcctgcaaaacgccacccgtctcaatgtttgttgtcagccgctctttcagatctcataactcaaaattgccggtaagtacatatatatgcatcttaattcaagctatttcagtggtccaccaaatgatgaatcttttgctgtaagttttcatgcttgccttcttttactgtcaaaactagatgtatgtatctaaaagggtattttcatggtaaagagtatatgtgtttcacaagtgcaggcaagactgagttacccattaattccaacaacatgctcacaaagaattgaaggcaactcgcaactcatcagaaaaaatcaatgtgaaaagtgttcagaaactatcctatcgacttcttctgcccatcatgaggttaactcacaactccaactctcatcacgaagatcaagagctcatcaggtatcgattcatcagtcgctcatgacctcacttccatctgaatgctcagaagcatcagtaacaccccccagatcttcaccctccccactggtttccatatcatcaacttcagactcttcatcatcagtatccttgtcctcataaattatcggcggggatccttcttcctctccggatccatcatcgtcaatctgggagatacatactttcagttatggatttgcaatgctcaaaatgatggcacttgctggtggggtaaaagtaaaacttacctcactgaaaagataatctagacaggtagacaactgcagcgatgatttgaaggtcgatgttcttgcatcaattagctgagagaaatgcaatcagtaatagtaaaatccaaaaataaacatgagcacatgacttataattgttattatgtctccactagtgcactaaaagctgacatattcacagtaattttgacatccacaaattccaaggggctgtatagcctagatgcagacatcctgatgcacatcactaaaggaggttgtaagtggtgcatacggagacaactctttatgcagtacaggccatactttgctgctaatgctataggtatgtaaactctcagaggtatgttgcatatatatatggaaataatcccacgagtcagaaagaatatgcagtcggtaacactaacattcaaaacaaaaatgacctgcaatctgtctcttcatgtctgagctatagcgtgcatactgatacattcaagataataattggcgctaaacaggttacttgagaatacggtgcttagatatccagaggctagtatcattcaggaggccaccatctggtataggtaaagaaagctctcaacttcacttcacgtggggcagtaaagttctaaatcaatcaccaggaaatgatgtgctggtttttcaaaaaaatatttgttgctccaaaggatataaaggaaaaacatattttaaacaactcacatgatagagtgagttgagaagaagctcaattactgaacaatatccttcacataaatgtagctaattgctacctatgcaatcagaattagttaataaatactcacatgatagagtgagttgagcagaagcagagaagactcctgagaaactatgctactcatgtgttgactgagcaaactttgcagccatgggagcaaggaaaccagcactgcacccctgacaaaggggaaaaaatggaaaacataagacctctacgtcaaaatataaccaaataatcttggcagtatgtaaatataatcattgtttgagtagcccatgaaaatccagtcaaacatagatgcagaaaaaagaattgaagctctcctttttttcatgtctactgatgaattacataataacccgaattgtatatcctaagcccatcttctttgtactgaattgcaaaagtgcgtctaacgaattatcctacctcgattgcataagcaatatgaagaacttgagaagcttcacagcgtctgctggtgtaagaagtgatattgaattaacaatgacctgcacagaaaccaacactgaaattatcagatttgatgaccaaattgcatcaaggattagtcaatgttaacttataacatctctcaataacaggtaagaattagtgattaacactagcagagcaagtgatgaataaaatcatatttcagtaccacgaaaatctggcgatatagccgaatgcagtgcaagtgaaacggcaggcaagcatcgcattgcatcattgcaagaagggaaaaccatgacgataccttgtggtctttattgtacaagcaattgagcaaggatgcgtggtcatcagcccgcagagcctgcttgagcaagacgtgaaccgagtccgcgctcggcggcatcaccacggggagtggctgctcctgggtagcttcacctgctgtcccgtcgcctcctccgttgagcagattcagggtggccagcttttcctccatggtgggttcgtcaagattatactccggattagcaccactgtcgttgattgcatctgaaacatagacaccaagggcatgttcactttgatgccaaaaaaatacttaccaaattttggcattgccgaaattttagcaacttgtcaaaattttggcaagatttcttatatagttaccaaaatttgacagcaaactaaatatagccattttttggcaactttatcaaaatttggtaaggttgaaaatgacatcaaagtgaacaggtcccaaatcatgctgtcaccaatggctgttcagagagctcgcgtttatctgtgccagcggctagcctagacaagcagggaaaaaaccaagaactgaggaacagggttacctgatggcaggggagcgcccggggcaggttgcctccggcggcgccggcgagtgaggtccatccgcttacttcagcacgcagctggcgtcggcgccggtggagacaaacgaagcgagagagcagcggcggcggcggcggcggaagaagagagagagggggagagagagagagatgaaggaagtgcaaggccgcacggatgggccggaatacggcccagcccatcctatctccagacattttttatatttcttcctctccttttttttttctagttttctttccgtgtaattcttttgcacgttcgcgaataattttcttccaaatagtagctgctcatactggcattcctgtctaccttttcaatgctcacgacaagcatgctcattttctcattttcagaggttttgtttccaaaaacatttttactgaaagaatttgaggctggctaggaacaccaacagtccaatgcctatggttgacataggagtacacgcaagtacgcaactcgcggcaggtgaagcaaattaatcatccgaacatactcaacaactatcacaaggaagaattagcatttagttcatcattccaacaacatttcttctccatctggagcaaataaaagccatcattcctgcgtctcgcatgctaaaatcaccacaagcttactggacagtctgggctgaatgttgtaagaatccatatctcaaacaggatgtcaaagttgccattaacctatgcttcagttctaattcttccgaagaagacgccgttctccatactcccaccatgaattcaagcctaatgccaagtactagtactgcatatgcacaaaattgcagctgagctactagttaaactgtctctaaaccaacaaaaaagggcttcgggtcactcggcattactcagttcttcaggtccatcgcctccctgagagcaaatctccattagaacatccaacacaatgatatcaaagcacaacttacaatgcacaaataccaggactagtggtgagaatctcttaccagaacagtttgtccatctcatcactttcaggatccaactctataccatgggtcaacgccacgcaagctttctcataatcctaatgaaggacaaaatgcgcatatggtcagccaaatgagatggtagttagttagcaatgagaatggaatggtgaattgaagttttttttatgctgcaccttctcaagcattagagcttctcctagccgatggtaggcctccgacaacttcgggtgatgttttgcgcatgtggttgcatctttcacagccttttttccctcacccatgcgaagccagcaaagacacctctttagaagagttgtggcatcacaaggatcaacttccagtgcctgcggtgaaccaaacagtatctgtcaaatatagtgttgctgccacatccaaaaatttaattgtcacaaagttacatttctcatttatctcagatagagttgaacccatagtgaaattcacatatcaacaagaacttaaaactgtagatggcatagcaattatatgacagaattcctagaagatatatcatcccacataactgctgttgctcaactcatactgaatcatcaaaataactactcgaaggagacactatttcgtagtacatatactttgtgcacaaagctcatgatgattttatatcaaaaaatcattgcttatcctgtaaaaaaggtataactgctgattttttgaatccatgaaatggaagaaagctgcatcttattgacaattcaaggaaacagaaaattttgcattgagttgaatgaaaagaagtgatgagctcatggcactagtctttcagcatagtagcattctaatagtcgatgcactatttaagtagatagaagaatgtacctgtgtgtaccacactgatgctttttcataatcctgctcatcaaatgcttcattccctttttgtttcaggtcagacattttcgtgttaacgtaatcatcatcctgttcaatttataacagcatgagtcagacagattcagaggtccaatgtgacaaaatgcaatgtaacaagtaaaaggggatgtttattgataaaccctgtttctctattgttaggtctgatgaacaagctacgagctattgttaactttgggtcaaaactaatacaaactatcctgctgctgagaacaaggtggcatgttgcctgcaatgggtacaaacaattgtggttccttgtgtcaaaacagggtttgagaccccgctggtaatccaccatttttaccagtgatcctgggaaacctgatgtgtatcagtatctagaaaagcatgtaccaatccccctcaccaggtatcaattcagggaagcaaatttaatatagaaacaaacttccttcatcttctttttgcaagaacaataaaacaagcccacatgaagaaagctaaagagagcaaccagacgctagcaagtatgggcaactgctatagtaacatacctctagcttcttgcgttccagattggcataagtaattaccccatcaacgctccagtcagcaacagttggaattgggttggtcaaaggaaatagaatctcaacatcttcccttgtaccatacacagcagccagctctattggcattctaccatgctgtttggcaaacgaataaagctttataaagtcatattggagatcagagaaaggtaagacgatgcttccttccaataacgctaatttaggaattaactttgctccaccaaggcacatcactaaatgatgtaatgccaccacataaatgactgatgaatatggaatagtacttgttttatcaataattttttcaaaattgctaccatcagttcttgttgtcctaaactttttaaacatgttgccattagaaaagaccaattagcattatgctcaccgactattaattatctctatgcacctgaccaacaaaaaaagctaaatgaaaatgaaaacagggaatttagcaggcttgtgtcaactctagaagcagatgatagtggtctgcgaaacacaccacagaatggtgtacacatgtctcacaaatcaaatcacactattcaactgatgctcaaatgctccaaatcttttgcataatcttgtttccgaaagaaaaaagaatttcctataaccaaaaactgtgaactttcgatgctctataaccaattttgcctagtatcttttacaaataagcgtgtgccacatatgtgaattttcaggaatacatttcattgttccatactagtgatgcatatcaatgccacaggcctaaaatcattgaagctacaaactcaatctgctgatagtgatggtgtgataagcaaaacagaaggctcaccgtgtcaggacaatttgggtttgctccagccttcaacaacaactttatagcttcagttaatccactccctgcagctctcgccagggggttgtttgtagcatttacatcagctccagcctacaaatgtttatgtataatacaaaatgattatacattttcttcacataacttgatgattataacagctctagccatatatagtatcagttatttagccttatcctattgcagcagtccaaaggagaaaatattgtacctggatcaatagcttcacacaaggtaaggaagtagtgaataacgccgcagataaaggtgttgcttgagaagaaggcataaccttgttgggctggaaaagaaagaaatgtattatcatacattatgacagttcctagagaaagagataatttaagaaagttgtttgtgtttcttccgttgttcctattgattattcagtggagtagttgttaatgtgtggatcacggctcagccagacctgggctagctcagtgctcacacatcaataaccaaaatgagagtaaggatggaacagtgggaggaaatagtaagccccaacataagaaaagtataagcatcgtacatctgcttggtgctccaacaaaatcttcacagtactttcatatcctttaatagcagcaaaatgcagaggtgtcccatgatctgatttgccatcaacatgagctcctctagaaagcagcaattttactatttcagtcctccctgaacaatcacataaaaaaattgaaggtcactgatgtatgagagaaacaatttgggggcagacaagtttgagaagccagagcaaagaggcaatttaacacttaactgcttaactggaggataataaaagaaaaagacaaaccagtcctaaataacacacaaaaagagcagttcactcttggaggaacatgtttcagtggctagaacaaaacacacacacacaaaaagaaaccctggcagcaggttgataaataaatatgaggtttatgaagtagaaacagtccaacagttatactaggatgaatggtaaagtgcagataatctatgatgatgtgaatgatatattttaacattttcttatgatgaattaatatgtataggctgatgaacatgaaaagtgtacatcagcaaggtctatatcacttaaacaacacctgtaaaaacaaaatgcgtcaggaaatgctgcattaggcttgctttgttgtacatttgctagacgctaaggtccccatcagttgcttacaacttattataagccgtaacggcttattagcaattaaaaaatgttgtgcgaaaaaaacttttgtatatatattcttagcgacttaaaagtcaaagctgaaaaaaaaactatgttgaaaaaaaaaacatcaaaatcaaattaaaaatcaagttttaaagttcagattttggctttagcttataagccatagggcaaacaatgaggcccttacagtattgtctgcatttttctccacattcaacgtaaggctgctcatcatgacagaatgcagattggatgtagcagggaatcctacaagaagataggatattcccctaataaatccaagggcataatgctgttccactgaacgggattgggttgaagcagtattccgaatgacacatagtatgccgggtagtacagcataactcagattgttcttttgtaataaaaacaaaaaaagaaaaagaagaagttgaactaaatctgaggattggtttcccctgtttatacctttctttgcagctgaatgaagaaaagtgatgtttccttcacgttcatgatggatatcagcaccatgatcaatgagatacctgacagagggcaggtccccaccggcaatggctcgctcgaggggagtcttcctacctaggtggcaaggcaatgaaaaccagattcacaataacagtgagacatccagctgaaatagctagctagtactcctagctggcgaagaggacaaaaggaagcagaagaggaggatgaatcttgacatgcacctggagtggtgtccggcttgtgacgtccatgttggccacctcgagcaagtagcggtagacgtgcaggcttctggcggcgtgcagcgcgttcatgccgtggaagccgtgcgcgccacggtggccgcgatcccctccccgtcgtcgtccagcgtcgcggcgatctctgattgagcacaacagcaagcaagcaagtctcgttctatcacttccatgagcggaaatcagaagcccganaagattttaaaaaaagattttttttttgtttggtttcttgcatgtcaaatacangtggtcaggggtggcgagaagagaagtgtacccttgatgcggcggatgttgccgtcgtgggcggcgaggagcaagttggcctccgcgggccagctgtcctgatctgcgcgtgaatggcangcaaagggatcgaggaggaggaggaagagattagattaagaataaagaatgaagagaagaagacatgatgaatgcagcgcaataccgtcgccgagaagcttctcgaagaggtcgggcagcgacatgatgccgtcctggctaggctagggtttcgtttgttgctgctgcggctgggttgtgtttgggttggggaaaggaggagagaagggaagaatggtccaagaattgaagaagaagaagaagaagaagaagaagcgcttctctgctgcaactctgcaagtgcagagagagcagagaaagagagagagagagagaggcgaggaggcgggaagtgatcgatcgagtggggtcccactcccagacgcagaggcagaggaagtggagcaatggcgggtcgacatggcagcccccaatccccggcttttttctgctccgattctccccatctttttccatgtctttgccttcttctcctctcctatcctcttcttggcttcttgcttgttcatcctgcacaccacactagcagtggagtaaaactgtaaaaagtatttcagatctttgatttttgcttggtggtgagagataaataaaagacaagtcgtctgcaaccctgcatcaataacctccatacagataaacaaactgggccttgagtagttcccaatttttttttctaaaaaagtcgcatcgaatctttaaacacatacatgcagcattaaatatagattaaaaaatttaattacacagtttacatggaaatcgcgagaggaatcttttgagtctaattagtttatgattagtcataagtgctacaataacccatatgtactaatgacggattatttaggcttaataaattcctcgcagtttccaggcgagatatgaaattagttttttcattcgtgtccaaaaaccacttccgacatccgatcaaacatccgatgtggcactcaaaaattttcttttctcaaactaaacacaccttgggcctcctaacagcagaattactactagtactccagtatgtaaatcattctaaggccgacttcttttgtagattatttttaccgattaactgtacctaaaacgagaaacatgattattaactaaatattaattattgaaatttttaaaaatagattttatttgattttttaaagtattattgtcacggcatgcactacttcaggaccatctcaggaaggcgaagagcaaggcaggagacaagattcaaagcaacccttgttgcggcgatcgacacgtgaaaagcggcccaacagcttgtaccaaccgagtgtgtggacctagtagaattgggctgggccacagtgagggagagaggtccatagctcatcgctataagagaccggcagggaagagaacgaatcgaacattgtagaaacaaatatttggaaatcaattcaaatctctccctgttctattgctgcctctacctgttcttagctgttcttccccaaactctcaattctctccctaaatcctcaatttcttcccttgttgtggcacaaattcttcggagacgtaacaattatctatatagaaaattttcatgcaaaacgtataatttggagtagtgtcacaccccaatctgataccgccgtacaacggcacctgacaggagcgtgtcgtagggaaaacggcgcgaaccgcttcctacgaaaccgcgatctcggtaccagtcccaggacatagtgctggtacccacggtgacaaatatgaatcatagcaatccttaaaataaatagaggacttatttaccttaacttaggttgcagctcagacagcccgagaatacaaccgacgacgcggacgaggaaacaccaacagcagcagcagcagcagcggaaccaacggtctaacacccaacaccacaggcgacggctgggaaccaggacgaaaccctaatcttcacttctccttatcttctcttcagggcggaggaactatatatatatttatagagcaagggtgagtactttcgtactcagcaagtcacgggaacttaggtgtttggtgctagcttggaagagaggcaaggttgttttgcaaatcttttgtttgaaatcattttgaaatcactaagtgatttatttctttctatgtttgggcgaaaagagacttgcgtctcgattcgactttaagagatgcttttcaacagctcatttagcaatgtaccgacctcccgggtcagatcattacttctcggctcccagagccattccacttgattaatcggctcccagagcctttttcattttctcggactcccagagtcctgctgcccagcagcacaacaatccgcttccactcgggaagcctagtctatgatgcccgcagacatcccgaatcacacagattcgtttctgaccactcaggtcatccatctgccacataggctgattctggttacgattcccacaccacaacaacttttcacaaagcacaggcaaacaaatctacgcaacgggaaccacctcacatccgcccatgaccgtgggcacggctgttcgaacagttagttaacctctgcagaggggtacactttacccacaagacacgaacttactccagacactggccggtgtcagaggttcgcgacaaagcctttccccagccgacccagggttacctcatgccacatagaaggatcaaattctctcataaacataggcctttttaggcgtgcacaaatcaaactccaaccaccttgatcggtaagtgagcaagcttctcgttcttgccttaccaggaacccggtttgtccgaccccgccccggcgttcccaactattggcatgcgaggtttccctgaaccgtctagttacttagccagggtgtcccattccaccttgtggttgcacttgattatgttcgatgagtttcccacaggaatcggtccttatatgcgaatacgggacagtgccacataggcacaacccccgcatcgcgagttttcacaattcattttattttcaaacacaccgacaccacatgtcgggttttgaaggcttcacaaacccatttcccaagttttcgacaagcaacggtgtatgtgggatatttggtatacgcgctcagagagcacgaataccgaggtaccacaagggtggagcgacaaggaatcagggtagtacgacctacggaaattagtgtgactactgggtaggtccgtcggtctggcacgcaaaccgaggccaagcaagttaagtgtgtgattctaataatgcaagttgcaaacgaaataataatgacttttcaattataggagcaattgatcaaagggtgacttgccttgcttaaggtcttcacgaagcttcacgaatcttcgagagaacccgcgatcgacgaaattccgattaccgcaactatacgcaaacaatcgaaaacctaaacaaaagaccaaaagaaagatcctatttagactaattattagtgccattaaatagatctcaattttacggaattactggaggttgagcggagtcaatcggatgagcggttgggaagatatggattttctaaggtttaaggattttctaatcaaaggagaaaggatttaataatttattaaacccctttctggaaagagaattgaaggagggatgtaaactagacttgttccggtggcattggcgcggcccaagggtcgaaggaggctcggccaagccattgggccgacgcgggcgcaagcaggcggcccattagggcgcgcgggagggagagggggcggtccggtggaccgggtgcacctcgcgggctcccgggtggggcccacatgtcggcggcaaggttcacgggggaatgggttcacgcgggggtggcgctagggtttattgaagatggcgcacgggcggtgcgccggatggaccgagaggcggcgggcccacgcgcagccatagggctctccgtggaccgcgcgcaccggtcgagggagggggaggcggcaggctggtcgtgctgacccggtcgcggccgatgtggctccgacgtggcgcctacgtggcagccacgcgggccggcgggaggaggaagaaggggaggccgagatggacggcggacggcggccgagttcaccggagcttgtcacgacgattcgagagggagggagcacccggattaaagagacggaggagataaagtgcgccaccggctcggattcacggaaaggagaccggcgacgacgaaacgcggcggccctcgccggcggtgagaaaaagggcaaacggcggaggggcgacgaggattcaattcgaggcggtggaagcatctccggggttcaaggagtccgcttccggcgtcggatggggcggaagagcaccaaggagggctggcgacgagcggcggcctccgggagcgggcggcaacggcggcgaggccatgccgggcggcggcgggtctaggggcggcgtctacgcgtgttcgggagtgccaccgagctatcacgcagactagagggggggcgagggagagcgaggaagggaaacgggaggaggcactaccgagccgggcgggcagtgatgggcggtcgacggcgcggggcgagttcttcggccttgggccagggaaggggaagaagaagggtggccggagtcctcttcggctccttgcgcacacgctggcttcaccagcacgcgcgacggcgaagggagggtcggcagctgctaggcggcaacaaaggcgcggcggcggtggaagagagatgccgagagagaaagagatagggaggctcggcctgggcttttatagacgcgggggatgtcggtttggggagggaggaaaccgacctcgtgggcggtcaaggatgcaagggcggcgagctggcggtcgtcgacgcgtgcagccaaggcggcggcaggtgatgacgccggcggtgtcgggcaaaagaaaaaaaaggaagggggaaaggggcttggtcccttgccaaaacgagaaaaggaggagggagagtgaggaggaggaggagagggagggcagctgcttctcccactcttggacgggtgcggcgtggagtggcgggggccatggatgacgtcgacgatgacggcggcggtcggtttggcatggagcgggggcaaggcggcagcgcgtggcgttggcggcgaccggccggtcggccacctcgcgaggcgcgcgcgggaaagggcgaaggcggtggaggttttgggcgacgacggcgggaagcggtgtcggcgcgagagagaacagagagggagcgagaaaacgagagagaaagaagagaggcgatgcctctctctctcggcgcgtgcagcgcacgtgcggggaggaggagcagccgagaggggagaatgggccgagcaagggagaaacggcccacagccaagagggacgcaatttagaccttttccgagagaactgatttggataggattggagagatttag

SEQ ID NO: 8790 - DNA, 6056 bp, Oryza sativa
ggtttttaaacgaaaattaaaaaaaaaagaaatgtagtttgggaatttcgaataagtagtaatttgatggggaaaatgggccgggttttgtggtggggcccatggtgcatggacctggtgtttgtacaccgggtgtattacaagtggggccggatgtgaaggtgtatgaaagctgggtctagggtggttgggatggggaagcgtacggttcagtggacaggggacatgaggcacagatgcttcctagcctggagctccactatttggaccacctggctgtcattgatctgtctcactcgagggagttactgcctccgtcccacagtaaataaagttttattttttttcttgcaacgttaatacaaatataaaaaaaaagttatacttaaaatacttttatgataaatcaagtcacaaataaaataaataataattttatattttttaaataagacgaatgaacaaacattaaaaaaaactcaaaacgacaagtattatgggatggaggtagtaaaaaaaaacatgaatactagggaagcatctgatattgaataagtggaaggggagagattttgaacccaagccaactaaatcatcatcttgtggagttagctagaggatccctgggcgtttctctcattcgagtgagtcaatggcacagtgccacagtgtttgcatatcttcgttctaagatataaggatttttaattttacacacaattactaagacagtgggtagaattaaaaggagaaaattatgatgggttgaaaaacaaaggtaagtgggaattaaacggtggaaggttgtaattgaatgaaaagtgattgttaataaagaagttatattttgagataaattttgaatgctagaagtagttataattttgagacgaaaggattcgatttctgcaaaactcatttgaatttggtggtttttttttcatataaatttgtcaaaagtttaaagggtaaacatggaacgatgaattcgtacaagtctgatgtcacatatttatgcagatgctccagccttggagatagatagatcgatagataaaccatgggattcacaatgtcttattccctctgaacagtatgggatgggattcatgtaaacctcgtgttaggaatcggatccaaaccgaaacacccagcgaccacatatgaagacaaagactgacaaattcagggcaggatgcaaatcatgcaaagtatcattaagctttacttgtgacttgtccatcaaaaacggacccaagagttttaacatttagtaacactggaatcagtgccaactgccaagggcacattttattatctctcaacagctcacgtagtgcaatctggggatctctgtaaagaagacgtgcagagtggccctagtttacaatagaaaccgagtacaaaaccacagatcagcttttgttctgagatccttcaacgctcttccttagtgccgatatgacctctcctggttcagctgctccaaatattgagcttccagcgacaatgcagttagccccagcagatgcagccacatcaatggtggaaggacccagaccaccatcaacctaaaacaaaaaacaaaaacgaatatgttttgataaaatggaactaaatagcccccgagcgtctgtacgattaaatcagtgtgctttagacaagaatcataaataacattgcaccacactacactgtgaagaacatattgtacctcgatgtcaagggatgggtacttctttctcagggcacgcacctaacgcaccatgtttcaaaatgatcagaatagttgtaaaacatagatacacaaaaatacagtataaactataaacaatcaggaatactaaatggcacttgatgcagtaataataccttttccatcatttctggcataaacttctgaccaccaaagccaggttcaactgtcataacaagaaccaattcaacaggattttctgcctccacctgaagaatttgttatcaatagaacaattgatgatgcgtgaaactcacagagcaagatatgcccacagccttaactagcattgtcagaaatcagtttcagataagtgagagtgaagttgctagccaacaatatgattataatgaattcaataggaaaaaaaggttaggcagtaaattgctagctccttatcacaagtatcttgagacctgatcattattttgttaaacaaatgtctcttgatcttcgatgcaggtcatgctgcagaaaacagacatgtaatgctggatatagtgaacgggaagttagctatgcctgaacatgggaagaacaggatttgcttatttaccaatcaaagaaataacatgcaaaatatattgccactagagtggtacagaatatacagcaaccaggactggtacatgatcaccgttcaagagttaagattcagaactacagagggaatatgcctggatactgagaacaggataactataaatgaaacaaattgcgcagctcgagtgtaaatgaacataagcttactcccagtttgagcacttattggatatgttaagaaaggcatttatgtcataattatgaactgcgtgtggaaatagagcatgggatctagagaagttatattgagcaattaccaggggaaaaacttcctccacaggagtgcctggcctcaatgatacacccggtcgcataccctttgctttgatactttggatgagttcttgccaattgtctgcaccaggtttttcgtaagacaaggaaaaccattaactgcttctcaacaattatatatttacctctggatacttctatatggaatgtgaaacctgaggcaccagcttttgctaatggttctacataatccgaaggattggtcaccataagatggcagtccaaatatgccctagaaaatttcagaatggtgagcattataggtacatataggaacaagagttaacaaggtgagtaaaagagcaccaccatacttggtgtgcttcctcaagctctgaatcactggagctccaatagtaagattaggaacaaagtgcctgcatatgtgaattagttctttagcactacaacaccaccacttcaatcgccattgatctatcatattctggtgtttgcaatacataaactcacccgtcctgcaagagcatatggagaaagaaaccataggtcagcaaaagccaagcttcgcattttcgattcataatcaataacacacaatcctcttgaaaaggaaaaaaagaagtgaaacgtgatcaccagagaaatcaggattaactgaaattgtcaccatgaaaaccaggctgttagaatgaagagacagaaactaacgcacacataacattctctcatagtctttgctctgaacatctatgagctatgctacactaactttccagtaagacatgaaacaggatatgtcgaacaaaaggtcattttgaacaaatattatcagattcctgcgatttagcacatatataagtgcatggtaactccaagctaaagctcaatcctaaccctgaccaaatcatcctacaaaccaaagggcacgcacggtcaaaagatttgggggggaaaccggatactactagagccactgctttcgcgcggatcaaaaggtggggggcgaggcgagagggggatcgcacacgttaccatgatgtccatgtggagccagtcggcgccgaggcggaccatgcggtcggcctccgcggcgaggttggcgaagtccgacgagagcatcgacggcgctatcttcgccgccgccgccgccgccatgcctcctgcttgacctgctcccgaaccaattccgatagtgttgggtggtggtgtgtttggggggcggcgcgagtagaagtgcggtaggtgacgttcttcgggtaatcggcggccgctgggaatgggaaacgaagaggttcggtcgtgtgtatggcccacttgtcagtggcagggattgttttcacgaattattatctattttaataataaatttaatagtttaaataaagaactttaaagaaaagcttataacagtgagaaagtttgagtttagactttagagacgtgtaccagataattcatcacaataagtcaataacaatacgatgaattaacccagaagaacatgattaggctgaattaaaacaaagtactcaaagcaggcacggctggtcgctactcgctagttgccagcgtaaaagtagatcagcaagtagagcggcgatttatttttgtccgtcctgaaacacatgccttcccaatccgtccaaaaataaacgaaccaccattctaaaataaataaacaaacctagtcaataaacatatcgaatatcgagcaaacacaagcacagttcaacatatcgaccattgtgatatttctgacaataaatatgttcggtctcatttgcatcaaggcagcgattagttcaacaaagcaggttgggagaatcctggtacagaatagaagcaagaaagcacaggcgtttctatcaagttcagggcatgattccctggcgtatcagggagaatgttcgaagcaaatttgttgatgcaaatttgcggtaactgaagaacataatcgtcgatctagtccttcctcaggtcgatgtactctcgcttcgtcccagctttgttgatgacaactatctccagcttatcaccctgcaatatttgcatgcttcgagcgtcagtaaagtggcaaatacgacggtgtgaaacacattactgatgggattgcagtactgagatggtgaaacatacagtgtagatgtccctctcagttgccgatgcaaacacatccttcactaaatcgaccgcctctgtctccgacaaaggtgtgacggcatcctgcatgcatcagaaatattcttaggactagtggagctattcaaatcagcagttgagcacttatttctgggtggcacataaacttgcatgtcaaatcaaccagatgatcacatgacatgatcaatcataatgcacatgccaggtaacaaactagtaaaacttcagtgccttactcttgcagggagtaatagtggactaggtgattttagttggttgtccagcactggcatgatcaaagcagatcctgttccctgtgcactgtagccagtcctctcataggacccaactgcatcataggtgaaaacacatcctttccctgtgaaaataagatatgtgtttattagctattagagaaatatatatgcttcaacaaacacataaaacataaattggaaaaggagaaaaaacataaataaaaatctgcaccttaccttcactatcaagcccaccaagtacattgaaagcataatatgggaagaatcgcttgtagtacagagtgttggagagcagttgtgccatggcagggcagctcatccttttattgtgctggtgctggtacagctacaaaaacaaatgggcagcaataatttagatagcaatactgggagcatcctgaacattcagaagtgcatatttgcattagcttgaacacttccaagtgtataaaactataaacttctttactaacaaataatgccaataaattgcagcctagccagcttaacagagttcctgacgaaagggaagtttgatttgtgaaactaacagctgaccagctaggaggctgcgtagagaagcaaacagaaggaacaaaagaaaaaatatatatttctgacgcaagatgcaagtcaatcagttcatctgcctttagtatcaaaaattatactagcagcattaagtgcacaataaacaactatcatttcttgtattgatataacaacaaaaggtctaaacgaaagtacaaccctgttacagtggagaagttatggctcgggaacttaccaattctctggcagccaagttcttgtgcagagctttgatatcaccttggaagccggaagatgctagtgcgcatttgtccgctctaaacacgaaaaaaagaaaaaatgtcttaattttgtattattgataacgagcatattggaatgtcatagcaataaagaacaagacttccttccgtttttccccgcaaaaaaaaatacttcctccgtttcacaat

SEQ ID NO: 8791 - DNA, 6972 bp, Oryza sativa
tccgaacccctcctcgccttgattcgtacagactctggttggattgggacggatttgcagcgcaagtgcagctatattgtatgggctggaacgggcagcccacactatttagggcataacgtgattgcagttgtgtatctggccgaaattatttgggcttttgggtctatttggttctctaccctaccaattaattggtagtgccactaccaatttttttttgatagggcaaagttagctagtctatataggccccgttcgttagtcctgaaaagtgtggattaaattttagattaaagttgcacgcttttcaaactaataaacggtacgttttgtgcggaaactttctatatgaaagttgttctaaaataccagattaatccatttttcaagtttataataattaaaactcaattaatcatacgttattacaattaatccatttttcaagtttataataattaaaactcaattaatcatacattattacaatctcgttttacgtgaaacacttcatcttcaggagattcaaacaccacctatgtttggtttaataccaataaaaagccaaaatttaatatgggtgaagaaaattctagagtatagccaaattaagcatgggcactactaattgtttagcgtcaatccaaactagcatgtttactattaaagttactaaaattttagtacgatcatattttggtttcaatccaaaacgccctttgacggattacggtccacgtgcggcctatattccatacgcggcaaaatactcgcctgaacccgttaacgactcgtttgtgaagctttaacgtcaaagctgcagccaaatgtacacctctccaagtctcaaacgaattgactcttgagaagcgttttttctcaaacggctgaacagtacactttttaaaaaggaataagttcctgaagaaaaaatacttttaaaaaaaattaactaatatttaatttatcatgttagttgttctgttacattcgaacagtcttattagaatgcgcttgcaggcagatctcatttcttgcattcccagcaaggaatgcagacatgcagtacacatctgaacgaaaaaaaagggctcaaaacaaacaatcacgattagcacacaatttgcattgccctccgttaacgccatggttctggtttttggaggctaaacaacagctacagatgtacaccatacttttctttcggccgcccgggttcataccaatttctctgacatgttacctcgcataccaatttgacaaacgatgtagtactgcactgcagccaaatacaacagctaagactcatccacatagtttcatcatggtatgaaatgttgcttccgatgcatgatccttctccagggagcaacacctccagcgattgctatggaagcatcaattatctgtgccgaagtagcggtcaccgtactctcccaaccctgggattaccctgtattcctcgctcaacccggtgtcgatctcggaggttacaatcttcagcctcggaaatcgcttgcagacgcactgaattccctcaggagcctgtttacaaataaaggtagacagatccagttaaaactaaaatagggcggagagcaacagaacagttagtttagtatgttaatggatttaccgagataagattgagaaatatgattcgctcctctggaacaccttttcttatcagaagctcaatagcttgatttgctgagttacctacggagtacaaaacaacgatgaaggacactcagttataaagtagtgtcagatactggcgctatgaataaaattgcagatggcctaaagctggtggagcatctagccaaacattgcagcagcagcagtctttgattgttcattcattcagaacataatcatggactaatgattcatacttgccttatacttttttaaaaaaaatcaaggtgttcccaacagggaaaccaataggcaataatatcttccaatgtccagaaaagcttctggataaatgcaagatatataagtgcaggcatgcatagcaaaggcaatgtcgtccatgatcagtggttcacaagtcagttagcttaagttccaacaaatgaatgaaaatacatatagagagaccatgcaaaactgacctgtaccaagcactggatccaaaagaagaacatgccgttcagcaatatccatgggcagtttatggtatataagctgcaatggcaaagtgaataataactattcaaactatatgaactaagtcattctgaggatcctttttcaataatcattaatcataaaatctatgtacttacttgctgtccattgtctccaacacgatgtattagaatcttgccaatttttattcctttacaacaagcacgcaatgcattctccatactttcaccactgcaatacaatgatacatgttaatgaaaagatgttgaaatatcttctgtaatactaatatttcacgacattacggaagaatgacaggaaaaaagtaatttggagttaaaaattgggacatgatgcatggtaccatgaagatcgataaatgcactagtctgacctagaaaaaaatgttacagaacacataacatacataaaggaagaggttccaaaatccaatacaaaacaaagtataatgtaaaattctactaataacaaataatcttgagttctaaggtagcatctcaacacaaggatccagaaaattgctgttggacagagtcaattcagtatgcagccatccttcaaaatgcacctgccaatgttgtctgcttgaatttttagtttgctaattacttcatcatttcataacgtaccttcggacaatagacactccacagagcttcttgcaaaattcaactcccatataaatggaccctagacccagaagaaacaaattatacatgcatgagttgatgttctgaaaaaggaaagcattgtagagctagctaatttcaaatactaaatgcatagaggtacggcatgcagagtatcatgtagcaaacttgttgggaagttctaggtatgctgtttttctatttgcactaaatcagacccctaaaaacctgtttgcagccaaccataaattgctactcctacgtcgaagggaaaatttcagaagcatatgaaagtagctaattccaaaggtctgcagcagcagaattaattaagtaatggttctccataacaacgagtcccagctgcaggccacatctgcagcatcaatcctaaatttttttctcaacaaatttttgggtgattttagagaattgttatgtagcacactagtcaaatttgaatcagttgtcttacaactatgaacaattaaaaaaactccttttcgtaggtggattcacaccagttcagaacttatgatataaaacaatattagcattagcaaccagaatgaaaccgtgcaccccctgcatcacagtgggatggagccgttttgatggcaggatgggttatgtgcgctctcttttcagtcttttgtaggaataatttgtaacactgttaaacaactgaaaaagaatgaaaccaaaaatatgtggtaccatttgaaaatacctgttggagtaataatctgcttttctgtaaatggcaaatgccccagtccgtgctcaactacctgacatggcatttccataccaatagcaaatgagttgaatcaattcaaaatctggatcttttaaaaaaaaattatgaagttaaagagaagttataaaagctatatatacaaaagtagtaccaaacggatcaaccgatctgaataaaagacaaagtcaggtgtagtgatgtccctgtcacgaatcagagtatgcattcctcggatctgttgaattcaccatgaaaagtagaagaatattatgaaatttagcaaagaaaagcataaagtttaaagataagtgcaaataatctaacctggaatgttgtttgaaccacataaacatgtggatagattttgcacaagtcatgctgaccaagcttagtacgaatatgttgaacaatcaggtcaattgccacatgattatcacctcctcgtggtatgatcacgtcggcatattttttcgaagggagaacaaaatcatcaaatgctggcttcacaaacctgccatactacagatgccaacagaatttcaaattatatatgtagaaaaattgaaatcagaaaggtaaaaagacaaaaatctgtttacaaagcacaagaacaatattaatataaaaacgcaaaataaaacaagttgaagtacctgctcaagcaccgagctaacatctctacctctttcaactgtatcacgccttattcgtcgagctagcctaatatcagcatctgattggatgcatcatgggcacccaaaaaagaagtgaacaaatattccagctaataacaggaagcagttcaaggcaaacccaacataataatgaaaatgagaaacctgtgtccacaaaaattttcatgtccatcagattgcgaactctttgatcatggaagactaaaatgccctctaatataatgacatctgatgcattgacctagcaaaacaaaattttatcagtcatttaataagcaacattgcagtttattcgcttaactgttaataaggaatcatgaaaatacatcaagaaaaattaacaaatgtgcacagtaacattcgaaacaaaatgcaatgttgtcaattttcttttttttcatgtacaaagggcatatatcagctataaatggtcatatcattgcagagagattaggggggaaagcaacaactattcaatgttattcaaaaggccaatgacttgaaacctagattaaaagctcacagaactacctttctaaagctttcagaggaccgtcggtgattcttaaaatcatatataggaacatttacaggctgtgcccgttttagctgccccatgcattccagaagctgctctgtgtcaaatgcatctgcaagcaaagatatttttgttcacattagaaacaaaagaatgccaactcaggctctgatcactaaaacagggagtgtaattccatccaaacgacaagtcaagtaccagggtgatcaaagttgtaatcttgggcatgtgcagattcttcagcagttaacccacggtagaaggaatcctgcaagttaaaacccaaatgaaatttactggctcttcaaagcatttctggtggagcgagacgacactaagacttgtcaggaaaaaaactgaagtaactaatgacgcatcatttacaggtggactattggttgaaagatcaactaaccaatgtggcatatgggttgtcacacagacaccaagaagataatttcccaaataaattggactaacggtttctggatttataaacatgagaagaacatcaaagggggtggagccaggacggagctgtggacaatacacatttagctgtgttttgctattccatggaaaacatggttgtgccacatttctgctaactataaatattttgagttgcatttatcacaaactgatattcccatcctctagatcatgtggtgcctgaatggatgcccccaaacatccagttaccgtaagtgacctaaatgcattcatgctagaggtagcacaacttgaggtaacattcaggcatatcccagaaaaactgatcagacatcaagttacccgtgtccattcatgccatgttttccattcatataaaatataaggttgtgaacagtttcattgcttagtttcacagctgtaatatgagcattaggtgcaatgaattgcaagaaagatgaatgcatagagacactcatctagcagaatagatctaaacagattacttttccaaaaagtagtagggaaatggcagaagcacgttagtaagctggttaaaggacacatcaaacctactcgaaaatttcctaatcctgatcactatcagtccatgatttagcacatatgccgcattatgcaaccccagagttcagctaagctagtaacacagatcaatgtgaaactatagaagaaaatgatggcacacacacctggttgacgagcacgacacggtggtcgtgcagctgctggatgatcatgtcgcacaccgtcgtcttccccgacgccgtcccacccgaaaccccttgaaaaatccaagagaaatcctcgcaaacagaggctaaaccaagcaaaaaacaatgccgacgaggaagggctcgaattagttactaccgatgacgaagggctgcctgagcgcggatggcgacacaagctccgcggcgtcggcggcgacgccgttggcgtagacggcgccgttggagtgggcggccgccgccgcggccgccttggcggaggaaggggaggacggggcggagggggaggagaggcggagcgcctcgaggcggagtccgctgaagtgcgcccccaccgccgagtccatgacgtcgtccaccgccttctccggcatgatctccccgccgccgccgccgccgatcgatctcgctgccttcgcgggttttggtcgggatcttctcgctcgcctctcactctctctcgatcggtttttaaaacgaaaataaaaaaaaaaagaaatgtagtttgggaatttcggataagtagtaatttgatggggaaaatgggccgggttttgtggtggggccgatggttgcatggacctggtgtttgtacaccgggtgtatgacaggtggggccggatgtgaaggtgtatgaaagctgggtctagggtggttgggatggggaagcgtacggttcagtggacaggggacatgaggcacagatgcttcctagcctggagctccactatttggaccacctggctgtcattgatctgtctcactcgagggagttactgcctccgtcccacagtaaataaagttttattttttttcttgcaacgttaatacaaatataaaaaaaaagttatacttaaaatacttttatgataaatcaagtcacaaataaaataaataataattttatattttttaaata

SEQ ID NO: 8792 - DNA, 5206 bp, Oryza sativa
cccgtcgtgtacaccggcagcttcagccccgccctgtgcgccgtctcctgcagcaaattcttgtacacccccgtctcatcctacaccacaaaatcacacaccacatcacaaatcatcttcatcaaccacgacgacgacgacgaacaagaacggaacaatcttacgagcacgcgggcggtgagggaggaggaggggccgcggagggagaggcgggcgagggcgacctcggcggcggcgtgctcggcctgccggagcgtggtgcagttggatggcccgtcgaaggtctcgccattgaaggtgacggtggccttgaaccgcggcgcgtggtcgggcccttccctcgtgcacacgtacgacggcaggctgaagcagctcctctgcgccagctcctgcagctggttcttgtacatcgatcctcctccttcgtctctctctcctccccaccccctccctctctactcctcttcttctctcatcatttgatcatggcatcatcatctccattgatggacaatagagagagaggagggagagagattagattaggtgttcttggggagattgggagatggaggaaggagaagaagatgaaggtgagagtgtgtttactagtggtagtggtactactactactctagtaggaggagtaccaaatggtgcattgctttgctctcccctcttctttatttcttcttcttgttgctcatctccctctctttctcactctagcttcactctctcactactggccattgttgtttgtttctctctctagacaatactatggttgtggtatgggtgtagagagagaaagtagggcagagtggggagggtgagatggggggcagagacaccttctggtattaattggggggagagcatttatggtgttttgtaagcatgctgcatcctcacacacacaacacacttacctagagtcgtcttcatcatctcgcagtgcaatgcatgtgttgtgcagacatggatcgagatctctctctcttctctctagcgaaccgaatcgacggtcgtgatgatcagaagggttttcgttttctaccgctgttgttttttcatcgagatgtgatcatcgtcgtcttcactctcgccaccacgtgatcccaacgacccaacggtttgttgaatgtgtataggagtataggtcaaaagatcattttatctcggttggtaaaatgaaaattttacctttgggctttgtttagttccacgtaaaaaatgaaaatttgaagaaattagaacgatatgacggaaaaattgaaagtttatgtgtgtaggaaagtttgatgtaacggaaagttgaaagtttgaagaaaaaaagttgggaactaaataaagcctagggtgtgtttagttcataccaaaattagaaatttgattgaaattggaacgatgtgacggaaaagttaaaagtttgtgtgtagcaaagtttcgatgtgatggaaaagttgaaagctttttaagataaaattggaaactaaatcaagccttggtctaattttacaggctcgcaagatcaaatcattctttgatcttgagaaaataatctctttgttttttaataaatggtgctgatgacttctgaatatatgatcattcgttttattcaaaatttttatataaatgtataagatataaaacatgtttaaaatattttaagtgataaaataactaacaacaaaataaatttcaattaaataataataataataataataataataataataataataataataataataataagacgacgaatggttaattgtgtaaccaagttaacgacatcatctattaaaaaacggaggtagtataccagtaccgctcgtgtataggtggtggccggtggtggctaaacaaccaacaatgaccatgatttaacgaaacaaggttgtgacttgtcccattgaggtgaagttgtaaccatacaccgatacacattcgcatgcctacttacaagagaaagtatataagtttaagagttaaacacaatggtcagatgaaagtttattacacatacatcttatcagatccaaaaattgaggtatatgtgccataacatatttattagtatcatgacttattaattatatttaaaccatagtattatcctctacgttttgctaaaagctatcggaatcgtcttacccgatcagcctagatccaccttgagcccttgatgcttatggtgtcttcaaatgtataaatttgttcctcaattagcactcatggtttgactgctagatataaggcgtatttgaaagaaatggattatagagtttaatttaattagcttagtcccttaacgatgttttggaaaagaaaaaagcaatgctagtgcgtaactgccatgacgtttttttccccatttacaataatactacataccttgacatttggcattggattaaataatcgttccaatagtctacatctatcaaatattcctcctttagttccacttgatctttcttaatttctacgtattttttcctaatcctatgagcctgtttagttggtgaaatgaaaatttttggatgttacatcggatgtttgaccggatgtcggaagggattttcggacacgaatgaaaaaaactaatttcataactcgcctgaaaaccgcgagacgaatcttttgagcctaattaagccgtcattagcacacgtgggctactgtagcacttaatggctaatcattgactaattaggctcaaaagatcgtctcgcgatttacatgcaaaatgtgtaattagtttttctttttatatatatttaatgcttcatacatgtgtacaaagattcgatgtgatgtttttacgaaaagttttggggaactaaacagggccaatgtagaggatttcgttttacattacccatattcataaactagaaatttccctggttagattttagagggggtttttttaagagaagggtatccactcttttagttccacttgatatttcttaacgatctcgctttacattacccctattcataaactagaaatttcctaggttagacttttgagttttttttaagagaatggtatccaaccggatgtatgcagcctttttaaattgaaaacatagtcctcaaataactcaatctgaaattcgatcacattgagatttgaatttaggatattgaagtgctactaaggttactgcaaccactaagctacatatcctttcgcaggctttagaggtatctagctgattttgtttctcattatgcatttgtgcggttatttaaaaaagagaatataagttagagtgaaacacactaatgggatgaacaatgaatggtcctttaatcactattgcaacaaaaagtttaattagttgatattgctactttgcctaatgcatatcattgtgccgacttgccccatgagacctaagtatgctctaccatgtcaaactcgaccatcccatatggccattatttggaagtggcaacaagggttgaattgcatagaagcattcttcgaatgtgtaaacttatgttgaaaaaggctaaatattggtttcttattagcacccacaatttgactggtagatattaatgtatatatgtttgaaagaaatggattattggttgaatttagctcagttcctcttgagattttgggaagaaattaaagaaacgaaatctagctgtaactagcatgatagttttatttccatttagagtatttacctggacttctggcattggattgaatggacatcctaatggtcttacatctcgctagtgtaaacttaaaatattcaaagggaaataaccaagaaagaaattaaagccgcctcttttagttccacttgatcttccttactaattttttagtattttttagaaagctcatgtagaagatcatattttatactacccatgaacttgacaatttctttggttagactttaagaggtaaaaggcagaatcatttggaagaaaacaaatgtgcatagaaacatgagattgagctaatcagtactatcatttatacttattttatattgtatttggatgacactatcttatttttggctgtgttctttgatgtgagttgacaactaatctatgttcacagaaaacagagtgacatattatcacatgattaattaagtataaactaaaaacttaacaaatggattaatacgatttttaaaacaacctttatatagaattttttaaatattgtttaacatttttaagtgtgcgtgtggaaaacgagagattgaaggttgagaaccatcacaaacgaacttaacattagtctgtcttagaatatttatagtaaaatcgtaacggatttacttagcaaattgcaaaggatagacaaatgtcaaacaacttgcaattttttttaccacaatttaaaacacatcgattgatagctacctgacgagactaccctatcaccagccagtccagcccctttggctgctaacccggtcaaaaaaacgatcaaaatcatcaagtacaggggacgatcgttcagccgttctcaccaaccaaacaatgaaaagaaaaaaaaaagccacaaatgtcaacgtgtcactaggaaaagtcaaaataattccctcacttttacaacccaatcttgtcgcttataattatgcatatcagccaaaatttaaacttttaactttaaatttggagttaattctaagaatttttaccgaaatttatttttcagtctttatttttagatcgctaaaaatacgcatataaaatttatattcacaaacaattttcagtttgtgaatatatgtcctatggcttattcaacgacagggataatcctcccacgattttatttcattttcaaaaaccgcgccggcttaccgggcggcgactcgacccgccaacccgcctccacgcctacggagactgccacgcgggccccacccccgcacaccgccgcgaaaaagcttctcccccgggcccaccaccacccccccgggctaccgccgctgccgctgccgttgctacgcgtcccccgacaacgtgcactccctcttctcctctcctctccaattcgtctcctcctcctcaccacgcttgcttcgccatcccgcctccgcatcacccgccgccgccgccgcctcctgctcgtggtcgcggctgcgttgccggtgctgcaggaggtgcttcgggggggagatctcggtggggt

SEQ ID NO: 8793 - DNA, 12198 bp, Oryza sativa
  unsure (1)..(12198): unsure at all n locations
gaagggaaggcggcggcggcgtctctaccgaaggagcatctcgccggcgcgtcttgttcgtccgccacgtcgctgtacagacatcaatgggggcgtccgtcgccgccgccgccggcggccggacccaagatactgcctcccctgcacctgctgcagcagcagcaagcggcggcgtccggctcccgagccgccgccgccgagctggagcaagagcggaggaaggccgccgagctggtgcacatgctgcacgccgtcatgctgcgcgacagggcggccgacgcaatgccgccgccgatgccgtgctactacgcgccgtactaccaccacggcggcggcgtcgccccgacgaggcccttcgccggcgccgccgggttccacgcgccgccggcggtgagcgtccgttcagtgatcccggtctgcgccgcgccaccgtcgccgcggccgccgccgcgcaaggaggacgatccagcgacctcatccaagagggcgtagtagtagtaaaaactagtatccaatcaatcgcgcagcctgctccgatctgaagacgacgacgaggaagacgatgagagatcgatgggtagccatgaactctgcttcttgcaggggaattttgatcacaagtctccctgtatatctaaatcgttgcaaagtgatcagcatttcttcttcttctcatctctttgctgctgaaatcttcagaaaagaagcagaccatgaaggattgaagatagttgaatatagctcgatcgatcgatctcctagggcttcattagaagccatccatccatgctttgtcgcatgaaaaattttaagctcatgagaatgcacattacatttctttcccttgttcttaatctgctcattattcctcttttatttactactttataatcgattaaaatcgcatcactaacacaaatccaatcagatgtaaccatgctgctgacgatcgatgcagtagtaattacatgtatatataatccggtacggcgagatcagagatcaactgtgagcagggtaaaaacgaacgaattattactatcatctcatgaagaggaggttggcgaggagacaaccaatcaaggaagaagaagggtacgcatctcatacgctgcgttttatggcgatcttgactgctgagcgaacctgcacatgccaaccccccgcaatcaaacgcacaacacgtccaaatcatcaacccatccatccctaaacccaaattaatcgatctcacaaaagccctaattaattattctctcctctcttcttcaaccaacaaccagagttgttattacagcagtagatacactcaggtctagtttagttctctacttttttttaaaccttcaatttttccatcacatcgagactttcttatacacaaaaacttctaactttttcatcacgtcgttccaattttaatcaaactttcaattttaacgtgaacacaccctcatccatgctactccaaaccaagaaagcaagcaaatgttgcaagaacacagagatgctgatgcagatgcaacggcagcaaagaatcaagattcaagaatcaatccgatgaggaggagaagagagagagagaggacatgtcttgacattaatgggcgtagcgcagacaataaatgggggttcagaggggggaggccggcacggagaggggggagagagatggcaggcaggcatgctttaatggcggcctgtgcccattcagtgggcactgtcttcctcctccatctcccctccccccatcaccacactagttgttgttgctcatcaccacactagagagagattgagagtcatgagagacgatgcaggcacaacgatggggatggatagccaccatagccaaagcaataccccaatgctagctagatacagtagatacagagatcaatcagagcaagggctcgtttgaatcaaagaatttatacaaatcatatgaaattcctatgcaataactcattgcatatagattttgaagaaaacttagcaagagtttcaacctcttacaaaatttcctttgagtatatttctctactgattcctactccccccggtttcattttaattgacgttttggataatgacacggtctacaaaatatatctttgaccttatttttctattataatatacacaataaataaatgcatgtttaattttattatagtgttttgaaagacaaatctatatatattgttccagtttctttaaactaaatatttttaaagttattgatggtcaaatttataaaaacttgatttcaaccttgtccaaaacgtcaattcaaagtggtctaatcaaatatgttttgcaatcctctattctcacttgtatttctgtctgaatcatgtgcttttcctattgcttctttttttcaatcatgcaattcaaaacaaccctaaaccttaagcccctttgaatcgcatgattgaaaaaaaaagagaaataggaaaaaatacagaattttgacaggaatgcaagtgtaaaatagagaattgcaaaacataggaatgactgtttaattggatcgcaggaaaaacacaggaatcaaatgagaaaaatagacacaaaaggaaattttctcatagattggagctcttgctaagtttcctccaaaatctatatgcaatgagccatttcatgggaatttcataggatttaaaaaacttcaatcatttgaatcaaatggcaacataggaaaattcctataggatatgaatcctatgaaatttctacataaaatcatttgattcaaaagagccttaaacgactaaacagtgtatttcgtgctaaaacttttttctatatataagttactttaaaatatcaaataaacataattttcaaatttgtaataattataagtcaattaatcgtgtgctaatgattttcttgttttacgtgccttaactttatcttcatcaattttaagcacccctctcccacacaacacatataaatggaagatggaagaaacaaaccaagaaagaaaagttggttttagttgtcttcgaattgttaattggagtatcgaaatagattatttgcttcacatttagaaaaaaataactcttttcttaagaaaaaaacttggttagaccatttgttttgaacttatttttagcaaaatatttaatttatccttataattaagtatatacctttagcaataatttgtacaacagtccgtttttaaacaaaacattagccgtgtgttctacggttcctttttattgaatgactgaacatatgaatgatttgtgataattgtttaagagtactactgtttctgtaaaaaaaaaaaactcaatctcgtactatgataggttggtttttttaaggatgaagggagtacatatgaatgaattaacttatcataaagtttaagaattggatttgaaacaatatatagaaaggttttatgaaaattgtactacctattcatcaatccannnnnnnnnnnnnnnnnnnnnnnnnnnnnnntttatctgcgaaagaagtgtctgaattgattatctgtacaacacaaggagtaaaaaaaatcgcggtaaaattctcgtgagacgatagaacggagtagaaggaactggagcatgaaaggacgagtgaaaacgaacggaactgagatcaaatgtcaagtaaaatggacgcactggctgtacgtgctcggtctagcttgattttaattttagaatttggttttaatgttcatttcaggtaggcaaagtcatatgtacagtatttttcatgcaaatattgaatgctgccatcggttggcttattagcaaaataaaaataatttatggataaaaatataatttaaaaaccaatctatgcagaaaagaacacatataaatgcagaaaagccttatttttatatgtctgtatttagcaatttaaaaaccaatgctgaaaaataattttgataaaaattataaaagatgtgaatattatggaattacctaatatcaaataattaaaagagatgaggtttcaaatctagatcgtctagcccactaccttgtgaagctagtcgaaagactcatatgcgtttctcatttcgataaaaatatcaaaattaagttttaaaatttaaattttggaagcgtttaaaattcaactaaatatgccgacgaatggagttttagatcttttgcttgtactgagtactctggagtagtacgtaatctgtttgtgaggatattttaagcaagcatatgattgctcttttctcaagataatgaccatcaattctccttttggcattgatccctccctcgtatcctgaaccacaacacatggcaccatctgcttggagtaatctacaagaggcgatcgaggctgcgacctacaaatcggcgcgccatttttaaccacttgttaattttactcttcctatgcacccacgcttaattttagttgactactgcctccatttcaaaaaggcacagtcacccttaacctggttaagacaaaaaaaaataattattatcatctcatagtttggattaccctaataatagaatgcatgcacccaatataattaaagatcttaatggtagaggatttaaataatacggagtaatattttagtgaaaaagaggtaataattaataatatgcatgcatagacgtcttatattatgaaacaactttaaaaagtagttgtttcttatattatgtaatggagggagtactgaagtactccattcgttcctacacctagtatagtataataacggatcaggtgccacattttgtagtactccatccttccaaaagtattttggaagccctttttctttttaaccaagatctagttaactataaaaccaatgaacatgcaacctataactactaaaatggttttttgggtttcgataaaatatttaacatagcacatagtaactataaatatgacttagacttttggaaaaactaaagaatgaaatatgacttagacttttggaatgagagagtatagtactaacgaatatggcatttcgtagtacaacaaatctggacaactacctattcatattcattttattatgaaatatcgcatccgattctaggtacacttatattgggacggatggagtattaaccgttatactctgtattcttttgaagggattggaaaacccctaccctccacacataaaacggaacgatgaattatgattaattaagtattagctaaaaaatttaaaaaatatatcatcaatatgatttttatagaaacttttctatagatttttttttgtaaaaaaccccgtcgtttaatagtttgggaaacgtgtgtgctaggaaggaggaagcggaggttggaaccagttaagaacacagccaattcgtccgtttctacatttcgacttagctctctccacaattatcataaacagtttttctaactgcattgctttctatttaaaagcttatttaaataatcaaataaatatttttttaagtttgtaataattagtatttgattaattatgtactaataatggctcatcttgtttcacatgtcgccaaaaaatctcatcccacgagctgacctgaactcaacattaatgcgcttggagctaacaagtagctataagaggaaggctaataatacagtcgacttattgcatgtaaggttctttgcagccttctctcaggccacttaaattatagttagctctttaccattaatgtaggactcacttatctctctcacagagtttattgtttcttgtgccaagctggctgtaaatttatagcccgcttctcctctttctcctctcttctcctctctacctcagtactccttccatctacttttgataggcatatttctaaatctgaaaattttatttttgataggcatatttcaatccaacaacatatcatcttaatgactttctcagatttaatgtgcgactctccgttctttcacacaaaattggttacatgggcatcgagaaatgtaaatattaatgaattgtttatttacaaggaatgactagtagcatgtttaaatagatgataagtaaaattacttatcctttgtctgtgtgccaagataaaatataactatcaaaagtagatggagggagtattgctctaagcccgtattaaagctaaaaagtagtataatacttagggtagcttcaattttttctctctttcactatgaacttaacaatgcatctatttgaagcatgtgtaaagttaatttttgcataagagccaacatttcatatttttctttatcttctcactcacataagctcataattggcttatagtcaactattactagttgaaaccccgtgtattgcagtgggatattttgttaagattggtgattgggatgaaaaaaatccctcattattgaattgggcgacgatcaaattagatgggcctcccatggtgactgtgtgaggtggattaggatgtgttttttcatccaacggttcagagatgatcaaatctactgatccaacggctgagaattaacgataatgtagcacatcgaggtttgaactttagaatcttaattgcagttagtgggtcataactttacagtaagaaggggttcttgcaacaacaacatgatctccaaaacacaattctttataatttttagaaaataagtaaatatttaattttataaaagttttcttcaaactaaatattttaaacattattaatagtcaaggtattactccctccatttttaataattgatagctataatttgttcccatttaaacttggaccactagttacaatttaagaacgaagtgagcaaataaaatgtttatttttagggtaataacatggcttaaatattagaagaagaagacaagcggtcttagtttgaaagtgaatattccaaaaaaaattatataaaaacggatcttttaacctcaatcttattcaacacaataatagttattgtcgattctataaatcggtaatgagaaaagtgagtagcgcacgacatctaaaatggatgagtaaagagacggatttaaacaggttgagaaataataccttactcccgatttcgggattgtatccgccgaatattatattgatatgatgatattggtgttcctatgctctatactttttatgtaggttcgagggcaaagttacaaagggatggattttcttattaagttattcaaccgtataagactaatactacgggctatgccttcgaatataaggtaatacaatgtctaaattctaatctatttacatacttcagtcggataagctttccgtgggtatatatacaatgtctaaattctaatctatttacatacttcagtcggataagctttctgtgggtatatatgtaacccgaaggtggccttgtttagttctaaattttttcttcaaacttccaacttttccatcacatcaaaacttttctacacacataaacttttaacttttccatcactacgaaacgaatttattaagcctaattaatatgtcattagcaaatatttacggtagcaccacattgtcaaatcatggtgcaattagacttaaacgattcgtctcacaatttacacattcgatgtgatggttgaaaagtttttgtcttgggaactaaagcaggcctatgtataccaagtgatgttcacttgtttgtcagccatcaccaaaagaacatttacggcagttgaaccagcttcagaatctctgcagttaaatatttaattttataaatatttcttcaaactaaatattttaaacattattaatagtcaaggttgtactccctccatttttaataattgatagctataatttgtttccatttaaacttggaccactagatacaatttaacaacgaaatgagcaaaaaatatttttatatttagggtaataacatggctttatatctagtttttgtaaatattagaagaagaagacaagtggtcttagtttgaaagtgaatattccaaaaaaaacaattttataaaaatggatcttttaaccttaatcttattcaaaacaacaatagttattgtcgattctagaaatcgacaccgagaaaaagggtagcatatgagatctaaagtggatgagtacaaagacaaagatttcgacatattcagaccttctcgatgagaaataatacattatttttattttggggattgtatccaccggatgttgtattggtctgataatcttggtgttcctatgccctcaggggactccctccctaggttcgggggcaaggttacaaaggggaaaacctagtcagacatgatatggattttcttattcagttattcaattgcataagactaatactacggactatgccttaaaacaacttttaacactcaagacttatcctaaaatataataacttctccaccaacattctgttccaaccaatcaccactatccatcattcgctttttccacctacctccatttcttaaccaatcacgacctctccctatttaattctacctactttcttaaaaatcatgtctaactctaaaacttcttatattctgggacggatgtagtaatatacaaatctggtccacctcctaccttcagtcggataagctgtccgtgtagatatatattacccaaaatctccacagctatgtaacccgagggagaactagcatacagctgcgtgtgttgtctcgtcatctaggtggtgtttggttgcaaggatgggatgggacgaacccactttgaggagtatttggtttatgggttagtgggttgggttggtccctaaagaggaatattcctctcaaaatctaggaccaagccatccggtaaaatcaaccggacgagctcgtcctacctagacggagtacacgacgtcagcttgtctctacatccgctggcgctcatccgtgctgtctgccacctccgcaactgccgacgcctctctgcaagcggccgccacctctcctccacgaccctccgccacctctcctccacgagcggtcgacgaccctccgcgacccactgctgccgaccctccgcgacctgttgccgcttctcctctgcgagaggccgacgatcctccgcgacccgtcgtcaccttgtctccgccgcctctcctccgcgagcggccgcctcgcctctcctccacgactggtcatctgccttctcgctcgtccgcccgtctgcctgttggtcgccaccactcctccttccgcctgctcgctcgtgcgctcgtcgagtcatcggccacgccgtccctcctccgcttgctcgctcgccgagttgctggccgcaccgctcccaccagcttgccgccgggatcgaacgtgggttgacggtagccacaaatggcgtccatcccatacctccctcatcctttctaccaaacaaagaactgggatggtctcatcctatgaaccaaacatgcgagtagaatcatcccatcctaaaaatcagggatggtttcatcccaccccatctaatcccagaaccaaacaagtgttgttcttggctttgatgatgtgccgattaattttccaacgactttcggtactccaaatactccatcaatgcactggcacgccatatcgggggtgtttagatccaggggtgtaaagttttggcgtgtcacatcgggtattatatagggtgtcgtatggggtgctcggacactaataaaaaaactaattacagaatccattagtaaaccgcgagacgaatttattaagcctaattaatccgtcattagcatatgtttactgtagcaccacattgtcaaatcatgaagcaattaggcttaaaatattcgtctcgcaaattaatcgcaatctatgcaattagttatttttttagcctatatttaatacttcatgcaggtattaaaatgttcgatgtgtcagggtaaaaaattttgggtgggatataaacagggccaaagccaaagtctgaactttcgaaatcttctctcctgcatctgcacaaatgtgacagtttttaattatacatgctttgactatgactggtactagccgggagaagaaaggagaagagaagatgagagcaagaactgaactgttccaatccaaggccacttggaccctgccttctccagtcgtatctggcgcaggtggcgatccttgatgatgatgaatcggtgacaaccttgtggagatttgcagtttgcagatttgcagatttgtgatgatgatgatgatgaatgtgagcttgagtaagttgagtttgcagagcagcatagcatacggccatggcagctgcatactccactatgcacaagttcaatgcatgcatttacaaactcctcgtaccccctgtgagtgtgacagaagaagagggaaaaaacaaggatgcaatcttgcattcttgcttcttgtccttgtccaggtccaggtccaggtgcagtgatccatcagatttaagacattttgttaccattatcatactagatgccataccattgttttcatgaaattactccaagcagatgcaactagtactagactactagtatgtataccaagtgatgttcacttgttcgtcagccatctccaacaacatttacggcagttgaaccagcttcagaatcactactcctacctgcagtagatgccatttcagatagattggcaatcaattaagatggccttttggccgctcaagaaactgtgtactaccaatgaattgaatgcagatggaatttctcgcaagatcttcagggatatgttcagtctgcatcggaggggagctgatcctgcacagtttctcaattcttggcatattagtagaagtagattactagcagcggcatcgacgatcaatgcctttgttggcttttttttttaatacgcaaggagcgcatctttgtattaagaaggaataaatatatgtacaaagcgggaaaaaaaacaaagcgaaggggacagggtacaggaggagaaccaagaaataaaagcctaatctccaactaaattttgcgacccttctccactaacatgagctaccaaaacggggattgcagctctagctagccgccacagctccgcttcacccgtcataacccttgcaacctccgcccaagttctgctcttctggttgaagactcgattgtttctttccttccagatcgtccatgcaaccaacgtcacgatggtgtcgaaaccccggcaatgttccttgaccatcttcttgcgacagtcgcacaaccatgagaggaaagagtgttcattgagcggtaagcactctgaatgcccgatagctctgagcgcaacccaccacagttgccacgactccgggcatgcgaccaagagatgatcaattgtctcttcgcattgatcacacaaaacacatcgatccgggtgcgacaaaccacgactccggagacggtctgctgtccagcaacggttaagagctacttcctccgtttcataatgtaagtcattctagcatttctcacattcatattgatgttaatgaatatatatatatatatatatatgtctagattcattaacatcaatatgaatgtggaaaatgctagaatgacttacatcgtgaaacggagggagtaccaaccaaaggaagtagcgacagcgagggggtgccaaagattgccaaattagcttgtgctggagacgagttcttccaaaaaagagaacacgagaagccgagcgggaagagtattctcctgaggtctcccaccgccaagatagagagtccggctcttcggaaagccgcactgaccgaaggcaatcccaaagcttgaaatactccaggatcgcttgaatacccaacgccgaactgatgtcctggatccatcttctgttagtcattgcctcggccaccgtgcgtcgattccggagatgggcagggattgcagcatagacagccggcgctagcaaccgaatggaggaaccctgcagccagcaatcctcccagaacagcaccgaattcccatcccctaccaagcataccatagaaatcgatactagattgcgctccttctgcgagaccagaatactaagcccttgccacggcttttccggtgaagttctctgctgccagagccatcgcgacctcaaggcgattcccaacctctctagatcaggaatccccaaaccaccatactccttgggcgagcaaactcgagcccatgcgacccgacagacgccgccgtttgcat

SEQ ID NO: 8794 - DNA, 15846 bp, Oryza sativa
gccggcgcggtgggtgggtgcgtgtgggcgtggaggtggcgcgccatggcggcttcgatttgtttaagcgaacgcgtggagcacgagggcgacgtggcgcgctctggatggcgccacgtcgcccccggtggcgcaaaatatctcgcgcttttttttcttccgccgagctggctgaggcggggcccagtaggttctcttggcccatatcagttttttttgggcctgacggattgacggcccaggagcccagttaagaagatcactaacggcccaagtcttcataataagaagagaaattataaaaagtataaagaaaataaagaaaaagaaaaacacaaacggcccagcgaaaagtctgcacggaaatgctttgggaaaagaaagaaaatattagattccaatgattgaacaagatctagcagtggcagcgacaagggattatgggcttgactaaaggatgagggaatgatcaattgaggtcactggtgacatccaaatcccatttttgaaaaaaattcccctgtttttgccaaagcaaaataatgggaagaaatttcgtttataaaagtttgggactgtgtagcttccagtctcctcaaaatacctacaaatttcactcactcttagaaagccaagatctcggcttctattttgattacttttacgaaatataaggaaaattaagtatacttttttgggtgaatagctaatttaatctctcaagtttcaccgaaggctcaatttggttcttcaggttttattttgtccacatatatcctctaagtatttgttttggcttaaaatcatccttaggctcacttaatagttaatatgccatatggctatttctagtcaacaattctgttagaaaatgtctcttttgcctgtaatttgtatgcaactataaactagaaaagtgaaaaccaagataaataaacaacatttttacttcccattatttcaacatgtgcatatgaaacttagtctaatggctatcgtatacacttgcaagtacataatttatttttgttttacataaattgctatccattatctataaaaagaattcattgcacgcaattttttctcttatatatgtgaatgagggagtataattgtcatttatcaatagagttgttggttatgtgagtttaaggataagtttaaattaaaataaaaacttgaaggactaatatggacagattagaacatcaagaactaaaccgagcctcgcatgaaacttggaggaccactttgactattcaccctacttttttcaaaaatgtcgacacataatcaccacttccttgccacttgaaatttgaaaacacaactatccacatacgttgctcctgttatggaatattatctcccaatgagataatatcctttcttgtattataatctaaaccgaagtatagataagatctatttcctcctaagacctccctatatatacagggacagagtgagatatctaaggttgatttgtactccagataagatttataatgaaaagagagctccaccctacatatgtgttcattgtctatttctacaatgttttctgagggcaaagggaagggcacggatgttctatatcatctcacacgtctactgttatgggagctgagggacaggaaacggatccgtgatccgctaatgaacgcgttgatttacaacaactccaacatttcgaatcaaaggtgggggtagcttagcaatggtagcatgatgggccgcaggaaatggcgggaaagataacgaggaacatatcctgcgccctttccgataatggaaaaaaagagaccaaaatgggctcgcaggatcggatcggatagcagatcggtcggtggtcagctcatccaatccaatttctctttaattctgcaactgcgatcgctttcagtgtcaacttttgcagggtataaatcgggcaacggacggagatcttgccagcccaaatcaggaaagtttctcagcgagctagcagctatagcttagctggagatcgatcgagaggtagaagaagaagaagaagaagaagaagaagaagaagaagaagaagaagaagaagaagaagaagaagaagagaggcctcgcatggcgatgagagctcgcatctggtagccaaggatgacttgcctgtgtctctgctcatgtgcagtagaagaagatgcatttctagctgctttctgcatatgtgatctcacaggcagtctccttggctagcctgagcggctctcatccttcatgcctggctcatctcttcttaatgatctcttattagtcacagatcctgtagagattagttgatgtttgatgcttgtccacttcagtgccacacataaacatagcggccgtgatcaactgatcagtccagcctgacagagaattcagagagcatgacaagatcagcttctgacaaaccgcgcgagattaaccaacaaatgtattcagggagaatatctgaattgcattgcactttgcatgatcgggacattctcgttaatttcataattaaaattcagatgctctctctgtacgtaactacgtataatactaatatactttgctgaattgctttggttcttatttgatgtgtgcaggcaggcaagatcaagactacagcggtgcgtgcttcctgaactgcctgtggacgaagacgaacagacaaagctagtgatcgatcgatgctctgacgacagccactcctgcaggctgcagcttatgcactggtgcatctgctagatagagcctaggagagtaggaggatgcacttacagagagacagaatgtgttgttctctgcttaatttgttagttaccacactgtttaattcctctgttcaatgggaaacttcgtttagggtgtgtttagttaacgctaaaattaaaagtttgattgaaattggaacgatgtgatggaaaagttggaagtttaaagaaaaaagttgaggactaaaccaggccttagtttgttcctagtactgcatcaaattttgaaacttttagggcctgtttagttcccgagagtgtcacatcggaagtttgaccagatgtcggaagaggttttcgaacacgaatgaaaaaactaatttcataactcgcctggaaaccgcgagacgaatcttttgagcctaattaatccgtcattagcacatgtaggttattgtagcacttatgactaatcatggactaattaggctcaaaagattcatttcgtgatttccatgcaaactgtacaattagtttttgtttttatctttatttaatgctccatgcatacatgtgtctaaatgttcaatgtgatgtttctgggaaaaaattttgggaactaaatcgggccttagtcagttagtcctcctgtgtcatctcatagacactgaaacttgtgttacgccaaagcaaaactatcaaaagatttataaagaacaccttagtacgcctcgatcatggagaagtcaatttagggcagttggtgaaatgaaaattttatgatgtcacatcgaatgtttgaccagatgttggaaggggtttttggacacgaaggaaaaaactaatttcataactcgcctggaaactgcgagacgaatcttttgagcctaattaatccaccattagctcatatgggttactgtaacacttatggctaatcatggactaattagactcaaaagattcgtctcgcgattttcatcataaatgtacaattagtttttttcatctacatttaatgctccatacatatctctaaagattcgatgtgatgtttttggaaaaaaaaaattggaaactaaataggcccttacaatgtaaatgcatgtacgcctatacccctattgtcttgtttgctttgagatttgtgtatgtagcatagatttcaacaaatcacaatattatattcctccttttagtacatcacgaatttcaataattcatcaaatgcatccaaatatagggcacatacacacttgcgttgtaaaaggtatgttccctcgacaattaattccacgcacaagagaaatctctaaccatgaagtagtgagaatcaactatgggggctccctcgacaattaattcgaagcacaaaagaagatctctaaccatgaagtagtgagaatcaactatgggggctccctcgacaattaattcgaagcacaaaagaagatctctaaccatgaagtagtgagaatcaactatgggggcgtttagatccatggtgtaaagttttgacgtgtcacatcaggtattatatagggtatcgtatgtggtgtttgggcactaatgaaaaaactaattacagaatctgtcagtaaaccgcaatatgaatatattaaacctagttaatccatctttagcaaatatttactgtagcaccatattgtcaaaacatggagcaattaggctaaagattggtctcgcaaattagtcacaatatgtgcaactagttatttttttagtcaaaaacttttaactcaaacttaaaactttcagcccaattgtcaaaactttcatctcaaatttaaacaacttttaactcaaaactcaaaactttcatctcgatgtctttgcgtttccttcacataccaagaaatggtccctgaacattggattgaacattgacagcgggcaattcaaggaggtcggatacggatcactctcatggttggagagattttacagtcattgagagatatcacgaggtgtcgaggtaccaaaattgttagttaaaaaaaattctgcatcacagcagaaatgactactgttttttttttgtctgagctctgaagcagcagtttactgcaagaaacagcagctaaagtacggcatcacttgaacacaaccattggatttcaatcaaacggttcgaaagaacctcttgaatgctcatcctctgcacttagaccaccaaaagtcagaacatagagaatctgttctcaataacaaccatccccactacttctacaagcatgtcaacaaaacctgatcttattcagatcttgaagggcatttcgagtgccaatcctgaacattatattcgttgcaaaatgtcaacgagtgatccttgccaggatatgcacggaccgtgcatatattccccgctttccaaattgggcaagattgaaaaggcgccttcagggcttgaaccgaatccaatccttgtaatttgtaaaggagatcaggagagtggatcaaattattcgatgctgcatggacccttctctccctgtcgagatagatagatagatagctccgttagcttcttccattcatggctgtctctcctgcttcagattgctataaattggccatgaacttgcagtgtttttttcacacaaacagagcccaaacacacacaagaggagagagatgaaatatgataagagtctgtctagatagccaaggatgacttgcctgtggcctcttggagagagaggtgtagcttaattagcagcatggtttgagcattgcttgatcggttgatcgcttcgcttgctctgcatgagatcttacaggcagtctccttggctagtctgggcggctcttatccgttctagtacaacataggcattaggcagcattgcagccttgcaaagtgcgaacagcagtcacctttgcagtgttgaagcaatgccacatataaatttagaaattttctcatggtttatatggttaattatagtcgttaaattatttgggagacgaaactgtcacatatcacaagttatatttattagtagtagtgattttcttatggtccgaggttatattaccatattttcgcaaaaaagaaaatgttcctctcaaggaccgtaaaatttccttgcatttatgttttttgaacttctgttgatgatatgcaaacatataccaagcaattctagagatttatgtgttatataattgactcaaaacaagggtttgttcagcatttaggaaagaggttactcggcggtatggcacttgctgtgaaaaccaagaggttaaggttacctataaaatcgagagggttacacaaacacccgtgatatcacaaaccctagggttgtagggcaataattatgggggtatgggtattacgacgtcaatctgtgttatctgaactctaggtgaagatataatttagagcatccttagtggttcatccaaatctgatcctccatatacttatttggatggtcatctaaaaaagattctcactctgtatcccttttcactccaaccgatcatccatactacatccttcatatcacactctcttatattaacatctttcaactacccatacatttgtactatttttttcgtaatagctaaattttgaatgactaaaatttaacagtgttatttgtagtggattgttttaaataaatgactctatttgaatggatatatttttgataggtaattttttaattgctatatttccaacggattggtattttttcaaagactaagttgtaacggcatattgcatatagccgaggaggagaggcgagtggctaggcgttggcaggtgcagacggccgacgacgggagccacatggcgcattgggcaagggtgggagcaggcggtagatctcggagcaggcaggcgtaggtggctgacggcaggagttggcacgagcacggaatcagggccaacacataatctatccccacctctaacgtagtcttcataaaaaaaacgttggaaaggaaggtgggagcgggagcttgcaagatggtgcacatgctatttttggaccatcgggtggagtatttgctggagcctggttttcttctcaagtaagctattttcatgatggaggatgggatgaagtatcttctaggaatgatcttaagtgtagcacgtagtattttcctttacattttcatgctttatgtgcatataggcacacatttttactatcgcacaaacatgatagagtagagaagatagaggaaccatctataaataaagtagagaaactacactagtttaaattaacacgggtttttactatcgcacaaacatgatagagtagagaagacagaggaaccatctataaataaagtagagaaactacactagtttaaattaacacgggtaaaaacttacagatacaagaatctttgaatttttttcaagcattgcactacagataaaaaaagctttgaatttaaattctggcactgcagataaaaaacacatgctacatatacaagaatctttgaattttattcaagcattgcactgtagataaaaaaagctttgaatttaaatgcaatcactacagataaaaaaaactttgaatttaaattcaagcactgcagataaataaagaaataaatctttgcatttaaattcaagcactgcagttaaaaaaaactttgaattttattcaagcattgcactgcagataaaaaaaagctttgaatttaaatgcaatcactacagataaaaaaacctttgaatttaaattcaagcactgcagataaataaagaaataaatctttgaatttaaattcaagcactgcagttaaaaaaaactttgagtttaaattcaagcagtggatataaacttcagatacaagaatctttgaattttattcaagcattgcactacaagcactgcagttaaaaaaaaatttgagtttaaattcaagcagtggatataaactacagatacaagaatctttgaattttattcaagcattgcactacaagcactgcagttaaaaaaaaactttgagtttaaattcaagcagcggatataaacttcagatacaaggatctttgattttattcaagcattgcactacagatttttaaaaaaatctaatttaaattcaagcataaagcataaattaaaagcactgcagtttaaaaaaactttgagtttaaattcaagcagcggatataaacttcagatacaagaatctttgattttattcaagcattgcactaagattttttaaaaaagctaatttaaattcaagcataaagcataatttttttaaaaaactaatttaaattcaagcataaagcataattttttttaaaaaaaatctaatttacattcaagcatgaatttgattttattcaaacattgcactacagattttttttaaaaaaaaataatttaaattcaagcataaattaaaaaaaatataatatctgatttaaattcaagcataaatttgattttattcaagcattgcactacagatttttttaaaaaaaataatttaaagtcaagcataaattaaaaaataaatgcgttagaaggagggcttgaacctccgaccttgtggttaacagccacacgctctacccaactgagctattccagcttttgtctcttaaaccacatccaccattttctcctttgatttcttcatattgggccagacatgggcgcacgcgtacgcatgggctcctttctcgctggaaataagttcgctttatatccctcatcttgacgtcgagtttgtattacttccttaaccataatgccagatataatgtatccgttaacttacaaaaccgtattaaccaaggtcttagggtaatattatatctagtttggctgacatggtgagctgaattagtgtgggaccacacgggtctaacatgccagcgaccggttctttcttcctcctctcttcctctctctctccccatctctagagcgacgaccaacggagagaagggcggtgcgtggtgagcatcggcataatccgacagtgcgatgtggccagcgacacacttgccgagcagcaacgcgtcctcccactcccgcgcaagcaatcactccagcccgacgtaggtggaggtgttaacctggttttccttggcggagtgtcgcttcctcaagtagaaggcgttctcggtgaagcaacggctacggatgtgaacgtaggacttggcctcgcgtcgcacgtcgctgttgccctcgatgcagccacccgacaccttattgtgtttcttctcgtagccaacacaagatttttgatgggttacatgtggtccctccgtttcacaatgtaagactttctagcattgcccacattcatatatattagacatatatatatttagattcattaatatctatatgaatatggataatgctagaaagtcttgcattgtgaaacggaggaagtattgtccacattcatatatattagacatatatatatatatatatatatatagattcattaatatctatattaatatggataatgttagaaagtcttatattatgaaacggaagaagtattgtactattgtggttcaaggatggtttttaaactcgcactcaagtgattgagggatctttggtgaacttattcctttctcgctgccccgagcggagcagcccacttgttgggcctccaccaccgccggtccggcccaaccatcccggaatactcgttgacatcgcgatgcgtcgtcgtcgtataataccacagatacgaatccgctcgccggagtccacggggagatcggagcctgcaaggcaagcaaccaccgccgccgacgacgacgacgttgacggcgacgaggagacgatgagctaccagaaagtgccgcctcctcaggacggctaccctcctccaggcaattccccccttccctcctcccccggatccatccctcgccggaccgggataatcacactgcggcggcggcaggggctttcttgatctcagcctccccctgttcaggatccccattctgttctgggttgatttggatgcgtgtccgaaatctgaatctgtgacggcgcagcatcgggtgtcgccgaattcgtgcccgattatctgatcgatttttagggtcgttcttccgtgatttctctgatcgattcttgggctgtttgtttctgtggatgcagggtactcgcagccatacccgccgccaccgtccggcgggcagtacccacctacgcagtactacccgccgccgaaccagcctcctccggggtaccagggctacttcagcgaggggcagcagccgccatactactacccgcccccgcatgatccccaccaccaccatggtcaccaccaccaccacgaggaccatcaccaccacggccaccaccaccatggccaccacgacgatgactgctgccttggcttcctcagaggatggtaattcaaagctttactccttttcatttcttgccaatttcgtgtgaatactttatactttcggtgctcgtatgcgttgttaatcatggatgctctattgctctgtgaactacaagttcattgtgtgttgctgtctttggtaaatttgtttcacagaatgaaatttctaaaaaaaaaaatgtttcaaagaatgaagatctggaacaaatgtaaaacatagacttagctcagcaatctgattatgaatagacttatattaaaaaaaaacttaaatgaatgactgattttacgatatcggctggtacctccttgatgaccatgtaaaatctccaaacaacaacatctctaccatggtatatccattatagaattatatattgcttgtgcatctttggatagttaatactttaaacatcggaatcaattaaaatttctcctcaaagataacttttcgatgaaaactgtgcaatataaataaaatcatgctagctcagctgtactgtactttgatgaagtgttaattataggccaaaagaatattcagtatatggtgtcatgggcaggatcacaagattaataaattgctttcttgagtactgaggttctgcaccataaaaaatgtattgctgaatgctgagctgattggatcacatatgatctgaaatacttcttgtatgtccttcgaagttgtacatactccttcatgatgcagacaatagttgaccttggactgtgacaatttcatgaagctggtttatttttatcttccgtctctatctctatttttttaagagggatattcatccatctaaccctccaactagataaaaaccgccttccaaaacccacctcagaagaatcaccgtgacttcccactgaacaggataactcttctccatgtcctctcttgcattggtggagcttgcaggttgttgcaaagggctatctaataaacatgcttagataacttgagaagagaaggccaattagtatttacattgattccattgattaatctacatggtaaaactaatcacttatttagcaacttgccatggccaagcttggccctaaaaaggctctgccctgctctcccggtatggtgaatatttttgtatgattataggaataataatgtatacatgaaacatacaattagctaatactccctccgtcccaaaacgtagtgaattttagagttcaaacattgtcccaaatctagaaacatatgacatgtaaaaggtagcttttgccactaaactatatggactaccactactatcccttagccctattatagtctgggcctacacctcacccatcccaagaagacaaacaagtcatacatgttccgtcatatattctgcgacggtgggagtattcattttgtatcaatcacttccgcgcaccaaaagatgccatttgtaaggttccagaattcgtttttgatatacctgtgtagttttcttttaaccaaatgtacctgtttaagttgatacttttttatgtttgataaagggttttaacagaatgataattaatagatgaggcattttatattgagaagactgctgtgagtagggttcctagcttaaaattgcttaatctctgttttctttttattaggttggccattctttgctgctgctgcgtgctggaggaatgttgctgctgctgctgctgatggcctgaatgctttgaagctccttgttatcaactattcttgaatggaaaattttaagtgtgaatttgattttctgtgattgatggacagtacgtagtgtgcatcttgttattatttgtcaataagtggactctgttatctgtatatgccccgctcaaatatgaaaggtgttcagtttgtttcagagtcaataagctgattgtgctattctgtctgtccatgtcccgaactagaacgtaaccccccatcccaaaaggaaaaaaaaaaggctatcggaagttttctcagtagtagtggattgctgagatagtgtacagtttgtctaaagaatttggggatggttgtagttctaaacttttgtgctattcgagaatcaaaataaacccatgatcagattaaggatgttcattacaaattgacaaacactgattttaaaacgaaaaaatttagaaaaaaatatatttttgtaggaagttttttgacaaaactcagcatatgacaaaatttatgttgtttaattcacaatcagcaatggtttcgtggtgtagttggttatcacgtcagtctaacacactgaaggtctccggttcgagtccgggcgaagccatatttttattttttactctcatggaccgtccattttaagcccagtagcttttaaaaaaatcatgggccggccggccgtcctactgaaagcccagtatcgtatgttgcgtggttcaccggtgacctactcggcccacgggttgatataagccggcccaacccaaaaaactcttacttctgttgcctcccgaagcatctggagaattggaagactggaaggccgacctgccgctgccggaaaaccccgccccccgcgccgccgcttcgatctccggctcccctccgccacttcccttgcctcccccacctcgggtcggccagttcctcctcgcagttgacgagctacctccggatcgagggtgcgatcctctactctcttttttttgttctactttcgcgagctgatgaaactcgagatgaatccgcgtatacggcactcttttacgtttttggagaaaatttcacccgatttgattgggttagcgattctccgtggggttttgagcgcaactagggcttggggttgggaggacagttcagggatgatgcacagcccctagaattttaagttaggtgcaatggttaggtcatgttttctgaatttagattttcgtgacgtttttaatgtgagccgatgatagttgtatgtttgagagcttttctgattgtttgatggggaattagaggagagatgctaaatagaagaggggctgcgattatattgttttattcaaaatttggattgtttgatgcaatgaattgcctgcctgttaatttatgaaagatagaaaatgctaggggatgagcagaacgaaagtgctccactgtactgctgcgatttatagtgttcatgcatttggatgttcctagctgacacagacaaactttgaattgcagagaggtgttctcatttgtttggacttggaaactctgggaaaatgttcaagaatacatttcagtctgggtttctatcaattctttacagccttgggtatgcagtgcggtgatctactcgcattttttatatcatacattttctgaactgttggatatctcattctttactgttgtcatttggtcaggaccaagcctttgcagatatgggataaggaaggtgcattattgtttatacttggattctccttaacttcagtcttttactcatgctatactgtagacagagcattgtctgatattcaggacttatctgtcacgatctaaagatatctgcttctgattgttgccagagccagatctgcacatgggcaattcccttgactctatatttggtttgtgacatatgcattgaatatgtgttgtataatctacagagccagcttaactgtttaactaaatctgagttgcttgcccccccccctcctcttttattgaaccttgttcagaaacgaaaatgtgtttccattatcacatttgggactactgttgaccctttctcaaaaccattcacgtgcatagcttaacttcacatggtctctgtgggaattttagtaggggtagttattgatacactgtttatttatccaagtaagggtggaaaacataaactaagtgtgcttcagctgtagtctatgccaccaaaattgattattaaaagctttactataatcttgtttgtcaaacatgctgatctggttatttacctttcagtgaagaattctattctatgtttacttgtttaacgccttgtctattatgcagttgtagatgggcacatcaaaaggcctcaggatgaggatatccagtctaatgtacttgaaattattggaacaaatgtgcaatcgacttacattacctgcccggctgatcctgctgctactcttggaattaaacttccatttcttgctttaatcgtgaagaatcttaagaagtacttcacatttgagatccaagttttggacgataagaatgtccgccgccgatttagagcatcaaattttcaagtatgtataatctggaattcatttttctctctgtaggcattgcgtatctacaagcactgaaagtctaaaactttcatcatgttgttctgcttcataacttgaaagtatgaaatgcttttgttcaaatttgttaattgtcctctcatggtatttaaaagggcttagtgagacgtaggttgactagaagtgatactttacctgcaacattctagttcagacttgaagttaatgttttatactctgtttattcatttgaacagtggaattcatattagaagagttgtttatttaaccactcggaaataagaaaaataatacattttctagatttgaatttgtcaggctcatactgagatagatatcagtttcttgcttcgcccagtcagcaatcagcacatgagtctcatgaacatgtgtcatgcttgcattgtttttcactagtcttatgatgtggttgtagtcttgtacgcaatttgccatgtttcagttcccatttttatatttttgtaccgcatcaggtgcaatagcatatgtaatgtttgacatggccttcttattaaaggtagttttatggcatcttttgtttctgctcttcttggaatttgaaaggtctaaagttgggtttctacttttttgtttctacatgtaatgcatattgacttgtaaccgttactattttccagtctgtcactagagtgaagccatatatatgcacaatgccattgaagctagaagacggctggaacaacattcagttgaatctctctgatctgacaaaaagagcctatggcacaaattatgttgagacactccgagtgcaagttcacgcgaattgcagacttcgtagaatttactttgctgaccgcctctactcagaggaggagctgccacctgagttcaagctctaccttcctattcaggtgagaacaccataccttctctactctgttatgaaacatttgcttgtttctgatccatctgttctaagttgtaaccttttatttgaacttcagaaggcatagaccttggagcaatcatggagacgggttcttgatcacgaaagtagccagccccaggagataccactgcgcgccctcgtgatgactcgtttaacgcgaagctattcacgcgcaagcctgcacgaaacctcagggatcttcctggttgtttgataattgtaggagagtagttagtcgtagcctgaatgagttgccggggtacccactgaccctcatctaatgcactgttactcggtgttgcatcctcccctacaactgtaccggatggtccaactcccatgtttgcaaacccagtagcacctaccgttgtgtttggccattcaatttgcagcgcttttgccatagtatgtgaccacttgtgcgggctcgttttggatgggcatatgtcattgtcaggccggcgcgggcgccataaaatcttactccat

SEQ ID NO: 8795 - DNA, 54568 bp, Oryza sativa
  unsure (1)..(54568): unsure at all n locations
atgggaaatgctagaatgacttacattgtgaaacggaagaagtaattaagatgcagtacggtgagatacgcgactttcagccgtcaatttgttcaggtttgtatctgaatttctgaagccaatgtcctgcgactgggagaagacagatactggtactagtactatatctaacctggaatgaaggggaatttcttgggcaggaagaggcggagcatccccttctgaatcttccagtcgatggggttgatgctcgccgcctccatcttgatcagcaactccccttccttcggcgccgggatcggcacttccacatgctgaaaatttgaaaatccaccagcagcaatctcatcagaattcagaaacaaacacgcagcatatgttcagttcttgtgaactgtaattatcagttggtgatgctggttttttttaccttgaggccttctggtcctccgccgtacttatcgtactgcacagctctcatcgtctttggagcagcgtcggcagcggcagccatggctgagacggagagcacgcaacaccgagagagagagagagagagagaggagatggaaaagctggtgattttggtggtttgtgtggcgatgttgatgttgatatggttggtgtcgtggatggaagtgagccgcttctgtagcatagcaccggcaaatatcagcctcgcgacaacgaacccgcgctgtaaagtttgcctggttgattaccaatatattcctttcgttaaaaaaatactaacctggagtatataagataagatataacctagtataataaatctggatataaacatgatcaaattaaagttagtattttttggaacgagggaatatgcatctcgattgttcaccaccgtgggtgtccatttcgggttgctctgaaagcatgatagtatatggttccgagatgcatggattgtttgttatttgttcatgtcagactaaaaaatatataaataaagctgaatctgaaatcttgagtgcagcaggagattgttgcggatcaatgcatcgatggagttctaaaaacagaacaaaaaaacaccaataacaccaatggacctccggcagttgtcagagcatcaccaacagtctatctattctatctccaatcctatttttttgggattttggttttaaaaaactgatccaacatattcccaaaagagctctggacgttttggagttaccatctccaattttctcggtacgtgtatttgagggcgagagaacgactcccaatcccctccttccacgcatttctcccctccttccgtgtttctcctctccttcccgcgtcggggcgatctccttcggcgcacgggaaaggaaaaaaattagaatttctgttggtagtttaatagaagggcccacttttagttttggggattgaatttaggctatctcttggaggaatgggttttttaaccacctattttcagtttaggaaacccaaaaattaaattttggggatagattattggtagactgttggtgatgctctaaagttcgctatcaccaaaatacttcctccttccctaaatgtttgacgccgttgacttttttaaacatgtttgaccgtttgtcttattcaaaaaatttaagcaattattaattcttttcctatcatttgattcattgttaaatgtactactattactcaagtttttgaataatattcacaaaaatttttgaatgagacgaacggtcaaacatgtttaaaaaaatcaatggcgtcaaacatttagggaatgagggagtaaatgaacaagccacttttcaagtgtcattttaaaatatataatttcctgatagtagggtcgcatggtcacaggtatgcgttcccaaggagtacggtggactcggtgtccctgacttagagaggatgggaattgctctaagggcgcgttggacctggttgcagcgagtttcaccagagaaaccttggctgggtctcaacatcccgtcctcgccgaaggagcgaagcttcgtcgccgcctccattttgtgctctgtggggaacggcgtgaaggccttgttctgggaggatagttggctgcagggagaatccatccgctgcaaggcgccggctctctatgctattatcccggctcgcattcgcaaaataagaatggtcacataagctctgtctgataggcggtggatcaaggacatctccggtgcccttggtattcaagccattcttgagtatttatcctagtggcaagacattcgtgcagtgcacctcatggaccagcccgatgtgctttcttggagatgggagggtcgggcgattactcttcccgatcggcttatcaagcgttgttcctagggagaacctggttccagtctgccccgatctggaaatctctcactccacctcgatgccggtacttcgtctggttagtggtgcttaacaggtgctggacgggtgatcgattgaggaggcgcgggctgccacaccccgatcgatgtgtcctctgcgatcaatgcgatgaaatcatcgattatctcctggtcgcttgcccagagtcccgccaactgtggtggatggcactgagggccattggacaaacaagttctctgccgatgaacgaagtctccttccacctctggctttgcgatagccgaaagagattgaccaaggcagctcggcatggtttcgacaccatcgcaactctcattgcctggacgatctggaaagagaggaataacagggttttcaatcagcagcaaaagacttgggcggaagtggcaagggcaatggccgccgaggcggaactctagagacttgcgcgagcagccattccggagttcttgccacagccaattgtcgagaggtcgcaacatcggttaggagaatagatctttttgggcaattgtattcctgcatcccgtccccttcacttcttgtattttctgtaattaaacttttttccatccttaatacaaagatgcgctctttgcgtattccattttttaatttcctgataaacttgtgaaacaaaggtgttctacaataaatcgtgggcaacagtgatcacatgattgaaacattaggttcaatctttcggaggtactcgtaaagatagagtgtgcgtgtgtgtttataggagtgagtgcacgcgtgtcatgaacgtttacgtttgtaccgtgtttctttaaaaaacattattttcatacaataacagttaaccgtgcgctgccactgaacatactgttccaacatccaacggtatctccctgcgtcgtgctcattcttcttctccgattttgacgacgaccttgccggtggcgtcgctcagcgggtggcacgagtcgacggcgggcttgagcttcccctgcctcgccatggccaccaggagctccatgtccgccttgctcggcgagaacatgaacggcgtcagcctcttcttggagaaggtcaccctgtgcagcagcgcggtggccaaggccgcgggggaaggcgtgatgtcgacgacgacgccgccggtgtcgccttcggcgaggacgcggtcgaacacctgccaggggaggtgcggcgcgcagtgcaccacggcgtcgtacctcctgcccgacgggctccggagcgcggcgccgtccggggtggcgtagtcgagcgcctcgtcggcgccgagctcgccggcgacgagggcgaggttgcgcgcgccgcaggtggccgtgacgcggtggccgcccagcctggcgagctgcaccgcgaagtggccgacgccgccggacgccgcggtgaccaggacgttcttgggcggcggcgcgtcgtccaggccggcccccgcggccctcagcgcctgcagcgcggtcaccgccgcgagcggcaggcacgcgccctccgccgcggacacctccggcggccgctccaccgtgagcgacgcctgcgccaccgcgtactcggcgaagccgccgccactctgctcggataaatcacactcaaaaactgaactcaactcgatcgatcaaaagaagagaaaaaaaagagaaagaaatcaaacttctatcgtaccgggaaattgatggcgatgaccttgtcgccgagctcgaacctgcgcacgccgccgccgaccgccgcgacttttccggcgagatcgcacgctgctcgaccacgtatacacattagcgatcactagctcctgttattcttttagcttgctagctagtgcatcctactatataaaaaaaaaacaaatcctagctacgaatatagacacgcatatgtccaaattcatagctgttcttgaatcttaaaattttacttgctagctagtgcatactgcatactactatatatattaaaaaaagcaaatcctagctataaatctagacataactgttcttgaatcttgaaatcttaattgctagtacctggaattgatgggaacttccatggcaggaatggccggagcatccccttctgaatcttccagtcgatggggttgatgctcgccgcctccatcttgatcagcacctcgcctttcttcggcgacgggatcggcacctccacatgctgaacacaaacacatcagaaaaccagagaagcagaagctaagctgggagtgggagtgaaactcgcaggcgtatgtaaccttgagcccttcggctccgccgccgtagccgtcgtactggacggcgcgcatcgtcgtcgcggagggaggaggagacggcgtcgtggccatggccgccgacgcgcgcggtgtgtgcgtttggtgcgccaatgtcggcgtctgcgtctggatatgtacgcacgacggcgtccgacccgtggtggtggtggtggacgactggacgtgcaccgtccacgtcggaatctaaatagcatgtgcaccggagagggattgatgaacaatccactcgtttattgtaagttgaccaaaattaataagatgattaatacgaaatatagcgttccacagacagacaggttgaaaattcaacttgtataaattgcgagaatgctcaacgtcgggcgcgcgggggaggggaaaaaaatcggtcgctcccccctccccccatcacgtgcccacctggtcccaccacatatcccgtgtccccacctgtcacttatccatataaaacaaatcacctacatattttggaaaccatctattaaggaaatttggtttgttttttttcataaaaaaatgtttcacctagtgtattcgtactgtttcactatatataaacccaatgttgcagtgaagtgaaatattgcattgcaacaaaaaaacccacatatttttaaaaccccatattaagagaattcgttttattttttttccaccgaaaaatgtttcacctagtgtacttataatattttactatgtatggatcaaatgttgcagtgaactgaaatattctttcgctatttactggaacattgtttttatataagataaaacaacacccgatttaaacgagtgaaacattttcgatctacttagtgaaacaattccgatatatatagcggaacattgtgcaacattttaaaataattcaataataagcttaaaaaaattcgtcggaatatatccatgtgtggtcttgttttgaatatttaattgcaacgaatttaatggtgcaatcggatcatgatttggataagtaatttaagagaaaaatcagtttaaagtagttttgcacgtaaatcgggtgttgacggtagcgcccgatttttctccaaaccgatcgggcgcctgactcgtagactcatcctataaattatgacaaaattaacttaaaatatatgtatattagtacaagttgaatttaaaagttgcatgtttgtgtactaatttattacacactaaggacacataagagaaaacgagttgagggttgaaaactcacaaaaatcaaatctaaagtttaaactcaactttatttgaatagtaacgtgacactatttacctgaattttgtttttttctctcaaatgaagttgagtttggtgagaatttattttacatctacatttatctatattattttaaatgaacttacaaaacatattttttatgaattttcaaaacttttagacatgattttcacatttctaacacttgatatttctccttacacattaacctatcctgtccgttttttttttactatttagttgacatgaataatcgaatagatatctacccagatgattaaaagagttccgtgcacgttgacatacatttttcttgcaatgacttttactgaataatttaccgacggttggagagtttagattgggttcacctcatgtaaaattaggagtaaatttctcgaagatatttacgctgtgttaagatgcattcgtgaaaatttctacagtgtcacattggatatacggacacagtctaataacaaaacaaattacataattcgtcagtaaaccgcgagatgaatttattaaacctagttaatccattgttagcaaatatttaatgtagcacaatattatcaaataatggaacaatcaggcttaaaagattcgtattgtcgcaatttgtgcaattagttttttagcctatatttaatacttcattcaagcgttcgatatgacagggtgaaaaattttagtgtgagatctaaacatggccttaatttatcgtcataattaaatgaatataatccgtagtaataatcggcccaacaatccaaatgaagtaaaaaggagcccttcccaaggaaacaaaagcaatgataatcccctgggccatcctggactcctgatgttcggcgccaacacgatctcctcctcctccctcctcgtcgcaggatttgccaataaatagcaagagagatcgatagattagatcgaagtagaacagcggagaaggagagtaggagcgacggcgaccgcgcggagttgattcgattccgggtgtcgccgccgccggccatggggataacgctcgagatgaaccgggtcatgcccacccggcggaggcggcagcgccgtcgccgccggcgaaaccgacaccgctgtaagctaagctccctcggcctcctcctccggcttatataacttgttcagattgttcttttgcaacaaagcggccatgcccgtgatggtgtttctatccgggctagtatgtttctttgtaggatttctttaaaaaaaaacctgttttcttttcatcagggggttaaacctagtgcattggttggtaacaagattaagtgttcctcattgtttttgtttgagtaggctaggtatccaaactggcgtctttctgaacaaattttaatctacaatttattttctcatgattggggggggggggggattgtatgagatgtactccctcccgtcccataaaaaccgaatctagatgggatgtgatatattctatatgtccagattcatagtaataaaatgtgtcatatccaataggattggttttttatgagacggagatagtttttttttttataacaacatgagatagttgattcgttggtgaaagagtgatgcagcctatcatagcatggggcacttaactgaacatggcaaccagagctgaaacttgtgacttgggtttaccgaattgtgagggtgaggagaggagtggggaatttagggattgggaaagaaggatgtgatttttcactgattcgtctgctccaatgtattgctgttcagttggatactttggagtgcaggagatacacactttggggagactgcggtatttacaaaattttgcgcctgcgcactatgaattgttcttttctcttagattgctacaagttggaaactcaattggcattcaaaagctggataacagaagaaaattttgatttccctgtgcttgtttgtgtgcttcgatttgtccgcttccttctgttattgtttgaattaactataaccatgcatgatgtgcttgcagatagatcaattgctaaattgggtaaaaggaaattctcaccctcccaacaagatgatgattctcagggtgctaaaagaatgaaaaattcagggatgttgctttcaaaggtatgacatagaaaatgaatgatttacatttcaagggaatatcactatgactgctccaacacagattagtacacccgttacgcttgtttcattggtatgccatggtctaggtccactatttgctgtttattcttaccagaatcctctagatgcaagttgttcttagcctattccacatcgagcacattccatcttcattctactaaagaaagaacttttccccccaaaagcaagactcatatactatttacctacgaaggatatttacttgaattcgtcggaaattttcatactaatgtgcatttcattcttatatttcactcatgctacaatttttaggacaccatgccagaaggcctgcctaaattatatttcaacgaattacactgttagagcgaaacaattatatcgaatgcttaatttaggcaccacaattacattctaatgctcaatatgcctatgtcatgcagtgtacttgtgcaatcatgagtgaatacctggggtagagatagaatgataccccatatggttttgttctgctttttcacccaatcaaagtttatcacaatcacaatatccaaactttatcccatgatggtgtgtgcaggacatctggcgccgtatacattgcctgatgccaatgcgagatgcggctcgtgttgcatgtgtgtctcgtgcctttctaaattcctggttatgttatccaaacctcacctttaacaaggatacgctgggattggatgaacatgtttgtgagacagatttcatcagcaaagttgaccacattcttaaaagacactcgggcacttgtgtgaagacattcaagcttgaagtcccgtatgagctagatgtctgtgaccatgttgatcgttggcttcaatttgctattacaccagcgatcgaagaactcactcttacgctgtatggaactgctcaaaagtacaatttcccatgctcacttctatctgatgggatggcagattctattcggattcttgatcttggccattgcgccttctgtcccacaatcgaacctggttcatggagaagccttaaaaggctatgtttgtcttttgtgcgtatcacggaggatgatttagggtgccttcttttgaattcgttggctctcgaggggatggaactcaggcattgcgatgagatagttagcctgaagataccttgcacactgcagcagctcagctatattacggtttcagaatgcagcagggtgcgagttatagagaacaaagctccaaatgtatccagtttttactttactggaaacaaggtaaaactttcacttggagagtggttgcaagtgaagaaactaaatatgcgcagctcacgcattgtccgttatgcccgtgccactcttccatccatgatgccaaatgttgaaactctttccataggttcgctccgtgaggtatacaccaacactttagatgattatatagactagtttgttatccatattatagtactcataccttggagtttggttaatctgagacatctttatgcaggtgttcaacacaccaatgctacctaccaaattcccctacctgaagtacttgagtatttctctcattggattgaccaattcgccagcttatgattatctctctctagtttcctttcttgctgcttctcctttattggagactttcttcttggctgtaagatgctattcacttttcatttcatcctgcaaaactatctactttggtgaaagcactaattcaagtatattattacttttcatcttcagatatctcagcaacaagcagaacaggaatcgatatttggaagttcctcacttatgaggcagattccggagcaccgatatgagtacctcaagagtgtgacgatcaacggtttctgctccgcgaagagcatggttgagctaacatgtcatattcttgagaacgcagcatctcttgagcaccttactctgaacacgaaccttggcttggctaatcgttctgaacagagtcctggtattctcaaggaagtgcctaaagctctctcggctatccagaaatacatcgcagggaaagttccctctactgttagattaagtgttctggatgctagtgaatgaaacgctatagggcatcaattatcattttgtgaaccacgcgtccacgctcattttgtgcaactttttgatgaaccacgctctgtttactaaattattggggtcgttaaaagtttagttggagtatgctttcttggttacaatctttgtaagacttttgtggtgttcttataatatataaaatataactggtgggcgaatgcctgtcagttttcctggtcaaaaaaaaggtgagtgtttagttcttcagtaatttatcagcaacaaagcgggctgctaatagtgggtaactgtgctgtaaagttgtactgtaaaatatagattttgaatgacctggagttcggttggatgtgttgtgactacaatacttgtatgggtaaatttggctaaaatgttaaatgttgctcacttttgtacttccatttgataatgctgtgatctactgattgggtaacacggatgtgcagtaaggatttacaaattgcccattcatgaaaattagatttacataatgccaacaagaagcaacatgaacagtataacagatttaggacaaatgtggtaacttgtaatgtgcatgtatccaacaaaaatactaccacaaggccagaaacacaaatctgattccctgttagttcccccgcgaagctcccagttatacgatgattgagtggatttcacttgttagtcggtgtaagtttagttaaagacgtcacgttagtgtccgtgtgacatgccacatcgaatttcagaccaactaggataaccacataaaaccacaaaccaacaaggatctaaaaatataaccatatgcacaaggaacacaccatgcattttgtttttatatttttttaaatcctgcagggtgtatttgtattaaaggagaaggaaacactgtacaatagccttagtgcctaggaggttgcatcaagaaaggaaaaaaagaaagcgggtgaggcatgatgcagcttaaaaaaaaagagacgtgtgggtcttgtgactaggctaattacgtattgtcggttgcgctttcataattgtttggcattaggcattgaatgccctttgccctgcctgcatgccataaccaaatctcatcggtcactctatcaatgatttcgtgcggcagtgtctctatgtaactatgttccttaaaacctctctatttctctctttccaaatttcccaagagagtaggatgaggctcgatttgatgccctttcttttctccttagccatcgcacgaacggtttaagtccaccagttctcgagtagtgtcgtgtgaggccaattttgcggctgtagccgagggatgtctagccttgtcgatatggctttttttatttataaataaactaacaagtactggcagtatttactaccatgacaaccatgaattttttcttcttacaagagagagagggcttcgtgctatcgacatgttggcaaagagacggggtactttatattgatgtcctaatcgattgcccatattttctattaagataaaacagtttattaccataagaattaatttataggtaaaacttaaaaaatacatgaaaataccttaaaatcaactttaaaattaaaatttaaattttaacctttgttttgatttattaagacagccacatgggaggggactctgagaagataagaggaaaaaccgaaaaagaccagtattttcctggtcgagttgggtttcgtcacgctccgcttccccgacggcgcggcgccaacacgagatctccttctgctccgccccccgcgattcttcgggtgcgcgctctcgattcccttgcctcgatcgtcgcgcggcgccccgccatgggcatgctcctgctgagccggctcatgcccacccggcggccgcgccgtcgccggccacacaaatcccgccgcagtaagcgcttctaattgccctctcagttgttcccctcaaccctgaaactcattagcattataacgcaaaagtttggttaatggagacagatcgattggatttctctatgctcgtttgtgtgcttcgattttttatttttatttttgtttttattttcttctgttaatgcctgaatttatctgtaaccgcgcaggcggattgattgctaaatcggctaaaaggaagcgctcacactgccagcaagatgatgatgattctcagggtggtaaaaggatgagaaattcggtgccaacccttccagaggtatggcatgtaatgttgatataatcgaatagttatactgaaagtaaataccactatcactactctaacacagattggtacacctgctgtgcctaaagaacaaaagttatgaacagatgagcaaaactttcagtgctatatttacattatcaattatagtcttactgcattagtagctttgttttcttctagatatcgtggctttcgctctcgagctgcaatttgagtccttgataatatggaacaattttggagtaaacttcctagatctatctccctaattagcagtagctagagcatatcccttatttactcaaattcctcagaacttagagcttttcaaattaatatgtacagagggccttgctaatgtttttcagaaatctacagagggcaaatactacttaactaaattatattccaactaacaacactgtcaataaaagataactctatgcaatgtttcatttgcgtgccattgcattctaatgcatgcatagtacgcatatgtaatttagtgcacattgtgcaatcttgcacatagcacctgggttgaaaaagaatgatgccccatatggttctattttcccctctaatcaaataacccaatccattgaaactctatttttccccctctaatcaaataacccaatccattgaaactcacattgcaatgttgaaattttatcccatgatgcaggacatctggtgtcatatacattccctgatgccaatgcgagatgctgctcgtgttgcatgtgtgtctcgtgcctttcttagttcctggagatgtcatcccaacctcacctttaacgagcgtacactgggattagatgaatatgtttttgaaacagatttcatcagcaaagttgaccacattcttgaaaaacactctggcattggagtgaagacattcaaccttcaagtcccctatgagctagatgtgtgtgatcatgtcgatcattggcttcagtttgctattacaccacggattgaagaactcaatcttatgctgtatggaaccgtgcaagagtacaacttcccatgctcacttctatctgatgggattgcaaattatattcggtttcttgatcttggccattgcgccttccgtcccacagtcgagcttggttcatggagaagccttaaaaggctatgtttgtcttttgtgcatatcaccggggatgagttagggtgtgttctttctaatttgtttgctctggagtggttggaactcatatattgtgataagatagctagcctgaagataccttgcacactgcagcagctcagctaccttaaggtttcagaatgcagcaggatgcgagttatagagagcaaagctccaaaagtatccaatttttacttcactggatacaaggtaaaactttcacttggagaatggttgcgagtgaaggaactatgtatgctcagttcacaccttgtctgttatgcctgtgccaatcttccatccatgatgtcaaatcttgaaactctttctatatgttcactcgatgaggtattacacaccaacagtttagatgattatatagactattgttatgcatattatagtattcatgcattggactttgattaatccgatacatctttatgcaggtggtcaacacaccaatgctaactaccaaattcctctacctgaagtacttgagtatttctctctctggattgactgtttcgccgtcttatgattatttttctctggtttcctttcttgatgcttctcctttcttggagactttcttcttggctgtaagattccgttcactgttcatttcatcctgtaaaactatctagtgactatggcaaaagcatcaattgatgtatattatttttctcatctctagatatctaaggaacaaatgaagcgtgaatcgaaattcagagattcctcacatatgaggcagattcaagaacaccgtcatgagcacctcaaaagcgtgacgattattggtttctgctccgcgaagagcttggttgagctaacatgtcatatcctcgagaacgcagtatcacttgagtgccttacactgaacacaacccttggctttgctagccgttctgaacacagtcctggtacatgctttccaatgggcaaggctgttctcatgggagtacctaaggctctctcagctatccagacatacattgtggggaaagttccctccacagttagattaaatgttatggaaccatgcaacctgtgcaatggtattgggcattaggtgttatccgaattgtccattgtgtaactcttctgatgaaccattctctgtttcctaaattatcagactcgttaaatgctaaattgtgtagttatcaacacgagtggtttgttctccagtaatttttcagtaacagagtggtctgctaatagggtgtattgctaaactgctaaagtgtgcgctgtaagttgttagtaaaaatatagagttatcctgaaggttggatgtgttgtgttgtgcctacaaaattagtatgggtaaatttggctgaatttttttcgtgaatacgcaaggagtgcatttttgtattaaggagtaaaaagtctatacaacagaacctaagagcagcaggggacaggagaactggacacgggggaactaaagcctaatctcaggggacaggagaactggacacgggggaactaaagcctaatctcagggtgcgacctaagagctcctagctactagaggcgaatcgtcggtacagcagcgttggctaaccgccacaacgccgcctcattagccattcctctggccacctgcacccaacttctttgttgctggttgaagactcggttgttttgttctttccaaatagaccatgtcgcaagtgctacgatggtgtcaaagccacgccgaaggggttttgcaatctgctccctgctgtcgcacaaccaaacgtggaaagagtcttcattaatgggcaagcattcaggatgccctatggctgagagaagcatccacaagagttggcacgattcggggcaaccgaccaagatatgatcaatactttcctcttgttgatcgcagagaacgcaaaggtttggatgaggaaaacctttgggtcacagtctatcaaccgtccagcaacgcttgaggcgaccaaccagaggaaatattgacaacgcaagcgacctccagattagcaccgactgaaataggatccgaccgagaaacagggcttgataggctgaactagaggagtaaacaccggagctctcccacttccgaacgaaacgatctggccgatcctcaagctggaacgactgcaccctcgaccaaagaaggaggtagtctaggatggggagtcctactcggcgcgtgtgcgccaagggcgcacacgacccccctccttttccacgctaaggcagttagtaatctattagtataattacatttagagataaatgacggtagtagttagaattttttttgtgagatttttttcaattaacaaattcaaaatgaaatttatatctaaagtcaaattttcaaaattttaaacccatatttgaaaactttcaactcgaaatttgaattttttaagtcaaattatgaaaactttcaacttttcatgttaaatctgaaaaactttcaactcaactttgaaaacttttaacccagatttgaaaactttcaactcgagatttgaaaactttcaacccagatttaaaaacttttaactcgagatttgaaaactttcaactcagattttgaaaactttcaacctagatttgaaaactttcaactcgagatttaaaaactttcaactcaaaatttaaatttgagagaaaaattttggaaactttcaactcagattcgaaaactttcaactcgagatttgaaattttcaaatccagatttgaaaattttcaagtcaagatttaaaaactttcaaatcaataacatttgaaaaaacacgtgtgctaaagatttaaaaaagtaatctgaaaaaaactgcaaaaaaggaaaaaaaacgcgaaaaagaaaacggaaaaaccggcatgaaggaggggaaaagaaaaaaggtgaaaaaaagggaaaaaccggcgtgtggggaggtgacagctggcgcgtgcgcgaattagcaaatccggtctaggatagcctgtgtcctcagggcaccctggatatcatggatccatcttctgttgagcagaccttccaccaccattctgcggcaccagacgcgcactggaacacagtcatacaaagccaacgcaagcgagcgaatgcacgagccatccagccagcgatcttcccaaaaccaaatcaaatccccattgcccacctgacaggaaatcgaggctgcaacaaagataagttccttctgtcaactcgggatggacagaccttgccaaggtttatcctcagcagtgcgctgcgaccagatcccacgagagcgaagagccactcccatgagttccaagttagcacacccaggctgccataatcagttggggagcaaaccttggcccaggtgaccctgcaatgtccacctcgaggggaggccctgcccccccaaaggaagccatgtcaaaatttgtcgatccctttgatcacccattttggaggatcaatggtgatgagaaagtagatgtgaattgagctcagtaccgatttaaccatggtaatgtgcccaatcggtgccatctgttcagcctttcaaagaggtaagcggttggccactttgtcgacaaggggttggagatctttcctttcttagctcgaagatggatagaggcagccccaaatatttgcacgggaacaaagcaacaggacaaggaagttccctcaccaccgaactgagaatttcctcggagcattgaatcggcagagcagtgcatttggcaaaggttgcctttaggctagaggcttccccgaaggtgttcaagatctcgccttgatctcttccactgaaggttggataaaagcgaccacatttggctgaaatgttagatgttgctaccgatgtgggtcttgctccgttgcattttttgtacttactacatctgataatgctgcaatcttctcattgggtggtacaatgaagattgctaaaaagaccctccatttttggctgcaatctatttgcaactgctgcctttactatttcaatatgactgactaataattgatcgaaatctatcaggactgtcaatgcattactgatcactgataatatatatgtggtccttcaacctcggggtttagagggccttgggaggcgaggcggcggggacgctaccggagccgtgggaatggaagctcagcgatggcgaatatgacggcagaagagagagggggagacgtatctcacctacgccattgacggcttttttttagccgggccaaaggttggacccaaggaaggacttggagtcaatggttttaagaaggaagaggtaaatatttcccctggtgagcgcgctcgacaagggtcgaacccgggccagcggggtgcatgccagcgacccctgccactgcgctactagcgcatctcgttgacggctttcggccggccaccgaggccgagcgtggtgcagggcggcgccggcgagcattcgtgcggttgtgcgtggggaggtgtaatggcaatctcgaggccatactggccgtctaaaaaattgacttgagttttttttttctgccacgagaattagacccttcgaacaatgataaataattcaacgaaaacaggttaagatgttaccattctttaaactgcagttacgagtcgatgttatgctatcattcaacgaaaacaagtttgtatttgatatactcctttttttcattagctaaacgagcaaatcttacagaagtactgcaaggaaatgaatacagtaaaatccagtgatgtgatgttgcaacaatatattaccatcaatttctatcgcaagtggagtttaattaggcagctagctaacatctcaggtattaaccaaagatttatttgtggacgaagacactaacttatgaaaaaaaaaacacaaactggaactacaatactcccaaatgccaatcagaactaacattagagtcatcagaacttgtcctactctagcttcagtcacaaccttgagatcttcttcaaataaatacgatgtgcgaagaacatagcacttcaaaacctcaccaaggaaaaaaaaacatagcacttcaaaaagggaatttagtagattcttgtccagacaatttttttttatgaaattgtcaaaccaacttcatttcaagatttacaaactgccggcagcaagcaatggagaacagtataatagatttgggacaaatgtggacatgtggtaatttgtaatgtgcatgcatccaacaaaaatactgccaaaggttagaagcataactgagtccctgcacagatcaccagcaaacgccccaatttacttttgcaacttcacaatgaaaacaaattttgagccacttactcatagcaaagggcattgatctgcaattaaaggatgatgagcctaaaccatggaaacagctagatcaacaaacatattcttaaaccacacaattgcccttaaatgttacagtaatacagctacagacactgctgcgttaattaactttcaacaggattcacattttgataaataaaaccaactgctacaagtaaagtttctgggttaattagcagttattcataagggtaggaatggacacacttccatcaaaatcattaaccgagtatgacaacttttggatgcaagcagagtgctaactgctaagaagttgtaatcagggcgtgatgttttcataggagaaaacatatcctccattgctggagtacaaaactggattaccttccaaacttttcccataagacataacaaaaacccatgaacccttcccaacagatcattatttaacgaaccccagcagattagtatttagcatgacaagaaaatggaattcagtagctgcgaatggggcacacaagaacaagctggtccaatggcgtattcactgatcctaattaagaggcacaacctgggggtcaaagctactacaacaatgcactaccactaacaaccatatatgctccaatgcatctacacctttcagtcagtattggtcacaagtgagacaatgcttatcacaattaccaattttcagtatagtatggaactatcaatcagaagttgacaagcttatgtgatctccccatagcaataggatacaatgtagtgaatcatatgaagccaatgctgattattgcttgtgcaactaaaaatgcagaaaaaaaaaggtaaaagctatctactgctgttcgattagacatctgtacgattccacgggggcggcaattgcagtgttattgttcaacatcaggtcaggggcgatggggatcagggtgacgtactcaatcctcgtcgatgaggcgatcaccggccgcggcgtgatctcgcgaggtgatcaggcgggggcgcgcgcgcgaggtcgatgcggtgagtcctcatggtggcgatgcgggagggaacggtggcctgcaggtttttgaggagccaaccatcgccgcgggttcccttgaagacatggctgacatgtcgccggagaaccagcgctagcgccttcgacttgcggcgcgcgtagcctccgatgaggcggccgacgcggtggatgctctgggcgcagcggcgaagctcccggttggcgtctgggtcgcggaggtcgttgaggaggagcgggatgacaccctcgctcacgacggcgaggagggcgtcgagcttggacaggttctccacgaggcggaggccgacgatcttacacccatggtcggacgacgcggactcgagaaggtggaggagcgcgggcgcgtgcttgagctcgcgaacggcgagcaccttcaccgcgtgcgggtgcggctcgacattgctgaagaagacgggctcgaagtccgcgaaggtggagaccgcgacggagaggacggaggcagaggtggtcggcatgggggagcgtcatccggagtctggatcttcgtcgcgacgctgggggcgcgcgcgggcgcgaccgcgagcgaggcggcggcgctcatctccatcgcgactgcggcgacagaggaggtcttcgtggcgatgctggaggcgtgcgcaggcgcgtcggcgacggaggaggaggaggcgcgcgcgggcgagacgacggcgcgcgaggtctcggcctccccgagagaggcggcgccgctcttcttcttcatcgcgtcgaggtgtgggaatggcggagaggacgcggtggtgagacgcgacgcgagtggatgacgtggctatgggtgggcgttgcgagccggcattttatagccggtagggagccgtgctggagaagaaattctggaaaggagaaatcaaaatttgaatttcgcaaggggatcacgagaatattgagcagttggcccaagtgagcggttacagctaggcctcagcccaaccgtgctgggcaagaatgtctccagtggcccattttggggcaaaaaattgagtaaattgcgttctgggccacattttattatctaagtttcactttggccacctttaaaccttctatctttacaatttaaaataggtaaatttgcagtttggatcacccccaaacgattttttcagtacacatcaatgaccttaaacacatcggctctggtatacgggttaactcatccatgcatggtcgatatatttgccaaaaagaaagttagatatggcgagaaaagatgttcagggtaatccaaaccataacaatgctaaatttacccgatccatattgaaaagataggtttaaaggtggtccaaagtaaaatttgggtaataaaagatggtcaaagtgtaatttactcaaaattaagcgtgggcttctatagggggctcgtgggccgggccttggctatttgcaacctctgcggtctgtacgagttcggtatcttccttctcgtctcgcctctccagccgcgacggcgccggcctccgccgcgccgcattcttcctcctccggcggcggcgcagaccgaagccgagatcgcgcgcgggtggatgccctggatctctaccccctccccgacctcgcgcctcgatcttcgtaggtaggagaggggcagggaggagagaggtgggccgcctcggggtgctctcgatttcctcggctcgatcccgcgtatgccgccatggccctgctcgcgctgaaccggctcatctccatccggcgggagcgccgtcgccggcgaaacaaagcccgcagtaagcgctttcccctcggcctctctgcacttcatctctccggtgcgttgtgtgtgatgtgctgctcggactttttttgggagattgcggccagtatttttccagaatggaaaattggattggtttggtgaattgtttctctaaaattggaagaatttggtttggtgaattcatcagcattctcgcgcaaaagttggataaggaaacattttggatttctatatgactcgtttgtgaggttgaatctgttgttctcttctgttaatgtctgaaattatctattacaatgcatgatatgcagaaggaggatcaattactaaatcggtgagaaggaagtactcaccctgccaacaagatgattcccagggtggtaaaatgatgacaaattcaggggtaactcttccagaggtactgcactgcatacactgttttttttaaaaaaaaaaatctatgaattaattggaacatttcaaaatactactatgcattccattcttaagtatgtgcccttgctagtgtccttttaagactctaaagaggaccagagacctacctaaactatattaaactaccaacactgttaaaggaaaacagctctacgcaatgcttaatttatgcgccattctaatgcacaacatgcctatctaatgcaacgcaccttgagaaatcatgtgcagtactcctggggttgaaaaaaaatgatacgccatatggttctattcatgtttctctctaatcaaagtagccatttaggtttataattgcaatgttgaaatgttatcccatgatggtgtctgcaggacatctggagttatatactttccctgatgccaatgcgagatgctgcccgtgctgcatgtttgtttcgtgccttcctacgatcctggagatgtcatcccaacctcacctttaacgaagatgcactaggattgaatgataatgcttgtgaaacagatttcaccagcaaagttgaccacatccttaaaaaccactcgggcattggtgtgaagagattcaagctttcaatccactgcaagttagataactgtgattatgtcgatagttggcttcagtttgccattacaccagggattgaagaaatcacagttatgctgtctggaaacaagccacagttcaacttcccatgctcacttttctctgacaagattgcatactcaattcggtgtcttgagcttggcaattgtgcctttcatcccacaattgaacttggcccattaagaaacctcaaaaggctgcatctgtcttgtgttcgtatttcaggggatgagttagcatgcctcctttccaactcgtttgttttggagcagttggaactcaagtactgcaaaaagatagtcagccttaagatgccttgtgtgctgcagcggcttaactgcctgaacgttttggaatgcaagagggttcaggtgatagagagcaaagcccctaacctctccagtttttcctttagtggaaacaaggtaaaactctcacttgtggaatcatcgcaagtgaagaatctatacatgtgcagttcaaacatcatatgttatgctcgttcagatcttccatccattgtgccaaatgttgaaactcttgccgtagcttcacactgcgaggtataaactaaactttcattattatagactatgcaaaatgtacagtatatacattggttatacctttgagtgactattctgagatatctttatgcagatggtcgacacaccaatgctaccaaccaaacttctgtacctcaagcatctgactatttctctttttgcatggaccttttctcgagcctatgactatttttctctggtttcattttttgatgcttctcctttgttggaggtattcgtcttggatgtaaggctctgtgcaacgttcccttcatccacaaaaatatatgttaccacggtagaagtactgattcaagtatatgtcttttttcatcttcagatatatcaggaaagcatggagcatgaatcaatctttgagagttcctcacatctaagacagatgccagaatatcaccatgaacacctcaagtccgtgacgatcagcggcttctgctccgcgaagagcttggtcgagctaacatgccatattgttgagaacacaacgtcacttgagcgccttgaattggacaccactcatggcaatgctaggtgttctgaagacagttctgatgaatgctttcctgtgagccaggtgttctcacagaatcccctagagcagtcttggctatcagaggatacatcgaggggaaaattcccaccaatgtgaagttaaatgtgttggaaccatgcagccggtgccatgctggtggtggttaggtattatctaatcctaattactagccattgtgtaactttttgatgaaccataaccatttgttttctaagttatcacagtagttattaaatgtttgactctctgtagtcagtagcacaaaccaagtttatctaaggccctgtttagatcacctgacagaacttttcaccctttcacatcgaatatttggatacatatatggaatattaaatataaacgaaaaaataactaattacacagatcgcgtataaattgcgagacatcttttaagcctaattgccccatgatttgacaatgtggtgctacagtaaacatttgctaatgacggattaattaggcttaataaattcgtcttacagttacaggcggaatctgtaatttgttttattattagtctacgtttaatatttcaaatgtgtgtccgtatatccgatataacacgccaaaactttacaccaatagatctaaacacgccctaagtgctagtcagtagtgatcaccatagaccaagtacgagtatttgaatgacattggttgcatcggttgataagccatagaaaaataaacaagacaatggtgaacaataattagggtggggtctttatattttattcttagctgtttaaaagccaaaggttaaagaaaacaaataataccaaatttagtttgaaaacttaaattttgatgattgtggcttataagctaacaaacaaacaaacgatgagagtcaataaaagactcaagcagtacatctatacatgcacagttgcacgctacaaaatcgtatcttattctgttcttccaggccacaaatccgtcgagctcacactcactgttcgtctcccatctcgacgatgatcttgccggtggcgtgccccgccatgctcctggcccagccctcctccgccctgctcagcgggtgcctcgactcgatcaccgccctgagcttcccttccgccaccatgccggcgacgagctccatgtcctccttcgtcggcgacacgaacagcggcaccagcctcttcctggagaaggtcaccctctgccgcagcgccgtggcgaaggccgcggcgcccggcgtgaggtcgacgaccacgccggcgtcggcgagcaccggcgcgaacgcggaccacgggagccccgccaccgccgcgcagtgcaccacggcgtcgtacctccgccccgaggggctccgcagcgccgcgccctccggggtggcgtagtcgagcaccttgtcggcgccgaggccgccgacgaggccggcgttgcgcgcgccgcaggtcgccgtgacgcggtgcccggcggcgctcgccagctgcaccgcgaagtggccgacgccgccggacgccgcggtgaccagcacgttcttcttggcgccgccgccgccgccgtcgccggcgtctaagctgacaccggcggtcctcagcgccacgagcgccgtgacggcggcgatcggcaggcacgcgcccacggccgcagacacctccggcggccgcggcgccgtccgcgacgcctgcgccaccgcgtactcggcgagcccgccgccgccctgccattacacggatcacagcaatattatcacgtcgaaatcaacacaaactaatctactctgccaaaactcatatcatataactaacaatcttacagggaaattgatggcgatgaccttgtcgccgaccttgaagctgctcacgccgcggcccagctccacgacctctccggcaagatcataaactgttcgaccatccatgaatgcatcagtgattaatcaacaattgaccatttcaattagcagttggtgtgctatgccaatgccatgcatgttttgatcttggattactactacctgggatgaaggggaacttgttgggcatgaacgggcgagcgacacctttctggaacttccagtcgacctggttgatgctgccggcctccatcttgatcagcacctcgcctttcttcggcgtcgggatcggtacctccacatgctgaagcagtagcacccacggtacaaaccaacacaatcagacataatcacatatgcttgatgcattgcttaatagctaaccatggacgttaattgaacgaatcattgtataccttgagtgcttgagctccaccgccgtacttgtcgtactgcacggcgcgcatcctccgagaagaagtggccatggcccttgcccagaggtgaaaccggttacagaaattcctaaccgactgagcctcgttttcgtacgaggggtaccgttctgcgactgagaagagggaatcgggggcaatttgcgacagtagctgccaggcgcggccgtacttatggcagcggcggatcgaactagtctaccatcgagagatagatggagagaggccatgggatcggatcgcattggcagtagcctttgtttgaccggcggcttggctcctcgccgaggcgaggcggcggcggacgtggccgcgctccgcaccgcacgccggtacactgcagtagtaaactagtagtagtactttactgcggcttaggcattgacgacaattcagtcgggccagtgtgtagacaactcaacatgaaaatttcaaaataggagaaagtccacgtaacccaacgacgggtcaagtttcgttcgttggcgtccctgaaccgtagaatcaggtaaaaattacgtttcaacaattcaacttctaaaaaggatacaaattaagtcactcgatactattaacagcggtttcggctagcacgacatctacatggcttgctgacttgattttaattccatgtgacgtttatgtgcacttacataacaatagaagcaaaaaaaatatcaatggaatccacatggtgcctcctcactctctcgcctcttatctcccttcacccatctcccctcccgtctttctccggaaatgcttcctattagacgtctgacgcaacaaacaaaaattagacgggcaaactactacctccctatccactccatacatccatacatattataatgatcttcaaaataattttttcttatgatttacttatccaatctgtgatatgatcacaccattatatttgttataattaaatctttataacaagatatcacatcattacattccaatgaaagaaaaatgtatgtttcagtccgttaagtttaatgtttcagacgcagtagcaatatgtttcaacgtgagttttcattgtgtttcatagaaaagttaaatgtttcaataactgatttttttttgtttcaccacgtataactcaatgcttcgcgctgaaaaaatatgagacacatatgcctccactctctctctcgtaccattttattgactttctccccacaccatacatgcatacaactatttagtaatcttaaaaagaatcttccaaactacttatttgatgagcgattcgatcacaccgttgaattcgttataattaaatctttataacaagatatcacgtgattatattctgatgaaagaaaaacatgtgtttcaaacaataaaaacgtaatgtttcatacgtgatagaaatatgtttcaccatatgactttattgtgtttcacagaatttttatatgttttagaggctggattttttgtttcaccatgtataacttaatgttgcaccaacggtcaactgaaacatttatccgtccgattttttttacaacatcggacgttcgatttgtagctctctgcatctctctctatctctctctctctcatgtggccaatgacattggaatgcgaaggtggtgcggcggcagcccgatatgctctttccatcggcaggcctcgttgggctcctcatctggctaaaccgcttggatcttccctgggaacctcgataaccctataattgaggaaagcgagaaaagggaacgagatggtgtggatgctgtaggcttggtgggaacgagaaagctcaaaattgctctcgatgccacggagagatttgatttgtactaattttaaaagttcgtggacgttctatagcctgttttatagttgagagatgcgaatgaaactcaagacacgtagttgaggacgtgaagtcgacctttccctctaaaatagtactccatccgtcctagaatatgtaaggtactttgatcgaatgggacacatcctagctgttcagatttgtagtattaagatgagtctcattcggtgaatgtaccttatattttaggatgaaagaagtatgaacgagttaacaacgcaaaatgggctttatttcattcggactttacaccatgggctcattccaaccataaagaaggaccggaaaaagtacattgaaggtccctcaacttgtcatcgagttacaaaatcgtccccaaccgtaaaaccagatatccggcgtcccttaactaatcaaaaccggtcacaattggtcttttggtggttttgacaccagttttgtcttacgtgacagctgagtcagcgtgggacccacatatcagaatgccacgtcatctctgtcctccctgttctcttctctcttgcctgctgagcgcgagcgcgaggctgtactggactgcaggcgagcagaggtgggggaagacgtcggcgccgcgggggaagcaaccgctcctggagcacctcgagggaggaggggagctcgacggcctcgagctcgccggcggggtcggaggagagcggcgcctccgtactccggcggcggcgcggccgccttcgaggagagcggcgcctccgtcgcccccatcgccgttgacctcgcccccatcgtcaagtccctccgcggcctcgacgtcgactgccaggacctcccccgcgccgggctgcggggcgtcgacggggcgatgtggaagaggaggaggacggcgccgcagtttttctcttgcaatcttttctctcagtttgatgtcatacgcagttggctctacatttagggattccttttttgtatgaagtgaaactatctgttccccgtttaccaggttcattccgagtgctctgatcatgaggtttcagttgaaactactaagagccagaagcatcatctcaagaaggtataggtacaatagagatttcgttcctaaaatctgtttgtatactattgttctgcggtttgaatgaagtaaatatgctcagcagtttgttgcagatcaagcataatgatgtgatggagcctggcatgagaattcaccttcctgtgtcagtggcagagggcgagattagagatgagattgagaaggcctgtcatccacaaggtaatcaatttagtgtattttttggagcttactgtttttaatttacatcattcagagtcataattgtatgcaaaattttgaaatttcaggattctgctatacttgtgcttaacaagcccacgaaagtgcccatgaagggaaatttgccagtacataacagcatggatgtgcttgcagcagcagctctgttatatggaaatgaagaaggttcaaaattggtgagctcaagagtctgttcatcataggtcagcatgtataaccataagcttgcactgaagatttttctcgatggattttgtgttttgaccacaggttcatcggcagcgggcgtccctcctcctcgctactgctgagcggggtagagaccggcgcgggggtggtggccggggacctcgccctgcgagtgacccccatcccggcgcacaagatggctccgctccagggcctgcgcggcgaccgtaacggcgaggagggcgacgacggctagaggagagaaaaggaagaaggagacctgaccagtgggcccagcctatttattattattatttttggatgaaactgccacgtaatcgccacgtagtatgaacacctagtcaaaggagccacgtaggcgccaagtcagccaaaaccggtaacaataccaccgagggatctattttgcaccagtttttgggttgagggatgattttgtaattcggtgacaagatggaggacctccggtgtacttttttccaagaaagaccatatgtcctcaaaacccttaacaggccggacaaacagaaggccaatcgatctcgcctacaagcccagcaacgttgccactcgcccccacgtagacgcgtgagacaacatccaccgacgcgtgatcaagtcgtcgcccttcctgctgtcgtgcgtgcgtgcgtcgtgcggcagcggaccgcgtcgatggcgcagtcgtcggtgtttggttgcggtgtccgtccgtgtgcagtgcagccaaaatgacgtgcgcgtcagggttcacaatttcagtggactgattcatcgaatacataaaccactcagatttttaggttagattaaaaaaattgaactgaattttaaaattttgatagaatttattcagattttattggtttttgtcggtttatcaatggattcagcgaaaatccaatgatacttatggtgagcggattttgatccgatatcagaattgtgaaccctatagccacgcacattctaaaggaggaaggatggatcaaaattgtgaaccctatagccacgcacactctaaaggaggaaggatgaggcgagggggtgatttggttcgacgagaaaaggcaggaggacgagggattgtgcgtttcttctcgctttcctctctttagctgcatcatgttattcctcctactagctactccctccgtccaataatataagggattttgaatttttatttgtattgtttgaccactcgtcttattcaaaaaatttgtgtaaatataaaaaacaaaaaattatgcttaaaatactttggataataaagtaagtcaaaaaaaataaataataaatctaaatttttttgaataagacgagtggtcaaacagtacaaataaaaactcaaatcccttatattataggacggttagagtaacagtgctactgccaaaagccaaaaggataaagaaacaaaagcgatggaaacttcctacacatatatgctcgttgcacattctctcttcatctaggttgcgttcgagcgcaggagaaagagagaaagattgttttgtttttcgcgcgcacgcttactgaattactaaacggtgtgtgttttgcaaaaaatttctatagaaaagttgatttaaaaaatcatattaatttattcttaaagtttaaaataattaatactcaattaatcatgtgctaatggctcaccttattttacgtatcttcccaacctcctcaatccccttctcctcaaacacacccctagtacacaacactgtcaagtgtctaacacaacacatgaagtagagtactctttattctttgcacggttttatgacaggtcgcatctaattaaaacaatccttaaaaataaaggagaaaaggccctagtgaaaaaaagagacaaaaacaataggtcgattgcaaagccaccttcaccaaatgaccaaagtgaacttctcccccaaaacggaggatccaatgacccctgaaacgaaaaaaaaaaagtaggcaaaaaaaaaaacagaggatccaatgcacaaaagcagagaaggcaatgggcaacggccaatgccacaggtaaaaatatacaaatccacaggctttccctgtaattttctcccatatcgcctttctcctcgcaagcatgtgtctcctccccactttgcacttggcatttgcaccccagctttgcctctacctcactagtagtagtaaaaaaacgttaattacattgtttactcgaaagcccacaggattaaccgcttaacccaatgcaaccgttgtcaaggctaaccctaaacactttaatttaaaactcctacttaaaaccccccttccagaagacatcccgctccagtttcccacgccaccgtcgaacaccttcacccatggcgtccatggccgccctcctcgtcgtcgtcttcctcgccggctgccacggtgagcgccgccgcccaccacctccgccttctcgtgttcttacttgagatatggctaaatgttttttttaatttttttttggctgggagtgggggtagtggtggcgcaggggaggagcaccgcggcggcgcatggcatcggggtgaactacgggagggtggcggacgacatcccgccgccggcgaggtcggtggagctcctccgggcggtgggggccgggtcggtgaagatctacgacgcgaactcgagcgtgctccgcgcgctggcggggacgcgcatgcgggtgtcgatcatggtgcccaacgagatcatcccggggctcgccgcctccgccgccgccgcggacaggtgggtggcggagaatctggtgccctactacccggagacgcgggtcaagtacctcctcgtcggcaacgagctcctctccgactactccatcgccaactccacctggccccgcatcgtgccggccatggagaacctccacgtgagcctccggaggaggaggatcagcagcgtcaagatcagcaccacgctcgccatggacgcgctcacgtcggggtcgttcccgcggccgccgtccgccgcggcgttccgccccgacatcgccggcgacgtcgtgcgcccgctgctccggttcttgaacgggacgaactcgtactacttcgtcgacgcctacccgtacttcgtctgggccggcaacaacgacaccgtcccgctcgagtacgcgctcttccagggcggcggcggcggcggccgctacgttgatccgggcacggggctcacatacaccaacatgctcgacgaaatgctcgacgccgtggtgcacgcgatggcgaagctggggtacgggggcgtgaagctgggcatcgcggagaccggctggcccaacggcggcgactacgagcagatcggctgcaacgcccacaacgccgccatctacaacaggaacctcgcggcgcggatggcgaggagccccggcacgccggcgcggcccggcgcgaagatgccggtgttcgtgttctcgctctacaacgaggacctcaagccggggcccggcacggagcggcactgggggctgtactacgccaacggcacggcggtgtacccggttgacctcgccggagcgcggccgctccggtcgtacccgctgctgccgccgccggagaacgacgcgccgtacaagggccccgtgtggtgcgtgctcgccggccgccgcggcgagaagctgaacgagacggcggtgggcgacgcgctggcgtacgcgtgcgggcaggggaacgggacgtgcgacgccatccagcccggcggggagtgcttccggccgaacaccacggcggcgcacgccagctacgccttcaactcgtactggcagcagctgaggaagaccggtgcgacgtgctacttcaacaacctcgccgaggagaccaccaaagatccaagtaagcctgaaaaatatctggaaaattttactccatttttgctcagatttcgattgatacatgcaaatgcaatttatgatttccatctttagtgatctaggttgatggatgaatttactttggatgctggttctttagaaattagaattctgtaaggtctagaatagatgtggcgttttgctggtgagggaataaaggcgatgtctttatggcattggtgatgaactcgtgaaagctggtcaagcttgcaattttttgtgagcattacagcactaggcgatgtcttctcgtttagttgtcttttctgatgattgggttgatgaaaacaaataatcttacgtatctcctgggattaggtttgattatttaaatgacttctgaagtcagtgtcaactggagaaggatgaaatttctaggacagtaggattacaagtgcattgtcaataagaaactatttgctggaatcagattacaggtgcccaggatataattgtacctgataatattaatcaacagcacttcagttgacccaatacattatgatctcgatcccgattggttttgatttttgaatgttactaatttaagcatatctaatgctagtgttttcagataggttcatatttagaatttgggttaccgtagcttgtgtagtcctataattggaactcctcgctaggattttggaacatacatttggtacttaatttaaatgataaagtataattttaaagaatgaaatttctgaaccatgttgaacaatgagcatatgttaaacactactgtagaagctaattcatttgttcatgctaatataataccccaaaattccccattagtcatttgcgtagtgcatatacagtagaaggcatctttattaggatctatttatgatgtttgtctctccctggctcacttccaaaagattttcagtctgcacatttgttctgaaagattcattcagacgaatggagctgactgcttggctgtcattactgcggacaaagtatgatccgtgggttgccttccatccaaatgccacagtacatgctcgcatgcttgtgaacttggaccatatattgatttggtcaaaagactcaaacccacctgcacatttcgcatagccttgagtaaggccaactgcaagcctgcaacctgcatccctgcaaagcatacacaggcattgncagggccatgactataaactgttcttagacagctggacatttgggagtggggaaaaatgctgagacactgcctctttatttttctcctttacaacgtacttcctctgctgacaaatatttggcgtttagaacaagggttggtcaagcttctggaactttggccatgaataatttctcaaatgcttagttttgccttcaaaagtactatcataatattataatatcattagattttataaacttgttatgatataaaattgattatcaaagtttcaaaagttcgaccaaatcttatcctaaacgtcaaatatatgtgacatgatgagtattctctagcaagttctctgtgtgcagaagaaaatagtcatttcattcatgacagtgtaagcattttaggtgggacgtcagtgtaatgctccctttcatagctaaacatccttggacactagctcgtgtatgtatgatcttcttctgttctttagcatctcacttagcttataacttggtaaaagtagccttggtggatgttgctttcgactcaaaagaaaggtcctttgctaactcaactaggagaaatcaggataccaaatctgctaatggtgcactattatctgttactcttgggcacgcactttaccattttctgcaagcacaagcaacttattcggtgtatcttaatatgcttctattttacacttcagtggttaacctgccgtgctgattaagtgattagttcgaatcactgattttgttgtgtgtgttttttgcaggccacggatcatgcaaattccacagttctttggactaactgattgcatgggaggacaatatgaaaatgaacaacattgttctcgatttattttatttttgtcaaacctgattagatttagacccaggaagttaggtagttgagtacttctgtatctgctcatcgtctacaaaacctgtgaactgtgatgtaacagcgaaatttgccgtctgtttttctgtggcttaatcagtagaagaagatctgtggcttaattagaacgaaattttcagaactgaaccacctgcctctgcatgggcctcacatgggccatacatgggcctgcacctgcctctgcaaccgagctaggagtagcagttctgccacacggcccgtctacaaggatggtgttgtactgtgtcactcatccttcgagttttagttttttttttgtaatatcttttaatagtttgcacatcatctacagaaatattttgatgtacgcaagttatttaaaaagaatcttttatattttcaaacaaaaagaatctttgagtgtaacacttctcttaagaacaagtactactagtaactatagcaaggccaaaaaagacaaatcaattcagttaaaattgccaagctgaatttcagtagtacatgtgatcggtgtttcagccaaaaaaaaacatggaatattcatgccctttcctttgtcacactggccactacgattggttcaacaaggacatgagcagaatagggccatttacatcggcgagtgactcagctcacacagcgactgttactgctctgtccgtgcgctgcagagagatcacgcacatttacatctcaaagacctttttttttccttctctgtgcctctaactgcactgtactgcttgtcagttactcgacagcaacatccaccgattttttttcggttttcatgaaaaaaaaacgcttcaaaaccaatggctccatgtaaaatctggtcaaattttgtatttaaaaaacagtttgatttttataaaaactttactaggaaacgagcggtttctattctcgagccggcttggaagtgcagttttttagtgaaaactggttggtttttgtcggttttataaaccctaactgccaccctatgatgatctatccatctctgaatctcactctcacgaccaaagttttttgttgttgtcgtcacagctggaagaaaatgtgattaaaaaagagagagaaaaacagccgacgaaagaagcagcttctgattgcagagataactaccactacaagaacaaactaatggtgaggatatggttggctttgcttggcgtaggtgttaagattcagagattcctccgaccatgcgagagatctatctttgctactgcctaattgcctatagtggccggtataatgaccaagggggttacctgtccacttcacttcaccataagctgcaaaatgcaatggctgcaattgcatcactacgtcttacaaacgtacttattgcgttctgaaataattggcacttatactattcaagtttattttttcttttttctataaaatttataaatgttgaaaatatgttattctatcaaagtgtgtaatatcataaattcaacacggctgtaatcaacggtgtcggttattcgatattggagggggtattcttgtagttttttttttagataatgagttcgcaaacatgcattgcttgagatggagataatcatgagatggtgaattggtgatgactgatgactggtgatttgggtttatgttttcttaaaagaaaaattggataaccacctcagccacttcaactgctagctaagctagacaatagacagatgtagagatggatagatgtgtagccatagatagcttcttaaagctccaacacacttatacctgcaacaagaaaagagcacaaattacttgcaagtgagctaaagtccggtagctagctagctagataccaacacacacatttgctgccgtagcttactagattatggtggtgttcaacgagattagtgtggtgttggttgggaactacctttctcaggattagagagccatcatttttgttctgtgattccaggtcagtgagcagttaagcattaattgaaaaaaaaagaagagttggacattgacagtttgacacattgttgttattattatctaatgactcctgcagaaatagagcacactgcacccattccggaaaatctcatggtacctttgtcattaatcatgctgagcacagcacacatggctgcactgattgccctgtgaaaattcctactcctggctactacccctgctcctgatccaatcaagacgatgattaaatcagatcaaagtttgtgcttttccagcaaaaacacagctactgcaaagatagatttcaaagccatttatctgaaaagttgcaaagaaaaaggggtacaagtgccatgaactagttcatgatgggccagcagcagtggatatcatgagaaatagatggcgctctcaaaattgcaaatcaatcaagtgccatttttaagcaacacgtcaaactgtgcaatgagtaatctgcaggccaaacaagctcatttgctctagatgaactcccaatgcaaattaccaacacaacaacaggcaaacacaaatttcagaatccaagattattccactaatccataaaataatgcaccactgaacctcacattttgcaaagaatttagtactcactaattctagtatattaaaactcctaattaagttatcctgactccattggaaagagtgaaaagcacatcaaaaacctcagcgaacaaaaagaaacaaaaggcaaacgcatcattttagtggagccccaccttcacgggctcgctggccggttcacccacatcctcagccgtccatcacccccacgtcggacggccagatctcccgccacgtttcacccccgccgagacgtgcgtgtctcttacaggtgggtcccacgtaagttttccctccacgaagtgccctaaaaaaatatataaccccagcgaaaaattttcgcgctcacgcacgcacacacgcggcgcacatgggccgcattgattgcggcacggcccgggctgacccacacgcccactgacgtgacggccccacctagaggtggccccacacgtcatactcttggagcgggtttgggtagagctccacgtcgcggtgggctttactccaaaccccccgcctctaaaaggaggaggagtttagtagtaacctctttcttcttccatccatcgccgccgccgccgccgccgcattcgccgccgtcgagtcgtcgtcgtcgccggtcaccgccgccattggcgagaagcggagaaggggaggggagtgggggggcatatcaatggagggggaggaggggaggaaggggaaggaggcactgagcggggggcacctctgccacgtgtgcgggtaccagtaccccaacgcgaaccctagcgcgaagctccgccgctcccaccggaagaactgcgggaaggcgccggccgcggacgagcgggaggagggggaggaggtggacgccgacatggagcgcaatgcgggggaggggctcctgccaggtacggtttatatttggtgtgcttctccttggattgggttgtctcgggttcttgggtttttgatggtttcgcgcgttcgtgttcgctgcagttagagcaggaggaggtgagtcggaggggaatgcaggctctccatcgctcggatctgcgagaggagatgctgatttggtggaggtgaaggagattgcaggtataatctctagtattttttttcatcggtaattttctttcttgctttctcgtttaccgctcaatctatctcgtgtatcttgctggtaatttttctttgttgccttttcgtttaccgctcaatctcgtgtgctatattaaattcgaggttttcgtgtggggttcgttgcaattatccttgattttgcctgcttgcattgtgagatgtgagagctgacaaaatcgatgatagatcgcgatgattgctgctaactaaatccgcaatctttcataagctttgcttctgctgcgtgcaacgttgtgctttttgttgtcttgcttggtttgttgctagagaggctgaaaaaggcaaaaagtatggctgccttttgctcatcagtcccccccttggagagggacaggaaactcacatggcatagtgagatggtactgttctggggtactggagtaaaggtccgtgtggttcttggttagcattaaagctgaaagcattggtactttcttgttttctttggagttggagagatacttgtgtgagaatgatgtagaaatagttggagtgaattgtttttctgacttgcaaactgtagatctgaactttgctgagtcacttggtgttgagtgttaaataaagtagtaaagctaatcactgagattcaagtgttccttccaccgtctagcacctagattatctctccgtgtttcacggcaagttggtggcttggtaatgttagtcagcagtaagaagcctttgcttgtctttgtggtcatatacttcatcggattctttctcgaaactggcagtcagacaaggtgaactgatttgttggtttcttggtacatctttcatgctaaatatccgacatatctgtcattactcttgttggtaggtaagatagcttagaagctgtcttcctacacatggtcttacaccacatgctatcctagtgacatgtgcgtttggtttgctatgctgaattgtttagtctccttatgtggatgcatgtctcttgaaattttggttgtatccttattataatactgtgaagtcatctacttggacagatcattcagggtgttgacatgagtttctgtaatttattacctaattgttgtgactagtccatgtttttttaaaggtctgtggccatgctgttatgtagtatcgtccattaattctggagtcattatgctgctaagtttctaatgactgcaatcccattatactatttacagcaaactcgtctttcaattgttttatgggcccgattttcagggttagtcctctatatcaatataaagttagctagggcaaacttgtgcagcagttacttaagactgtgttattaatcaaattatgaattaggcgtgtacagtcttctgtgaatagtaaattatgaaataggtgtgtacagtctttccaccttttgcggtgattttttattgtcttctgtgaaacctctcattttgctcctattagcaaataatgacagtggaaagagtgctactgtggaaatactaaatatattaggaaataaacctacgcaataaaaatagcttttatgggtcttatttacactctttagtttctgttagtaataactccctatgtccacaagctaattttggtgcacatcaggaatttagagacattttctcccaataacctagtatagctcacgttattaacttattagaacatatccttttccacaataacttagcatgagttcttaacatttcctgttacttcgtctagtcttttgtatccttccatgcttttattggaaacacctttaatggttactgatttattatgctgacaatcctagtaaaatattaatgcttttgagttgtttttgatcattcctgccatcctttgtttcactaataagtgttcttttccacgttacttattatttcatgttttagttcatctaacaatgtgttggtttgattctttaatagaacatgcttctccaaacgttaccggagttcaagtcatcactggttactgcagtgaagctggtgtgattaattgcgcaagtcattctgatgaaatttcaaaagaaggtatgaaaactaacttatgaaggccttgcaccaatgaagtcaaaattaagttgcagaacattactctgaaatttcaccacttgcagttggacgtccggctgaacgagaagatagtcttgatgagtaccaggacgcgtctccttttcttcatcaaccagattctgaagttggtgcagcagtagcacataagtcagatttttctattgaagaaattaagaatttggatagtgtttcaccagcagcaagtgtagcagcaaatgaaatttctgtggaaatggatggagtatcgaaagatcagttatcaggacaacccaatatgactaatttatctggtgaatccatagttggaaaagaagttgagcctactgtgatgcttgagagttcagatgaattctcagttaatgttcacagtgataatacatatattgttgacagcaaacctgataagacatctgagtttattggtgatgtgaatggttcaacttcatttatttctgacctaacatcccaatctacaagtcccataatggttgaaagcttgatggaagatagcatggatgctctgcacatcatatctgaagtatcaccaagtttggaagaaaaagcaggatcagccaatgctgaatctgtaacagaaaattccagaattgactttgtgcaaactgaagatcaactgaagctcaccaatgctgtaaataccttgacagattgctcttcacagtacaagtgtgttaaagatactttagatgcccagctgcctgttgagaatccgttcctgggtaattcagtatgttctttagatggtcatcagagtgaccatgttgttactaatatggatagcatgtggggttctgatgatgaagatatttgtagtgaaggcatcaaagcgaagggcagtgagttgggtttttcttgtgaggagaacccacaacatgtcgagttggttgataaagcagatgaaaatccttctgtagagaagcctaatggattatcagaagaggtggtctgcagcaaagagattggccctgaggttcctattataggccaggtctctgcaagtcagcatgttgccttactaatggatcaagtgtccacaaagaatccgttcattctagatgataccaggagcgacgacttatttgagcttccaactgagaattaccattcggaagcacaaaatgttgctgaatcaaagctgcaagttgactttacacctctgccattggatcagctgataattgtggaccaaactagcattgctgaaggccagcaatttgtcatctcaggttaggattgttttaccgtggattatgtacaagccagtaattctatttctgctgtatgttttttaatgtcgttaattcattgctgaaatttaatgcgtccaggctatatatgctttagtctagcttttatttgacagcctgtacatgtttgtttggtttttaaagaaaattggtaaaaatgctaagctgtggagggaatttatctaaaatgtcacgtggttaaggtgttcaggcaaatgatattctgctttagtgccttacatggatataaagaagttaaatcaacagcggtagattcttaaattatatgtactacttcctgcataaatgctcactcacgagtcatgacgatggcttcacttgcttgctggaattcacagtagacttttaaatcctaatcttgttagcagtattttcttggggatggctactgtacaaacaacttttatcatagttttcctctctttgcatggcacatgttgccttgttatcacctctggagagaatagtggataatggtaaaatgattgtgaatacagagctagttgctctgtattgtcatatgttaaaatcgtttcaattctccctattccaatgttactgtatgactttcttctagcagacgttactagttttgattacatggtatcagtcactgaaatttgttgctcatttctggcaggtgatcgtgtaccagctatctcaagtacctgtggaaatgaacctgcagttggcacagaggatgtgtctgtcagtagcacttctgatcctgcgaagaacatttccttgcatgatgcctcagtgaacaatagcagacaggaagacggggagcctacaagtggcatcaattttgtgccatctgaagtatttcttccagcagagtttagcacaatgcctacttctcaggatatcaatgctctcaagaatgatggtaacgagaagacgccacttgaagacataagcaccaaggatatgactgcatcacttagtgaagataatgttgaagaaaagaaagagaccgaaggcactagtgtgaaggagatgaattcaatactgaaagcagacaatgttgaagaagagaagttgactgatgacacgagtgcagagaggaatgcaatgcagcacatagatgacgctgaaaagaagcaggctgctgacactgtttcgagggaaacgagtgctctacaaaacatagaagaaagggaaaacgttgaaggtactggtgctaagggagtgccagcagtagggagcttggaaaatgctgatgcggagaatcagactgaagacaccagtgcaaagacagaatgtaaatcagataatgctgacaacaagaagcagagttacgacacaagcacagaggagatgaatgccaagaatcaagctcaagatacttcctcaaaggagatgaacaccatacaaaacacatctaatgctgaagaaaagaaccaaactgaagacccagctgtccaggagggaaacaagcagaaggaaggcatctctcccacagtagcgaagcagagttcagaaagagttcatgtccctctcaaggtgctcctagccgaggcgagtgtggagacgaaagaaaagaaaaccactgccaaggagcgtgttttgtcattcaggcgccgagtatcgaaggacgactcatcgtcggccaagtccgggtccccaaaacctggtgctgatgacaacaaattctggagctccccagcaagattgcccgagaacaatgctgagaagaaatccaaagcaaggaagcagccatggatgccgttcatttgctgtcactcggtgcactaagcctgccatccatcttcagcagcacaaagcttctccaagctgctgctatacaccatgtgcatgttgcatcttgagttattattgatagcactagtagtagtaacagtagtaaagggcttggctatgctacgatgctctttctagtatttgcattggtctacatttgccgctgtaactaaagctccccacatcttttgtgtagatagtccatgcaagtaagattgtttggtaatgtcgagctgatacttgctgatctgcattgatgttcagactttgtgaatcatgtgcgattttgatgttcatagtaaacttgctcgtgaatggatgtggattcagccctgtgcgctgcattggatcttagacactgtttgaaacaaattttttttcttttaactagaaaaaagcccatgcgttgtaacaggtaaaatctatttatatcttattatggttatatgggctatgtttagatccaaagtttggatctaaacttcagtccttttccatcacatcaacctgtcatacacacaacttttcagtcacatcatcttcaatttcaaccaaaatccaaactttgggctcaactaaacacatccatggtttagtttaaatcttattatggttatatggtttagttaagatgaaattgactgctggaattcgtttggatatatatatatttttagaaaatcatgagctgcagttaggagtccgtttgtctaaagttagcacgtgagttttcttatacgactcattctgtattaaattggaattcacttggatatatatatatttttagaaaatcatgagctgcagttaggagtccgtttgtctaaagttagtatgcgagttttcttatacgactctttttgtattttcaaaagagaacgaacttaaaaaccgactcaaatacttaaaaactgactcaaatatggatatgtattttcaaaagcgaacaaattgaaaaaccgacttaaatacggatatgtattttcaaaagcgaacgaaataaaaaccgacttatatatggatgacgtaccaaagtacaggtaaaacatcttcaatttttataatagtaacgacttatgcgagaattgagcaactttctggcatacttgtacgaaaattttgtatagcaaatttgtgcgttccattccacaaaacttgactacgccatgttattatctgattcagattttggaatcacttttttcttggcaacttttaataataaactttgtagtagtaattcgtccatcaatttcagtcttttttttttcagtctccgtcgtctcactcaaatgacgcctacgttgtgatacagtgcggcccaaacagtcttacatattcatggagtgatatattttatattaatttatgttgttaaatttttgttttattttttgataactatttatatacttcctccgtttcattttaagtgcagctgtagttttctgtgtccgacgtttaaccgtttatcttatttgaaattcttttaggcaaaatttgcttgtatttttgttgttattagatgataagacataaatagtactttatgtataacttatttttttaaaaaaattttaaataatacgaacgattaaatattagacacggaaaccgcgactgcaaaatgggacggggagtaacatgcaagcgagtggacctaaaagtgaacttattcctattcggattgccgtgcgggccaatcagatagagtttcggcttcggctttgttcccgcgaccgtgatcgattccgagtcggcgcgggagatatccatcccagtataaatcttacgagcggcgggcgctcctcctcctccacagatcgcttagggttcgcgttgcaaatcaatcaatcaaggcgcgtgaatttctgggacgctcttcatcgatcgatccatccatccgtcagcatgtcggcgatcctcatctgtagcgtggctgcagcgtctgcttcagccaatacgtcggcggcgatgaggaggacgcgccgcgcgcgagatggcggtggcgcgccgccgccgccgccggccgggtactccgcggcggccacggcggcgagtgttccggcgtctctcctgttgattctggggtcgtgtttggtggcggcgtgcatattgttgtgatcgcgcgacggcgacgtgaagcctctttggcggtggcgcgcggcgtggcgttcacgactaattttgatcggaatttaagtagtagtttctgggattgattgtttctcccatttttattccttttgttactgctaagttttatatatgtcggaacaagcaataggaagattaatgtctatatttaatcaagatatattgtttttttttctgatttatattaatataggaaatattaatgacctagagtgagtgcgcgcttaaaaaaatacgaataacagggaatgatctaatatcgaataattaaaaaggttagacctcgaagaaatcaagtgtggagctagctatccgtgggcgtttctcagagtgtgtgcttacacattgatgaattggtcgaagaaatcaagtgtgcgtcgatgcgatgattctgacgtcgctagtagtaaacttgctcatgaatgtggattaattttggcatcttgcgttgcctagcttggaacacgagatgttttaacgatgcaaattcccgtgttagatgatgcctactaatctgttccgaccctgtttctgaatagctgggccgagtggcccactctatgtacataaaaatctctcttaactatgttctacatggttaagcttctgacgttgcttttaaatcgactatatttctaaatggttcagccggctctgtttctaaatggttggttgagccacggatgaagaagctgcctattaatctcccgacttctggcagcgttcgtttatccaacaaactgttggatgaaattttggattatcgtggcacgttttttaaactgttaaacggtgcgttttgtgtaaaaactttctatatgaaagttgctataaaatatcatattaatccatttttcaagttttgtaataattaaaacttaattaatcatacgttagtatcacctcgttttacgtgaaacgtttaatttttatctttatttttcatcttccggagattcaaacaaatcgactcgaaataatggttgagccgtggatgaagaagaacaacgacgcattcgctaagtttcgagtagtttcctggtgattactgattaattgttgttctttcccttttcttttgattctgattatatatatcgaaataaagaaatattattgtactgcatggatatagatgagtttgacgcacatgcatcacttgctcagagtaaaaaactaattctgaaatgtttgctcgatcaacgtctgctgcacggcttattgcgtggctgtgaacgtccgcaccgccagtttggtggtgatgaggcacccacgagcatttgcgcttcgtcgacagtttcgcggccacgttgtccaaggttccggtgtattgttacacggttgtggcggcttatttcgccgtggcagcggtattggcgcggtggccattgctcaatgatcgttgaagtaggaattaagtatagccaattgctagctttaaaaattaatatatcatatatgatctctctaaatatcttattcatagggctgatcggaactgctggctgctgcagccatcacggctatggccctttttggctgctgctgctgcagctgatttttagctctcgcagccgtagctgctgcagcagccagcactgccgatcacgctcaatagttttatataaattatatatcgcaccattaatactttggtctacgtattacactcacgtaatatcttgaagctcaggttgtagctagatataaatttataactcgtttttcttctcacctcttctctcttattcacatgtgtgtaaacctatactggctagtacagtacttgctcttagattcattgagcgtgtgatgctctctctacgatagcgaaggcgacacaagccgcaacgcaggcgacggccttgggctcgctgcacagaaccgaccgcgacggcccatgtactcctacagtctcgcaggttctcggcccaatcgagacgttcgcgtgggccgtgattttcccggcccactcgcggcggcccatctcaccgagcccaccgcctagggttctcgcgccgccataagaaccccttcattccccacccagccgccgcccgccgcaggggttcgcgaaggtaacgtgcgctccggctcgccgccgcgtggttttccggtgacgttctcctcccccccccgtatccctaacgcggctgtttttcgcgtgcagatggcggtgccgttgctgacgaagaagatcgtgaagaagcgggtgaagcagttcaagaggccgcacagcgaccgctacatcggcctcaaggtttgcatcctccccttcctcaaatccctcgctcgcccctcccaggatgcaagatgcgctgctgctacgcgcgagccggatgcatttttttaacggtgtttctgatggtataatgcattctagagtgatgttgaaatatgatcatccgatgcttaggaaaacagtttatatgcctctaatttgtaattgtagcttaggcaaggctactctcaaatgagacgaggatgtttgttgatatctctcgctactagctaaattgattctgtctaaagtctagacatgatggctaatcatgtaaagctaagatttacacatgtagcttgagcattgtgctgtctttgtatgcctaaagacaatggattccgaataaaaaggccatctaatgcaggcttactcatttacatgaaactttcgaattgagataaaaaaattgaattggtcgtgtttttgatttttatgtttgatgttcagagtgaaaggaaatgatggcttagtaaaaggtctgagtgagaaaacattttcttagtgaacattgggggtaaaggaagagggccctagctcttgcactagtgtagcattgtggctctcgcaacctcttctacagcaattacttcattgctttgtgaagtgggttggatcaaaaggcgtgggcttcattctgagtatgaatgcttgcctagacttctccctacattttttcccgatgttcacttaagaaaatcctgttttttgcatgataacaatccttatgtctgatcctttcagcgaacaacttttgcagttgcatatattagtgggtgaacttctcaagtgcaggacttaagttcttattatcgtgttacatatgaagttccttatatgaactgtcatttggatgtactctccaaagttgcataattgatagtcattagtatttagttatgataatcatttatgttgtaatccccatcgtgtgcacagtataccactcaaacaactttgttttaaaatgaactgcttctagaaccaaaaggctagctgcttatagttgtattctgtgtttaactaacaaattatggatgtgtgaaatgataggttcataggataggctagcttttaggattttggcatgctgatgatttgtttctaacttgaatacacttctccgcttatttcttttgtgtgctgccttgcttaaatttggtgttctttttacttccctatatgtagacaagctggcgcaggccaaagggtatcgactcccgtgtcaggagaaagttcaagggatgcactttgatgcctaatattggctatggttctgacaagaagacgaggcattaccttcccaacaaattcaagaagtttgtcgtccacaatgtctctgagctggagttacttatgatgcacaacaggtaacacatgctgccgattcaatttagtgactgaagttgagaagtgaatattctgaagttctatgctatgctgtccactcttacaaaccttgctaatggttaggattaattcttgttattgcacatttcatacaaacaggacatactgtgctgagatcgctcacaatgtctcaacgaagaagcgcaaggagatcgtggagcgtgctgcacagcttgatatcgtggtcaccaacaagcttgccaggcttcgcagccaggaggacgagtaaattgttacgctggttgagctgttttttggtcgcgttgtttgtaggaggaacattaccctgcttcgagaagttcacctaatcgttgtgtaattttctcatgtaaacgtccttaggatttcagtaatgagctgtgctcctataattatttactgtactcgacttaccttttcccatgtacactgatatcggcagtcagatgagaaaattgcatgctttgggcactatagttctacatttttactgctctctgatgaagcactaatagaggataaataatctcttgtgatcgtcgaggacctgctgaatgcgcatcgcattgctgcgaacctgcgatgtttggaacatgaataatcgttgatgggctctatatttcctccgcattcctttgtaaattgtaagagactacaagtcataatttgccattctatgatgtataaattgacactgtaaaatgtaaattgcagatctcaacgcttaaatttattcaattgagttatgattatgaaaaaagagatgtaatcatactttttgccgttaaatgcttcggaagttcggatcggtcgaccgagccatcgggctctcatgcaaccacctgcaccctattatcttgcaatcccttttatctatgcatgtatgcatctagcaatatttaaaatatttttttctcctaatctatttatttcatctatgatcgatcaaaccattttatttatggcaattaaaaactttgcatcaagacatcacacgattttattctaataaaaggacataagtttggaacaattataacccatcaattcatagcgatttgttttaacatctattttcactatgttttagattttctttttaaatgtttcaatgcctgttttcttcatcacgtagaggttaatattttattcgatgatcaataaaacatttgaccaccaattttttttcaaaggaaatgggacgatcatttgtagttttctcctagtttgtcacgtcggattttgtaaaaaactgtttctactacgtgtataaatatttttccttgaatcaaatcaaactactctgacaacaactagttcatactctgcatctaacgaacattaaaacccaaatcaaaacagcccaagagattcaggaagaataataataataaaaaaaaaggccatgctgccgctctataaacaaacagtcacccttcgccctcctcgcggaaaatcctagaaacagaaagaaatcgcactcatggcgaagccgcagcttcttctggtcgtcgccgccgccgcactgctactcgtcggtaagtagcctcgatccatggccatggggggcgcccctcaccccctacgcagcgacatctctgatccgatctgagcctgactcctcctcgcctcgtcttgcagttgcagcctccgccaagaaatccggcgacgtgacggagctccagatcggcgtcaaggtaacccgctcctcccagggggattaccctgccctctcgcctgtgtttccaggcgttggttctcttgcgctcaaagactgtttgtattcttgcttgggctggatcggctctagttgactgacgcaagaattgtttgtttagaatttcggattttattgggtcgaggggcgcgtgcttcgtgcgtattagatcatgtcgctgtatcgcgaattgtacgggaattagtttttggtggaaacaatttgtgaggggtggtgttgtgaggcgggcgagtttgcctgattcaactggattcacatctgaatctatagttctttcttcttttttttttcattggaatgcaaaatgttctgaagaaagcggaaaattgaggctcttttgtggaattgattgggcaggtgttaccttgggttttgatcaaggttttccttcgggaagtttagccttctattactgtatttcctgtacattttaattgctatcaaaattagttcatggagaaatgaatctctgcgtgaataattgcttcagggcttttaggttccgtagttctaatatcccatttgccatcgagtaaagctacttaacaaatcgtaggaggaactacaaactaatactcccttcgtttctaaatatttgacgttcgttgacttttttaaatatgtttgaccgttcgtcttattcaaaaaatttaagtaattattattttttcctatcatttgattcattgttaaatatacctatatctatacatatagttttacatatttcacaaaagcttttgaataagatgaacggtcaaacatgtgctaaaaagtcaacggtgtcaaatatttagatatgaatggagtattacatagtaccttcctgtaagggacagggcgtcttgaacatatgacctcggacataaatttattctctaccataggataatctgaaatattggtgttacgctgccatttcttataggaaaaaaaataaaacaaaaatctagcttgccccacgcagcatatcttcagaattagtacagccttgccaaggaaagaacattgtaattgtcaccacattggtccaaaaatatgcattttatttattttgatgctctagagaaaacggtagccttttacaaaataaatggctctttcaagaagctggatctcaaatttgtgtgccatatagaatttagatagtttaaatatcatatgctactttcattttgatatatttattttattgggctcatatagtcatatatttgtgttgtgaccttgtttcacttgcagcacaagccagaatcctgcagcattcaagctcacaaaggcgacagagttaaagttcactaccgtgtaagtttgatattctgctgtatggcctgttttgtttttatttactggcatcactttatttatgaagcctgtagttcacttggcctctgtcatccatttacagggaaaacttactgatggaacagattttgattctagctatgaaagaggtgacccaatcgaatttgagttgggcactggccaagtgatcaaaggtaatagtaatggtcccaatcaatagctagctactcatttaattttagtattgtttaaaatttcaatgctccattgtctatctaaaaatttcaatactccatttgtagggtgggatcagggcattctgggcatgtgcgttggcgagaagaggaagctgaagatcccttcaaagctcggttatggtgctcaagggtcaccgccgaccatccctggtatgtcgttttgtagttcttgtctcttgagtttatgccgctgtcaagttagaatggtacatccttttcaagagaagttgtgtataataaaaatagtttatcatacaacagcacatggccacattgtctgagggagctgctgcaatgctatattttttctagtcgggactttttcactacatatgtaatatatctgatctgatctggtgttgttatgttccggcctgcaggtggagcgactctcattttcgataccgagcttgttgctgtcaatggcgagccagccagcaaatccgatgaggacgatgatgacagcgagctttagatagccaggatggttcacatcttacgcgccaaaacaaagtctagttgtcgaatcaaatagtgagtagtgaaatgcaatgcatttcaaattcaggaccccatagagaaatcaactctctttttttttcaccatgaccttatctgctattttataacataagcttctatttaacttttagcctttctgaacaattgcatgatctgtgatgcatcttttgttccaaattgtagacttgttttgcgcttcgttttgtttggaaaatggttacaaacataactgctgtgccggtttggcttctatgtgtgatatagcatccgaattgtatgaagttcgaagtggacatatccaggctaaaacctgatcagtttgatttaatttgagttaatttagcttatactccccaaacaaattctggtaaagaatagtaccacatgattaaggagatcaacaaactttttcccaaacaaatacaaacggaaatccgtaaacctgattcgatttgcatcagctgccaccgcaatgtagcctttcagaggtgaaatcccagatcatatatgcaaactaaatccgtgaaatttctacccccagaccctcaaactaaatccgtttaaataaccaagaattgcaattagaaattgcataaagatgttcacagaagagggaggcaaacaaaatgctatgatttgcttgcattttcttcagtctacctcactctcgttcatctcggtgaaaatcaattcaattcgaattctcatttcccaatgtcaaatctcagcaaaatctgggccagaaatctgaactcaaa

SEQ ID NO: 8796 - DNA, 50229 bp, Oryza sativa
ggggagcgcggggcgggagggtgtcactgatggcgctgctggagcaggcggagcggcagtggacgacggccgccgccggggacgccagccggaggcgcgtcgcggacgaccacgcggcggcggcggaggcgggcacgaacaagggcttcgccggcgccgccgccggcgtgggagggcggtgctgcgtgtgcatggcgcgcggcaaggccgcggcgttcatcccctgcggccacaccttctgccgcgcctgcgcccgcgagctccgagtcggccgcggccgctgcccgctctgcaacgccgccatccacgacgtcctcaacctcttctgatgtcaccatctccgccgccggcgacgacgccgccaccattaattccgtcgacccaatacaccattgctgtaatgtacttgtagataaaaaaaaggttctactacttcttggcttcttggcaactgcaaatcatatcaaagaattctcagagcatcacctgttcatcaatcacccacccgtgctacacaaccaatcgcgcgattcttggatcgatcgaataaccctctgttcctccatggcagcaacgatccgcagatcccggcacaagtgctttgctgctgattagtaattacgtttgcagccacgcgagtgattgaagattaagttggcgcatgtaattagcacataattaattaaattttaattattataaacttgataaatgagtgtatttgatttttttaaagcaacttctatatagaaagtttttacacggaatatattatttagtagtttaaaaaaaatgctaatgaaaatcgagatataatctacccactctgttttataatgtaagttattttagatttattaatatttatataaatacggacaatattagaatgatttatattatgaaagcaaatcttaatgagaaaataacaggttgctcggtttcagtgcatcgcagtcaccgttgaactccacccgtttgctcggtttcagatcaacgcattagttaaaataaatcaattgttttttcagacgatgcgatcatgtgatgtcatggctggaggagagaagattagatagggatgagttgaaccgtgagcccatctgaccaacggtactccaaacctgacaccttcgttctgatgatgttgacttccctgaagaaatgatcaaattaatttatttcagactaagatcacaccaattgacggcctctgcatgatccggagttccggacagtccacttaaacggctaaaccctgaactgacaaaaatttactgtactataaaatggtttcagaggagatactaaaaatgtggcacctttaggatcgtaaaatcactcttgaactgaaaacgtagaggatacgtacatcattgcttattgcatatgaatatgatatcttgtatacttgtgttgaggctatcaaggccagcactacagtgccaatcactttaatcacacttgtactaccatatttgttagttaagtactagattgagccaatggggcactaacacacactaacatatgcaaccatgcaagcaatgggcactgaaagtgtactttgtaacattggatatattatatcatgttgggtaagctaacttttaccatcaatccatcatgcagaagcacgggttcagagtttcagagcaaaaaacaccccaatcttaaatctaaatctatccctctctagcctgtgattgcgtgcattcgtcgccgttagcctgtctttgcgagcggcgacaccgggaatgatggcgacgccctgcatctgcatgcaaatatgcaatgcaaagcgctagggaccgggaaatggttagctgaattcgctgaaatggcaggagagaagaactggacctttttggagatttgcaagggttcagacaaagcgcattagctggggtggaattgccgtttagcgagcaggaatcgtgtagggctcatgcagtggctgatgacttgtgacagcctacaggaatggggtacccaccactgtactggtacttcgcctgtaatggatcgagagaataattgtacactcagatcttgttgcttaatactttaattccttctggaattacagtcccatcgatcatcgttttgtctccaactaattgtaacccgtgagaccataaaaaactaatatgtaggtaaactttttatatatgtgttcttagctatttaaaaattaatgctgaaaaataaactacgatgagaaaaattatcaaaaacaactctaaaattaaattctaacattaaaatttgcatgcgagcgatggccaataagcatattttacaaactttacaaaaaaatatcttgtgatagattttagcgcaaatcagtctctgtaaaacatggcatgggtagctagctctggtcgccaataattgatctcctcatgaggggacacaatgacctaagcttaattaggagtttaggacagtgattcagtgaacaccgttggttgatgctgtcctagatcgcggtggttgagctgccccgtccgtctgcatggacgcagtcacactatcacaaattcacacaccatctggcattctctgcttcgatggagatagcttgcgaggaagaggaagatgaacagtggcgtcgcacagtttctgatcccaatttttatccattgccacctcagcatggctccccacaataggactatatataaatctttgcctgcctgtcgatctctgtatcttgaattcttgatgtgttcatcggacatgcattgattgattgattgcatgggactccaatccatccactgtttggattggatcgaccgtttttttttttgtggttggcactgggaggaatgtttgtcagaggccggccggatgattagttaaccaaacgtacgatgagaaagaaaattaacaatgcagctagctttagctcatggttgcgaacttgggatggcgaactgtgcatggtccagacaccatacacaaatttcagaggagacgatatacgtcgtgatcatgtactccctccgttacatattgtaaggcattttagtattatcttaaatcaatttttagtgctgattaaatttatagataaatatatgcaacgcttataataacgggcgtattgtttatccgtcgagagcttaacacaaaaaactttactggttgcccatatttcctaataaaccaaacgacttattagggaataaaaattaatttataggtaaaatcattatatatttattcgtaactacttaaaagacaatgataaaaagaaataacgttgaaaatatcttaaaattaacttcacattcaaattcaaaaattcaaattatgcctttttgttttgacttattaggccaatcaatggggctccaagatccatttaggttggaggagatgggagactacggagacaaagagaaagtagccaagtaggatcagaaaagaagcctttcgccttcccatcaacgagtattcctcagttgaggtccttgagccctgaggacgccagcttaggggcctcatgcctcctccgtccagtgtcctgctcgataacgtgcttgtccatgcgattccatgtaacatgcgctgtagccatcagctatgctatgcaacagttgcaggctctacaggttagcacctaacagggatctcctcttagatgctagcacagtttgttatgtttcaagatcaatgtaaatatttttttagaaacacgttacaatcacataagctcacaacgcgtgccctacccctataaacattttcggaagattaggtcaatatatatcttgagattaatgaagtcaccacggccgtatctaactatagtacttaatccgggtgggttggttccaccacaaggaacctaactagttgagctacactcacttcgcaagatcaatgtaaatattaccacgttaaatctagaaatcttctattatatactaaaagtccattaaacttcctacaaacgctctcaagttgccacatggcgctctaataaattagagaaaaccctagaaaatctgagaaaaaaagcaaaacatccgtacattgattttcattaaaattggtgggtccaatattataaaccgttatattagatttgtcttaaagctaaccgcaactacaactatggtcccaccagcctctcacctccccataggtacgtacatgatgtacgtatgtatcgcaacaaaaaaaaacacgccgctctccttccttttgtatctttttttcccttgtatatagtttctttggaatataaatgcatacatatatatgtcgtatttttggattggtactttgtaaagaggagaagggttaatgcaaaatataagtacactgtaaccatgtaaggtaattattatgtctatattcgcggacaactagctactaagctcataactaaaatatcacaccagcgttaaatctaggtctttacagacatatataaattttatcatcatatcgctctttccaaatatacatacctaaattagaaatgcaatattttaaaataaagtttacacccattatatatatagccatttattatctatctattatatactaaaagtccattaaatttctagcaaacattctcaagctgccacgtgggactcctataatcattcctaagacgccacatgacactctaataaattaaagaaaatcatataaattttgggccacatgggacttctataatcgctcctaaaccatatcacgtgaccctctaataaattagagaaaatcatataaattttgagaaaaaaacatatgtaacgtttattttaacttaaattggtaggtccaatattataaactcttagattaaattaatcttacaacaacctagacattagaaattagaagtacatatggtcacacctgtacgtacgttacgtgcatatactctctcccacccactagcccacattgcaagtacatatatacatagtacgtatatgtttcttccttcctctaatcatccctccctcctacttatataatcctattctatagctaataaaatttgaagggtagaatccaatacgcttccggtccgtcacagtatatcaattcattcattttcacttaaatgggtggttccaatattttataccattagattagatctattattaaaaaaaagtaacaccttcctcatatatccatatacatgaggacaaatatattattgtggacctgggcaaaaaaatacttcttacgtacgtatgattgaagaaagaaataaagtaattattacttactactgttcgccacaagaaaaataaaccataagcacatatatacttataataaatcatgataaaggaaaaaacatatgtacgtactacgtgtacagttaggaaaaaaggtcgacgtgttctaaaataatatttctacaatttaaagataaacaacttacacagctgaacttgatctatatataattcaaatataatatatccaatcaatgttctttaaatgttctatattttaaattattttaaaattacatatctactttattatttatatttatgtaattaaataaactactaatatctatggtcctaaatacatcgcaatacatggagccgactgttataataatttttaaataattttacatcatattttagtttagggtgtcagataccactagaggaatatataacactaatttaaatctgcatatgtgaaaataaaaataaaaataacataatttagttgtttttaagtagatatgatttaattttaatttgacaaaaaattggaattttttaagactatttgattggtatttgagaagtgagagaataaatacaacataggtgtgaaaataattatcaaaaatatttccagcctatgatcttgctatatataatacaactccttaatccatcttgatatttatggtcattatgtatgttttttctttgctatatagttttgataacaaataaataatcaagtaacatgtgcgtaacaaacttgacgttacactatagatatttgtcaaaatataaacaataatatagtgcttaggagattatcttggtagtattctttaaaaaaatgactttgtcccggttacatataaattcctcttttgttttgggataaaatttgactcatcgaaattatgtgacgaagggagtataagcaatataagtctatctttaattagataaagtagtctattagctacgttttaacgaaaaataatttcattaatatataataaatccataaagtcatctatagcacacaataaaaaatgttagtaaaattttggaaactgaaatgctaaattctaaaaacgaatcacatatagtacaaatatatatgaaccaactccatcattgtgacacaattttttcttggttgtacagtttcaaataattttagtatagagtttatacgttgcaaggataatcagaagaaaaacataaccaatgtccaaacctattattaaccaaaatatgtttaaaatggactcaaaaaaatatttcaacaatatcatcctaacatttgtaataaaaactaaagcaacattaaataaggtgtctgcgcgtatgcgcgggctactttcctagttttctataaaacctatatataaaaatgtaatccatgtctttgagcaacggtgctgaaaaaaatgtgaaaatgtggtgacaccggtataagataatagcagcgcattgccatagtgagttttgttcggtctctaaaaaattcagctttgaacgtttgagatagctgaaattgatggattaatagatagtctgacttttctgataactatttaagggtatccacgaattaattctctctttcaaagttgttgcataaaaacatttcaaggaaaaaattatatagtttttttacacaaaacgtatgatttagtagattggaaagcatacagatgaaaaatccaaaattcataatcagaaaaagaagtacgtgaaaaaacaaactagcaatgggccaccaaggcccatctcaacattgccaatttctatatgggccgcaagtaaaaccaccgggatatacgaccgccgccgccgccgccgtgctctcgctcgcagggcgcatcggcgagccgccatggcggagcggaaggaaggggaagggaaggtggtggtggtggaggaggaggaggaggagcggcggctgcggggggcgctgcggagcctgcagcaggaggccggggtgctggagcggctggtgtacaagcaccggaaccagcaccgcggcgccgcctacttccagtacctcctcaaggtgaggcgcgacgtgaggctgctcctcgccgccggcctcggggacgtcctcaccgccgtcttccccgtcctcgcctcccgcaagccggccaacaccatcctcgccgtcaacaggtcaagcttcattcctatgcccccccttggaacttgaatcaacgctgataaaattttgtcgtagcgaggcgtagaattagacgaagccgctctaggattatggcttgattgtgttttttttctttaggcagagtaagaagaagcctggtgcaaaccattgtcaccatgagaggcttttgggtgtcgcacgcttgttatcagaggtgagtgttatactgttattcttttttaccccattgggattcaacacttagcttaagtgtttagagaagttggaagttggaaacactaatggtagtttggacttaataatgtgatgtcaactgacatttttttttcttttctgctactatccagctaattatgacatagatgcaaattattgtgattatctgtaacttatttaggatggcactcttcaccggcccaatgaaaattattgtgattgtccttgcatatttcaaagtcctaaaggaaattttaggtcatatgcaaatccatttatttcctctatggtatatgcggaaaattaagtgacaagctttgtatgctatattcaccattcttgatatgcttctggacagctctagctgatgatagctttacccaaagagaaacttatattttctctgttatgtgcagatggctgaacctgttatgatgggagcagtgtatcctttgcctttttttttgtttctttgttccttgtattctcttgtgcatagaaatattttttttgactggatgcataatatattaaactgtacacttacaactggtttgtcttgtgcaacgcgtgcctcatatttgtactagtatctttgcccattcttttactttcatatagttcaaatagatatgttcatttccctgttttggtaacaatcgatagttccttaacctgcggtatagtcagatctcgtttttacttgcaagatcattttttgttgatctttgcacagcgattcttgctttgctagcaagagtgagggctctggttcaacaggtgagagcagctgcagaattacctacagccaagactgtgttgctatagttatagtaggaaatatatatagtggaagcatatgttggctagtaaggttctttccctcttttcactgaccctatattgtgtgcagatgctacttgatgttgtctcagtttacaacaaggcttctgatcttattgataggaagcaatctgttaagattagtattggtggagcgcaggtgagtttgcttccagagtagcactctgcatgcataactgtcaaatgtcaagcatgatgaaactatactacgtcaaatcatgtttggattggcagaaaactatatttattcaccacataaatcattcatgtcacctttttttttaaaaaaaaaaatccctacaggctttcagagagtactatccctcaagcaatgatgcccgtacttttctggaatgtgtttgggtgaaagataaatttgttttgcatgaaaatacaaaaggtaactgtgagaaaacccaagctgaggatcaaaagtcatgtgcttccgaatcagcagtcctgtatgaaactcttggacaagtttctgaaggttgggatgcaatattttctgttcttcatgatatatttattaatactttggtttcttggtcgcattcttggaatatttacaaatgtccatggcatgttgttttgcatggtatcatgatgtatattagtatggcatttaacttctgattgttgtatcgttaccaccagataatttgattgtgataggtgatatggtgctggctagtatgttttgcaaatttcttcaattgcaatgattacttcatggaataaaatgaaaatgttttcattaccaatagttatgtactccctccatccacaaaagttacacatattacttttgacaccaagaccaaggggaaattaaatcaccttggatgttacaaaatcaagtagtgttgcaaacatgcaacaaatgagtatttagatgactccttaagttctaataaaacatttaatttatctcttcatttaagtcttgaatacataaagactacaaataggaacaacttatttggaaaaactcaaatgtgaaataggtgtaacttttgtggatggagggagtatttaatatgagagggcactacttttatttatggtttgatagcgtcaaactttaaaaggaagtttcagataattctagtgcttctgacatttttttcagatatggaaaatgctgaaggattgaactctcccatgaagctaccagatgccaccttagcaaaccagccagagaaaacccattgccatcgtgatgaagattctcaaagtaggaggcaattggtgaatgacaacaattctaattctctttcagatgcagttgctactcatgtgcattcaactccatgccctgatgtcaagcctgagacaaagaagagagttgcattcattgcagttggaaatccgaaagccactgctagttcgattggaacaactttaactaagaagcagagactagatgtgattccacgcgccactgcagaacctgaagatctatatgtcaagcctgagacaaagaagagagttgcattcatcgcagtaggaaatccgaaagccactgctagttcgagtggaacaactttaactaagaagcagagactagaggtgattccacgcgccactgcagaacctgaagatctatatggcaaattttctgaggatacagacaagtccatattttagattgttttgcactgcagctgaccagtgatcactgaaatacttctcagctttctaacatgaaaagaacaatcaatacaaaagagggctcggtgtagctcaagatatggttaaattttgaagcaacttttgctgtagcatctaggaggttgcttggtttatctcgctaaatcattagtatagccttcattgtattctgggatgcaatattattttgtcatccatttttcaggtgtaattttgcacaaagatgaattttagttcgtcccatctgatgttcaatgtaatatgcattcattctttgatttgacgctgactgcattacgtttgtggagtggccttaagaactcgaaaattcaggagtctggaacgaagtgtatcttgaacttgggttctaaagcatcagattatgcattactgtcgaaaaatcatatgcagacaaaacatggtaataattcctctgaaaaatcctccgtaagtgttaatgctgatctgaagttatacaagaacaccagaattgcatctaataccaagtgatgtacgtcacaagatcagaagcagaaaaaactaacagtaacagattctcctgctgctatctcatcagggcaaactagggagagcagctttgttggaggagaggaagctgacccgtccgttgtcaacatggcaaaatttcagaggaatgccctcaaacttgttttcaacggtttctagttcttcccttgatggtggtttgttgctgcaccaaattgaaaagcaatacatcaaaggtaggaacaacaatcgaagtacacgcaaataacccaaaagtcatgaaccatacgtcgttctcaattttattgcatgtaatgtgacctcttgcgcatttctttacctaccttatgacttgtatggtattttcgttacttctcagtattctttaggggaagttggtgaacaaaaagagtaagtcaaaatagatggagtcaatgataaaatataaaagaaatcatatgattgggtatgcaatttgatgagatggcaaccaactggaacttcggtgctaagcttgaatcgcattcatataattaacatagaagccactttgagtggatataccaggatgacaaacagatctatgactacgtagtacatgaatagcacgtcatagatacatcacgcatgacaaaatacaaaagcttcataccatatatgttactaaatttatatcaagaaaccacaaaaaatgatcatttatgaattgacaatggacggtcaatgcagtaattcaaatatagcactagtgaagatgaactttgtgatcaaaataaaacacaaaccatgatgagatgaaactagagcacgtttctaggtctggatggatgacattcaagtgaccggaaaaggcaacagtaccttaataggcataggacgaaactagggtctcctggggatgtcttcttaaatttgctattcggtagatacacttcaaaggatggatgcatatcatctatgcacatttccttgagcaatttagttatgtcattggaggcaccaccgactctatttaagctctgaatctgatcagtttcaaccacacttgtggaggcatcagtgacgctgtaagtatggctacgcttaactgtccagggaacgccatatcgtccaataatatagccgagcaacttcaagtgcttgtaagcttggaaggcatcccaggagcacccatatttccctccagcaatctttccgtagatttcctccattccaattgtttcaccctcgtaatcaagaagaaccaatgcccctctttctgccaagaacctgcacggtttggtcagctgacaagcctcaaattgagaacgaagcgaaaatccaaggcgtgagaatcatctataatctaaaagcagtgcagcagcgctagtgtagcattgtaaacagagtgcaaactttgggaatgtgaccgaagcaagtgcaatcaagtgtacaaggaatccgagtagcgcaggcatttcatcgaacaggtggcgtacccaatctcctcgacattgtagtacagcttgccgtcccggttgacaccggtggtcagccagagcttgcccttgctgtccacaacctccgccgcaccagcctcctccagccacaccgcgcgcgacgccaccttcctgctcccccgctacacaacccgatgagctaacacgaagcaaaggaaaaaaaaaaaaagacagcacctgaactggactctcgacgaagacgacgacggggcggcgtccaagaacggattgagatggtgctcctcgccatcatcctccgcggcaacggcgacggcggcgatcgccggagctcgcccgctcctccgccgccggtggtcgacggcgcgcgtgggcttcggcatggccacttccgtaatttttcccaccaaatttacccttttacctttttaccccccaaccactgccactaaaccaacgggcccacgcgccgggccggcccaccagccggcttctcagccacatgggccacggcaggtggggcccacccgcaagaggtcgaagcccactccgcctcgtcctctaccccctcctcgtctcccttttaaacaggaggagaagaatgggaaacgacctctcctcttcttctctcttcactcgtgttgaaattgaaataaatcgcggtcaagataaaaaaaaaagaaaaaaaaagaagaaaaaaatcgcggtctcctcctcatcgagccgcgcggctggatcgaggattcgagcaggtgcggaatctccaatccctcccgcttctgttcgtttcgatttcgcgtgggtgggattggctcgggtttgggaggcgttagcgatttcgcgtgcggatcgacggggagtttaggtttgatggttccgattcgtgggggggggggggggggtgttaggtttggatttgatcggggaattttggtttgggtggattgattcggtggagatctcttcttcttcttgggggaggttaggatttgggagcccgtgaactacgtgttctagtttacttcttcagtttctggattgttcgtgtggattaaccggggttgatggctacttgtacgattggtggtagggggttggtgggttggtaggttttttggtgataaggctattggatttggcaagtcgagaggttaatttcccaattctgttaaactgttcgcgattttcatttcctagtaagtgtgtatgttgtttcaagattcgtaaatttgtgttctgaattttagaagtatgaaatcctaataaattcaacagttagtttgaattgaaagacgcgaatattagggaaggacctaatatcaaataattagatatttagatggggcgaggcttcgaacacaggtcatttagcccaccaccttgtggagctagccggaagacccctaggtgtttctcaacagttagtttgaattgaatcatataagttcgtaaccccttgaatttcaggttgatttcagagttgagtgccactgattcagctccaaagttagcatgagtactgtcagcggcactcggcgtgccccaaggaggcaatcacaagatggtcctggtgataaagtcgttgtgaacctggacgcgatctcctccccagtggttggaagccgtcgcgcggtgccgacctccactggtgcgcgcgcctcccccattgatgtggaagctctggatgatgaagtgcagacattgtccgcttcgcaagtgcctcctccggtatgtcactttttgttatcttgaactgaaagtattagttcagtcttgattatattctgtactattatctgtagttattgttatatgattgggttcataatgatgtttaagtcttttaccagggtttatgtactactccctatgtttctcaggcacactagatgttcctgttaagaacgaactggtgactttgtctccatgaaaaaaatgatgcatcccttgcccacatttgttgaactgtcttgcattttgcagagaaggaaccggagaactaggaggcagcctgtggcagtagttgatctggaagtagatgctagccgggaaggttagttcatttatacaaagattgcattaatctgtcctaattcataaattagtaatcacgggaaacatgggaatatgctatctattcctatgtttgccattcatcaatctgtcctaagtcataacttaataatctgtcctatgtcacaacaataatcatgtattaagtcaagtgtgttttgtgatgataatacacagggaacaaacgtcaaagggttgcacctgttatacactgcctctctccagaaaggggagaagggtccagcttgaaggtatcctataatactatacaattgatccccacttagtttattttcatactccctccgggctggttttatttgtcgttggagctaagttagctgtggatgagaaaatttgttgttcgagtgtttttctcacgtatgggacgagattgcccttgtgcattgatgttgttattcttcccagatcaactcctccttaactccttgaatgcttcgttcccatatcacttaatgatggcatgcatgcatgcagcaaatgtggtataaatacatgcgtaatgtgtggcaaattagcgcggcaaaaagcgtgcgtaagcaaaaacgagattttctagcggcaaaacgcgcgcataagcacaaagtataattggttggtttaattttcgtatgaccttgcacgctggctgcaccgaagctgcatgcatggtgccatgcataatcgccaagacaaaaaaaatgcgcatatccgagaatcgaactcaggtccccacgcaccaagacagatgcactaagccaactgagagtaattagttgcttgtttggatgatacacccagccgtatttaataaggacaaaacaggaaataggaactttacttagtgacttcttggtttttgagattgtgtccgaaacgacaaataaaaccagcccagagggagtaatttccaagtcttcaacttttcagctttaagggcctggttggttattgattacttgtcgtcgctctttattttcttctatgtaaaaagtagctggtactgctgtgcgctcaatattgactcttttggcctccctatagagtttacaagttggcctttcagtggagtgagttatttgttttaagttgaaacttgtaggcatttttcttggtccattatgtcatagaatactcatgcttgtagtattatgtatttatgatgatctggtagagagctattaaaattgttcttgacagccactggtagttaagattcttgcttgtcacaaacaattaggattttgctaaatttcaagcattgtcttatgcattctagtgtaaaagtatctattacatgcatttgatacttgtggctgatggcttattgcgttatgcatttagcttaacactgattgcatttcctgttttggaacaatgctgtgaagactagcaatgagcctcctaaggcaaaggaaccggtttttaactgtccggtgtgttggaacaagttggaggagccctccacaacaatttgcggccatatcttctgcacgacatgcatcaagcaagccatccagattcagaagaaatgccctacttgcagaaagagtctgagggcgaacaatttccaccgtatttaccttccaaactctgatagttaaggtgagtcgtttacctatcaattgccttctcttgtatacctggcactctagtgaacttctgatttcatcaaatcgattgccttctcttgtatacctggcactctagtgaacttctgatttcatcaaatgcaggctcattggatgtaccaaaggaacttctggcagcagcagcagcatcctccaatctaatatattcagaggaacaggagttctcccataacgtgtaccattttgctgtggaattgtgtcacggcaaaatgaccacctagacccgcatgttcatccaaggctactgttgtttgtatgtagatgcatcaccaggagctcatcagctgcaggtgacaactctggtttaggctaccgaatggcctctctgcctccaaaggatacacaacaaaactaactatagtccccattggttagatttatctagtttgtgtactgttgtatttaccatgcgtttggccatgtaccttaccttctctccatagttgttgacgtagccttgaatcagcttgaaatcgtgatgatgttaacgcattacatgtttactcttgcttgtactcgtttgctgttctgtcttctgtgtcttcaagtttgccttctgtggcagagttgcagccaccaagtcggcacaagtgcagctacatttgtgttagaagtgatgttttttttttcagatgaaatggcccgtgatgaacgaactcggaataacaggagggttgaaggatgcaatcatgcaggtcgaacgaatttgacaggcacttcaacgagcaaacgagcagagacaccgcaagaatttttcaggatttcatttgctatagaaactaaatagtaccaaagccatgtttttttttacacatcaaaaacacatacagatacagaccattcccaacccgttgggatcttcattgtaaatgatttgcctcgcaagctgctgcaacaggaacagctgtatatagttcggaattctgaattaaatcgttcgttaggggcaattctgaattctgatactatatatatatatggctttgaaatataaagttctccaaggaaggtgacacatatttcctgttgtacgagcataaggtgatttgacgctcagactgataacaactgaactagggctcagtctgctttaggcctttgaaggcagtttgttcatcacaggggctattttgtcctctgggagccctctttgaggatcaatcttgtaggtgtcatagaagtccaaaatttccatcgagatattcttgacctgagaattgatgaaaatacaatcaatcattaatggatgaaaatagcaagagaatcaaacgatgggagccagggcaagatcaagtgatcaacaggcacacttacaatgttcatgtcaacacggagctcttcaaaccacagagttatgtccttgtctttaagaacgcttgcaatgtagatgcaggctaatgctatcatatatggtgggtgtatgagaataagatccatcttgtaagtatcattgacaattcccctgcaagtaacagcagatgataagcataggaaaaggtatagttgaaaattttgcgtgcattatgttcactaatcataataaagacaattcaattcatttgtttatttctcatgtgattccagataaaagctactagatcttattgtactctatcacactgaaatgattaaaagtggtaagagtccttcaaaggatattcaatatgacaataataaatggaaatactctcttcaaatctaaaaataaatgtcaacaaattatccatgtggtaattaaaaagggttagacttggaccaccaaatgccagaaagcatctaaaacagcttttctgcataaaacaaaactcaaaacagacttcacagatacaaaaatgcaaattgttataagaagagtaccaggcaaattgtgtcagatctgttatgccagcatcctgcaataacctaaaatcaaagcatctgttaataccattgcagctctgatgttcatttaaagtatatataagggcttcggtaattccggtgaaagataatgttgtttcatcgcatgatagtggaaaaagaatcttactgtaaaagaggacgatatgggtggtaaacaactaaataatagtcaagtgcctccaggagcttcatttccatttcaaggatatccttgatttcaaaccggtacttctcatcagaagctacattttgcggggggagagcacatgtttagttttaggttagtgcagttcttcccgataaatatgtgtccatttatgattatgagccttaccacacatcttttttatgtaaaagacaagaagtcttgcttgcactgtgctctcttccacctttgatgccaaatacaaacaggttggtgctaccagacgaggatcatattcagtcatgctctttctgtaaacatatccagcatcagaacaaaattctaatagcttgatgttccactgcaacaaagaattaaatgttctggaatgaaatattagaaagcactgtgcactgtgccactgtgtactctagttcttatcgaagaaagtagagaatcacatcaacatagtagagaatcacatcaacattttgcaagccccccacataccataattcttagggcattaattagctagagaaaggaaaatgatagccttattaggaagttagaaagtatattgtttatagattataaggtagtcaccttaatgggaaagtaaggccatctacagtgtgaattcgcaccaaacaagctataaagcagtctcgcagcttagcattgttagctctagtgtgttactcatctcctaattaacatttggaacccataatcaagtcactctcctctccacctctctcttgtatatcagggaatatatttattgtgcaccaaattgagaagttctattttacttacatgagagatggctttactttcccattaaggtggcaaccctataatcttaaaaatacgctttctaatttcctaataaggttatcattttcccttctctagctagttaaattgacagtcaaattcatatggatatcttaggcactctttctcctcgatgaatagaaggcaactgcctttcccatgtatccttaaagagaatcataccttgtgtatacacgcctgaaataagtaacagcagtagctatcaccctgaaaatacaaatgacataagatcagtatcttcaaaaacttgaggtcggtatctcaaggtaataatggataagtctggtggaaaatggacaaaattagtagatatagagtaaacattatgagttacagttaaccttgtgagaacgttgaaatgcccttatggttgacagatactacagtaaagggaaaaatataaaagtataactaacatgttcgtttttctcttaaagaaattatatctcagtctttaaggccaagcagacagcagaaatgttacagcaaaaatgaatcttgacgagggaaacattaaaacaaaaccaaagtatttatgtctctaaagtaatgagccagcaatttatacactataacatatatttccacaggcttgaaagtaatccttcagaaaagtaactgccaaatttgttgcaagtagaaaggaagcagaatccccttcttaaaataattaccctaaaaaagtcacccttggtaacatttttagaaatagtctacagcgcatagagtgtacaaggaaagcctgctaactaagtcccaatgcaaaatgacaactttggttgttcgataagggcatcctataacaaatggtacaggccagaaagtggagagaaggtttaacctttgtctaactttcacctgttgtgccaatcgccagatatctgaaatcatcaaatgatttgccttaatttgtaggactaacacaaaagtacaaaacatgaacatcgagcaatcttaagtgagacgctacagcttctataaatggaacgaaatactatgcgctcctatccattttcatacctacggtagttatgctacacctttgtcgatttatggaaacaatgctagcatagcttgcagtgaccccactataaccgaataagaatacaaatctgtatgttcgagaattttccatacgaagatgcataacattgcgcaagggcatgactacacatcctatgacaacttgattcattgcaattacagcaaaaatctgtgcatattaatggctaaaagttccctttcttaaccaccgaatgaccaaacaacacatgccgtgagctgaaaatgctttgcatacaacaattatacactacaagcatactacacaaatttctaattgccttgtaactatagccaattcctttgatcaacacaacccaattaaaacgtactagtatgcatgtgacacaaagttgtatatactgactaccgaattcatctagaacgagcccactaacgctcgcatactagttcctaaaatcattctcaaatccgtttatgctaagtagcagtatctccccaattccagaaaccaggcaatcacaccgagcccggagctgagaacaaattcgcgtcaacgaaagcatcacaggaaagctaaagggaggagaagctcacggaaggacatgtggatcttgacgaggcggaactcctccagcgtgatgccccggtcgctgtccgcctgggggaccttgtccacgtcctcctggtccagcagctgcttgctgccctcgctcgccgcgggatcacacacgaacgaacaccccccaaatcagcagcagctcagctcacggattcgcagcccaagaaaccgaatcgagagggggggaaacgtgggggaggttggacgcttaccagtgcgacgacgtccagaagttggcggccatcgtgggcagggcggaggcgactccggcgagcctctccggccgaatcggcggcgctcaccgggaagagctcggagttcgccggaggggaggggggaaggggaggggacccaccggcgtcggggatggattaggaggtggttttatcaggctcgagttttgggccgtttgggctttgggctcttcgaggcttactcggcccagaccaaatgatgggccgattcactatttcgctagtattttgcctcctaaagttcaaaattacaggagcctctctggggaatgttaagattgtaagaaataattggttggtaaccagtttttgataatgaaaaaaaaataggtttttcaacttctaattttcagttcatttttttagtctacaactatagattcttagaatctggacgaaaagctctgggagaagcgggaggtgatagaaactcttcaaatagggccttgaactgtttggtgtttggtatgttacccaaatcaatcatgataaatcaaattatgtaattcctctattttgttgttgcgtcagcaaaaatgtaattctgaattgtgacaaaaaaggaacttgtatggtagaggtatgtgaatgcggatgtgatagtatttttggtttgatgccttccaagatgtggtacctcgtattacatttttggtatagtggggtacttagggtttgtttggattgctaccttccagaaatttgctatggttggtttgggcaaacataccaaacactttgttttcacaagcaaattggagctcttttttaaggagggaaatataattaaaaaccaaccatgaattatattagctttttttctaaaaggtgaaaaagtataacaaccatgaattcaaaagtgctacatcatcaacattgatttaaataaacaaagggtaggagtaacctttcatacctgtcttgtaacatgaggattgctgtggataaaatgcctatttaccccccaaaagtgctcattcccttatttatccctcgttctctcaataacactcgagcccatattccacatgtcaaaactaagacatctatacattctatatagttataacccactaagtttaaaactcaacatacaaatatactagctcatcattcactaacaataattacatataaaaactcatacaagtattcaacattatttacaattcattgaattctacaaatcaacatgcaaagcatatgtgattatcacaccttacatcatttccataatattttaacatatctattcatcattatattacttaatatatatttatccggataacatttattgattgctcccagcgaaaaacatttagtccttatttggttaatccttacgagggaggaattggaggggatttattgtggtgtggaattattccccctcaatcccctctaaaccgaacatggccttaatcattgccaaccggggctccccttttcccattaaattggaagtcatcgggaaatacatttcaccgagggccctggcaaatgacactgtagctagctctggtaggccttctttggctggtatgacaagtgccctcacatgtaggtcgttgtgcagtgtcatatattgtacagtactacatatgagtacttgacaggaggaaaaaaaaaagaaatctctttaaggtggtcgctcagtcgtctactcaccatgtaagaacaaacagttgctgctcccaaacattcacatgctgtcctctcccaagtctgaacatgcatattcagaccaaaaaaaaacatcagtataactaacagtccaatatgtactcgtgctatgtcatttgctctctcctgtatcgtaggatcagccgcagctaaaatctataattttaaaacttaattttagagttgattttaaatttttttcgtaatttatttattaacactagttttgaagtaactataaacacatcttacaagttatattttttaaattgctaataattaactgtggacgaaacgcgatggaatcatactgttcatcttcgaagaacagatgtcggtttgcacgtccttcttggcgcaattcaatacgattcaggcttgatgtcgacgacgacctgtcatggaatgataccagaattaatggatggggaacacccagcatgttgacgtctcagcaaccaatccaagtgaattatgatctaactagctactgaaaattcctttatccagtgctaaccaatcagctctaacgatgaaactgtcagggaaaaggttggagtgaatatccatgaaaacgaccgggttttctgaagaacattcagggagacgaaatgcttggatggatacatacatacatacatacatacatacatatatatgtatgtgtgtgtatatatgtatatatatatatatatatatatatacatatatatatatatatatatatacatatatatatatatatatatatatatatatatatatatgatggatggttagtttctgcattgggtctcattcatgagatgggctgtctagcttatccttcagtttcagattcttgctaagttctagttccttctgtttggctgaaaatttgtagagtgctgtttatctatctcccactgtctgaaactctgaattacagttcactagtatgagtatgtttgtttcagtctttcagaatcatgtaaattatactgttttcagtaattattgcccatatgtctagcactcaactccagtgattcctcaacttttgcatctctggctggattgctgtccattgaaaacacccattgaaaacacttgttttcagaatgttccaaagtttctttaaccaaatactgccatgtgtgtatacctgtttcagaatattccaaagttttttgactaaatattgccaagtgtggcatactcatttcagaatcttccaaagtttttttgaactaaaatattgccaactttgcatctctctatggattagatttcactaaagatattttcatcatgcagccacccatatgatccttgtacttacgcaggccgtagggtcccttggcttcaaaaaagtcaaggaatccaacctcaaatcagataaactttagtgcagcgattggaacagatgccacattggatctgattggacttgtctggataggattatcaatttatcatggccaaaacatccgtcatgtcatgtgcatacgcctgttcgtccattgccagctaaatattcagaacctaacactgaactttttccacactgatcagaaattaagaatgccaaacacaactagctcctgatcaatcaagcgacattacaatctgcaactgcaagtgagtagatgcatgtgtactgtagtataatcgcattcaaaacgaggagtactacattgcaatgaagaatttgtttcgccaagattgatcaacctgacatggcagctccttcgcaattgcagcattgcctgcccttctcctgaaagtgccataagtcttcctgtacctgaagaacataaattcttgcaacaccgaacagatcaccaataaatcatggtacttttgaaggacatatgttcgtcagatctatgcatattcagacacaatacttatcagggcaaatacttatcgttggaatcagctagcaattaactccatgaagtttcagctatacatatacatattcgatgcaagaattaatcaatacggttatacggagatcgacagacataattgcatctagcttgacgccttaatctgtctgacctacactcgtgtctctcgtagtactactactaaatatcaggattatatatgtcaatggcatcatttccattctctgcattcaatccaagaacctttcaggctttcagtgacaaccaaacggtccccctttgcaagcctgcaactgccatggattggagagcatgcttcgtcataaagtggcatgctctccatcgaaaatgacatgcgtgtgcttgatgcttcgatcgatcttgatttggtggtctcatgacaaattacgaattggggttgcacaaacatgtcgacattttctttcaggattttgccggtgccaacatgatcaatggacttattaatagcagcagcattagcagcatgttcaaccacatgtatcatgtacaagtacaactgcaactcacttaatctggaacatgcgtaattaaagaagggacatggattacagactcgtgtgtatagctgaaatagtgaaattaaactgtactctaccctgttaatcatttacgtttcagttttttgctacctaatactcgtcaaaaatatttgacgagatttcgttaaaaatttaaagttccgaccatcaataatttctttaaatttgctgcctgttactatagaaaatatttagggcgagattcagttaaaattttagaattccaaccatgaataatttatcaaatgcttagtttttttaagaaataataaacatggatttgtctcaaaagtagtatcataaccatgatatcgtaaacttattggatatcataaacttattctaataaaaagttggtttttagaatttaaaagtttgatagaattttatcctaaacattaaatatttataaccgcgcgtgggactaccaaattacgtgaaacatagtactaggtcagttcaacccaaacaaataacatggaatgtaaaaaaaaacacaaatattagataataaatagaagtgtgagccttcgaatctaggccggctagtctaccaccctatggagttagccgaaaaacgctgggcgtttctcaacagtgaaatatataacaatcaaattaaagaatcatgcatcatatccaattatatggtcgagcttaaccaaatgattagaggggagaagggagcacagacgttgctctcagctcgctctgtcactacccagtgagccactctgtcatgcacgttgcctcgattgctcagtaacgcactccctccgtcccacgatataagggattttgagtttttgataacaacgtttgactactcatcttaatcaattttttttaaaatataaaaaacaaaaagttgtgcttaagatactgtagataataaagtaagtcacaaataaaataaataatagttttaaatttttttgaataagacaagtggtcaaccgttgcaagtaaaaactcaaaatcccttatattatgggacggagggagtagttactagagtaatacccatgcttttctaaagataaaacaaaatatattatgatattatctaaaataattcttttataaatatattatctgtcttttttctaaggggaatattcatcttaacttagttttatatgtgtttatcatttagatttggatagtttgtaaaatttatatgtgtttatcacttagatttggatagtttgtaaaatttataatagaaagatgaagtggtagattactatcaagtaccgacatataattaagctggattgaccaagcatgcaatgatataagttactaagaacatccatgtgaaataaatatatattccttccgttttttaatagataacattatttactttcaaacacatatttaaccattcattttattaaaataatattatgcatatgtataagatataaatcatacttaaaatatttgaagtgataaaacaactcacaacaaaataaattataattatgtatttttttaataatacgaacgatcaaatgtgcgataaaaagttaactacgttatctataaaaaaaatgaggtctatggcattgctctcactctcagctagccaccgacacatccagaaacgcgtgcagacgccggccatggctgatggcttaggtacaggtacatgccctaacattgtctgcatttgcatgtactcctatatgaatgcgagaacgacgacgaccgtacgacagtaccggcttttgtatcttacgatgggagctgggcactgtgctgctgtctaacgctgataataataatactagtaatcaattaagtcatacccttgctgctggacctgtctgtcatgtggaagatacgactgcacccccccatggtctgctactcatatgctagctgactgatcagtgatccagttgtagtttttcgtttcctttcagctatctttatgataataagctgtaggtgtagggaccaaagaggatttttttttatttatttttgaacttttctatttttaatcttaaaaataaacactttcaaaacttatttacttataagatctgaatcttttggttatgtcatgattggcatggcaaaataacattgtcacgccgatctggctggcgtggcagcgttatttggccacaccatcctcactggcatggcgggataaaactgttatgctcgctgtgtgtgacgtgtcagtattgtttcgaaaataagttttgaaagattggcatggccaaaggttcaaattctgaaaacaagttttgaaatggtctacttttaaaataaaatataaaaaaataaaaaaataaaaaaatcaccaatgcgtggttctttaaccttttgagatcaatcttgcaaactcgtgcttgttttgcaccctatattcatcggatttttctcgcctattagagcaagtttaatagtactctttccgggttgataatacttgtcgttttggataagggtgaggtcaaactttagaatctttgattatcaatcatttttaaaatatttctctttcaaatatggtgactatatgtatagattggtcttaaaaaatactttaataagatcatatatttgtttaacacttttatatatattatagtagaaaataatggttaaagttgttttttggagaccgtgcctttgtccaaaacgacaagtattatcaacccggagggagtataaccaactactagctctaattcatctatagtcaatctaatagttcattcatacaatagttacctatagacatatactaatccattaatatatggtctcacctctcatacacatacaacgtattggagtccgtgccgcagctagctataaatctgtagtctgctttccttctctctcttcttttctcttctctacatgtgtttgtagctgacttatagcctgccattgtactcgctcttactcgctccacgcttgtaagattatacgatttctcaaaaagctttcatctaatgcattggttaaaccattatttcagatgttaacgaacttgccgtacacattttgcttggactttttttctttaatttcgggttgagatggctcagttgttttcagttttcagttggcagatcattaagtcgattcggatcggagtttccgacaggtacattggttaattaattaagacacaactgagaatacaaagataatgcacccggtttttttcaagctacactatcgaattatttccgcgggttttttttatttactatacgtcttgaaaaatatgtttcctcaaaaggatttctcaactttttttaaaaaaaaaccattcctccaaattgtcgacgggggatacccatagactggatatagagggtattggggtacgctagtacgaggatctacgtagtacaacatcaagcaaacaagagacagagattatactggttcagaccccttagtaggtaatagccctaattcagttgatatgggattatacgatgggaatcacagattacaaagggaatagtggaacttgataccaacgagattgtagtcgagttggttcgactagatcacccggtgacttggctcatgtaggctccggcttcgtaggctgtggtggatgtgttggcggtaagattccatgccttaggtcctcccaggggtcccttttataccgcaggtcaattggtctccaagtagaacttggagatgtcggaccccatacgatacagtaacgatccagttctgtccgagtagtactccttccatctgtggactccgtgatgaatttccttaacgtgtacatggaacatccgtatacgtgcaggtataccatatcagtacacgacgtatatccaagggtagagggtataccttatccgtaactctgacacaaatctttgttaaatttattttatgaagtttataaaatatttaattcatcacgataatcaagtagataaataatctaaggtaataatgcgcaataacctgttttcagacagcctcgctggtgacggttgagcgctagcaaacagctcgcgcatgctgcccatgcagagagtcaatggatcaatccatgtatgcgctcgccggcggccgctgctcctcactgtgcgccataaattccaccttcggattggatctgaatatctatcatctatttttagttcgatccgtttaatttaatttgcccccaattttcactggttgatctgacctctccatcgactgattgatcgatcgatcgagccctactagctgtacatgaacaatgaacaattacatcgtgatctcttaattgaatgcatcttaattctgcatgaattcatgcatgctcttctcgatcgatcgtgttcttgaagcgatcgaggacggacgacactgtgtacttggacgtgaccgatatgcatgagagctttgtaatggtagcgttccaacgctaattaaatacaagcaaattaatcaaggtcatgtcctaatttatgcatgactaaattatgtatgagacagtattgcagcttgcaggtatgccatgatgatgttaacagtcctgcttctggtatccttgacaatgaacgatcgatcgatcgatcgatcaaattaaaggacattagctacgcacagtactgatcaccagcaaaacacatggtcagttgttaatctaatcaacctcctttaatttactccgatcgatcgatccaggtgctaaatagctgttcattaaattcgcagaggcatcagatcaccgttacattcatccattaatccagaatttcaggtactatttcactgcctgcgactgcagtatttgcttctgtgctagtaagagtacttcttttctgaagaatctgttactgctgctgtgctcatacccaactcgatcaatcacccatgggtttagtatcctctatcttcgaagctactacataattttatcactggtatatgggtccgatagaccctaggactcacatgtgagacatagttacaatcggtgttgggcctatatatggccgccgctttctcttccttcctcagggcaagcggcgtcccgcatgctcaccacacctcgaggctgattcattgctagggatgcggttatgcttgcggcatcttaacatgggcaaaggtcattacccacaagaagtggcggctcatcgtccttatagatagagttggtcctcttagtgcggcatggcctcacatgatcttttggctaaaacaactacggtggcgtcaccatgacggtgacaacaacgactgggttagaggtgaactcgagttaggatggactagttatgtccgcacgatccgaagactgccacaatcagaacggtatctttagtggcgattgatgagtgtaaccggtaacgtcagaaatgacggtcggtgcgtcgtcattggcgagctggcttcgatagccatggtagtggcaagatccgacaagtgactgttttacacttcaattactcttcagtgatatttttcgctttggcttgacatcaatcatcggcgctgatgtgcacaaaaattgatttgaataatgatcggacgctgattttgagattctatattccgttttgtaatttgatttatatcgacggtgttatctatttctttagactaatgttctagctagttttcttattagctatcaagttatgatttgtaatccgcggatgcccgatctataaattctataataattaagtttagcttctttaaatgcttcggtccaacgaaaaatatctcgaggtaccgatatctcacggtaccaaatcgttttcgatcgttagatctaacaatatctatcctgtctagttagattcaatgattgaaaatgatttgacaccatgaggtaccgatatctcgagatactttttgcagtactggagtatatctcttattaaacaaactaattgtctcaaaatcctcacgaggaagaggaatccgacgttatggcccgtgagaaagatggcatcaatgcgcaccccccgcatcgcctcatgggctcccctcccctctcgctacacccccggaagcaccgacccatcgacccccagcacgtcacatgcgctttgacaacgatctgagatcgatcgatgtgccgccgcccgccggcggccgcaaccgcttgccggcgacaaaaaaaaccggcgatccccttttgaccttgccagtctccacatgtgcaggcaagtccgtgtgtgtgtataaactagttcagcacggaacgaactcacagcacagcacaatgtgtcattctgcctgctttttttagaatgatattttttatccggtctctacatccaaccatatatatatatatacaactcttttaaattgaaaacttaatctctcaaacaacctaatctaaaaattcactcatatgaagatttgaactcagaatcataagatgctacttagtcagtgcaaaattactatattttgatcaaagttaaaacgtctttgtaatctggaacggagggagtagaatatatgtgtcattctgcctgcctagcttgctagctccactgccgtgcggtgcatgcgaggtcggaccactcccactaccgcgtttcgcccaagttgcgacgagccgaacgaccaaacacaaacgctggatgctgcgattctaccgaattttcgcctgctttctcccgtgcgatctcacccgaattcctctctctctcgtctcgtccccgtttttttttacccgtctccacgaaccaaaaagaattcgaaaccaaaaaaaaaaaaaaaccgcagcgcgcgtcctctctctttataaccttcaagtgttcgtccactccctcctcagctagcagcagctctagcttattactaccaccaccactgtactaccccgcacgacacggcgcgacacggcgcgacgcgacgcgaggaggtgagcgcggatgccggcggacgcggcggcgaaggggatgaagctggagaggtacgcgagcggcgcgggcgcgatgctgctgctgcggcgggcggcgagcgggaaggtcgtgtcggcgtcgtcgcacctgctgttccgcgccaccgtgctcgccacgatggcgctcgtgttcctcttcacgttccactacccgtcgctgctgtcgcgctccttcacgctctcctccggcgccggcgccggcgaggggggagccgcggcgcacgcctcgcaccggagcttgctcatgtcgtcgtcgtcggcgtcggcgtcggcggcgtcggtgtacgggggcgcggcgtgggagaaggaggtgaggcggagcgcgaagccgaggaaggacggggggatagccgtgctggtgaccggcgcggcggggttcgtcggcacgcactgctcgctggcgctgagggcgcgcggcgacggcgtgctggggctcgacaacttcaacgcctactacgacccggagctgaagcgcgcgcggcagaggctcctcgccggccgcggcgtgctcgtgctcgacgccgacatcaacgacgcgctcctgctcgagaagctgttcgacctggtgccgttcacccacgtgctgcacctcgccgcgcaggccggcgtgcgctacgccatggaggcgccgcagacgtacgtggcgtccaacgtggccgggctcgtgaccgtcctcgaggtcgccgccaagcacgccgacccgcagccggcgatcgtctgggcgtcgtcgtcgtcggtgtacggcctcaacaccgacgcacccttctccgaggagcaccgcaccgaccggccggcgtcgctgtacgcggcgaccaagaaggccggcgaggccatcgcgcacacgtacaaccacatctacggcctctccatcaccggcctccgcttcttcaccgtgtacgggccatggggccgccccgacatggcctacttcttcttcgccaagagcatcgtctccggcgagcccatcacgctgttccgcgccgccgacggcgccgacgcgcgccgcgatttcacctacatcgacgacgtcgtcaagggctgcctcggcgcgctcgacacctccggcaagagcaccggctcctccaagtccggcaagaagtccggcccggcgccgctccgcgtctacaacctcggcaacacctcgccggtgccggtcacccgcatggtcgccatcctcgagaagctcctcggcaagaaggccaacaagcgcatcgtcgccatgcccagcaatggcgacgtgcccttcacccacgccaacgtcacccacgccgcccacgacttcggctaccgccccaccacctccctcgacgccggcctccgccacttcgtcgactggttcgccgactactacaagctcaagctcgacgtccccaagatcgccgccaaggtcgccggcgccggcaagccctcctcctcgtcggcctccaagaagaagaagaaggccgcggcgatgtcggcgtcatcatgatcgagcagcacaacaccatgagacaccatgcaagtgtgtattccatagctagttcttggaggctcttgtctgtataacattgtaagtgcttattgtttaagcccctattaatttcttttcttcttcttcttgaggtgtttaatttttagtgattagaaacaagggaataatggtggagaaataacactgttgttggtagataaatatgagaggggtatagagatgatgataaagatcaaaaacacttggaagccaggacagaaagaaagatgaagtcactggcttccttcgaatcaaaatgtctcttttttttcttgttcttttcttttacagtgtcatcacttgttctgttcttgttccacctgatgatgtaagccatatcaacatgctgttgctgatggaatccaatccaatccaatccacatcatgaagctaagctcagctgcaagcaagaaagaacttcacttctacacttctacttttatttctgaaatctgaatcatcacaatcttttaatagataaaaccatatctttctgtctacagaaacttgtgcagattcaggccctgactctgcatttcagtgaggctcatcaaccactgacatttactacttctgcagagtgtgtatgtatgtttgtgtgatcaatcactgaatcacatggctcttgattcgtccagcaatgaggcagcaggtagtggctggttggtgaggggatcatcagcatggtccagtctctaatttgctgctcatttttagcatctttgatgggcagcatgagcacatattcagtacaggccgctgctgctgcttgccgtttcagagttcggccactgtttgcgagattttgtgcttggagacttcgacgcaagtgtactacaaggaagaaaagagagtatttttcctgccgatttgtgcggtgtttttagcgtaaattcagtagaatgtcggcacgatgtcacgaggctacagttttcagaattttcggtgcgttttcaggcacagggttcagcaaatggatattaatcaagagtgccaggctatcttcacttcactcgttcgtagtgagtgagtgatgactgaatgaatgacaattgacaaccgactttttttgtttatggtgagtaacaatcatcttgttgtgatagttgatagagacactgcatattgtctgcaactgtgctttttttttgcagttttttcccagtaattagagatatagttttactctctcctttgttctgccgcagattataacctgaaaggaattttataatttaaattcatactcaattttaggggttttcttcatgattcatcactttggttgctctataagaatccctttatggtacaccgtactacattatactattagaaaatctacctaagattatttttaaaaatcaaattctttttggattataatctgcagctgaactaaacggggtcttttgaactttggattccttttataagccctatttattcgcactggcaatctgtccatgaatggccccctttctgaaccatccatcatgcattcatgctgctaagccttagtcctaggacgattcttgtccatttcctgcctttacaccacagctgcttctttgcatggggccatcagattccagtgatgttgttccattattctactactagatttgtgctacatgatccaaaaaaagagcagagaaaacatcattgtactctgtgaaaaattgtgtatatgctgcagattccagtgatgttgcatattctactatacttgacttttgctacagaatccaaaaatgagcagagaacacatcattgtactctgcgaaaaattgtacattctgcaggcaaaaatatggccttcttgtcagcatttgcctttgtttcttctccctgattcaattggttgaacatgcagctcacagcaagaaagccaatgtgtgttcttttctaaggaaagcaagaaatacttcctctatatgagtttcttagaaaattattttaaatccatttttccgtttgtaccctcgaataatcgtcacaaaatcatttagctatttattagtgtggtgcttctgggattttgctcgcctaaccagatatctcatatgccattttctaacgctgcatcggacaatattttctgactatagttttcagtacacatcattgaaccaaaactatatggtccagtttaaatcttgggaaataaatatgtcggcatctagattgttccaagctccaaacattgcattgaacacggatagtatataggaccagagagaatccatctcataaattatgcagaaagcaacaaataatataaattaagaattagagataggcctgtacttaacaagtctgaattgatgatgaacgaggtctgtctatacaacagtctggtgatcatgttctggagcagcatgaacagaatcatttgtgagcaggaaagcaccttggatctgaggcttgtgacttgtgagatcttggaagtgttgcattgcattgtgcaatgaataataggtcaaagttttcagctagtatttcaggtcatctgtttttttttttttttttggctagagacaattgaactctgccattttacagctaaaaaataagttatagtaccaaactaattgttcagaaatctctgcactagtgcacttggtctgctatctgaagccagtgctatagtgttagtattatattagtactgcaagttggaagtctggtcccagtggctcaggtaagcttcacagtggagcaatctttgacttgcattggaatggcattagaccagaaaaaaattggacctaatccagattattggtctcccagtgcttcttcaccacttgcaaaaagtatgttactttaattaattccatcatgctgatgatctaagttgatgagcctccatttcaactcttgctgactattggtttagttgtagtaacatgcatgttcccatcattccagcttgcttcgtttactagttgatttctttgtgttcagtctttgtgcgagtctgttcaggaactggagtatctgcaaatctagcagcatgaattttcagctggattgtgatatgtgtgtgtggccatccgcctgacccactataatgaaaaattcagttatttttcagcaaatacagaaaagaaagaaaaaaaaggtccacggcgtcggtcatggccgtggtctgcatccacagtttcagagatgatagaaggcaacaaatctatttggaaatgacactctgacagtaacaaacagcgcctgcgggaagagaaaaacgccgcgggagtttttacggacaaataaagctttgatgaagtcttaaccgttgtgaattatttatggcctcgttatattccagttataccagatactccctctaacttaaacattttagaattttataaaaaaatataacaacatttatatcattaaattagtttcattacgcctagcattaaacatatattccgatagtttcttccaaaaaagtattgccaatttttctataactttgattaaaaaaaaagttgcagagaaaattgcgtcgtcgccgccacaacacctgggctccatctctctagtgggccgggctgagagcaccaggcttcaaccgggggaacaagttcacttagactcctttaagtagtggtcgaatctgattcatatctctgaaccacaataccggatatctcaaccccttaattatcaaaaccgatgcaatttgactccctcggtggttttggagggcggtttcgctgatgtggcggtgttgacttggtcttcatcctacgtggcgtttatgtggcactacaattaaaaaaatatatatggcggtgttgacttggttttggtcttatggcatagagagaagctagagagggaggaggaggaaggaaaggagagaggatgacctgtggccccctatgttagtaggtcccataatttttttttatcactaacaaatggatcccacatatatattttcttaagtctaatgccacataagcgtcacatcaccgtcacgtggaacgaagaccaggtcaacaccgtcacataggtgccaagtcagcgaaacctccctttaagaccgttgagggagtcaaattgtaccggttttaatagttgggagtcaaattgtaattcaggggtacgaattagattggaccactattaagggaacaccgtcacataggtgccaagtcagtaaaacctccctttaagaccgttgagggagtcaagttgtaccggttttaatagttgggagtcaaattgtaattcaggggtacgaattagattggaccactattaagggagtcaaagtgaacttattcctcgaccgggagaccccagcccagcccatattagccaccgggggccggggcctggaagccttagccctcgctcgccgggcgtctccgtcacgaacaagcgccgccgccgccgccgccgctcgccggtgctacggaagacgcggccgcttcttattcggaggcggcgaggagagggagaggggcttcatctgctgctgcttcggctaggagcctaggacgccatggcttcctctccgacgacaggtacgacgaactcgacgagctcccctcttcttgacttctttgcgcagcatgtctacctcagattgaaccaaaattcacaaaaactccagaaaaaaaaaatcgctagctttcggctcaactagtgagaacgaagcttacggcacaaatccattagcttccagctgcagattgtgaacttttcaaatcgcttagattgaagactatcaactcatatctttgtccttccaagaccgagtttaaagcttccagatggattaatttaacttctacattgcaattttcatgccatgcttgcattccattattattagtttatttttggggttcttatgatagtgtgatgtatttttagatggattaactgagtcagtggccaaaaggaagggctctccttgccaacaagatgatgattgccaagatgacaaacgaataagatcaggtgcagaccttctagaggtataaattactatagtgcaaagcctacatgcatgtgaattagttgtggctcgaataggaatttgtaggtaggagtaatgtggtgggcatgggaatgtgaatgttagtgtgaacccttcatttggcccgtgatatttaaagagaaaaattcattgctaaattcactctctacaagatataaagataggtatgcttatataattttaattcttttgaagataattttagatataattttaatgttaggtgtagggttgaatgcatcacattttcagtcgtgtttatatgattctgttactaatattctctgatcctagttgacgaactgcatctttggttataagttgtaggatttaatcacatctgattcaatattgcctataaagataaggacgattcagataaatatctgtatgaatttactcgtcattgataactatactcaactttgctttgacaatctccaaatcttttaaagagaagtactgaagaaaatccccagatattgttatgcacggttattcattcatctggtctactcattctatgttcttgctgcaaaacatccagatgcactatacgtatgctgtacagagtatacatgtttatttccggttctttgctattctgtcatccttagcttataatatcatattgcacagtataacaacatgattttcccgaacgcatggaaatagcatttgttgattgaacatacctatttcaatttttgctgatccttactaatcactgtctggaaaaagatttatgcaatattcatataaagatcccatgtctcagtccaccaattttttcgagggaaattctcattccacctaccacagctacataccagtgtattttcttcttctgtatgtgatgcagcacatctttgcattgctttcgtacttccagtactactgttctcacattgctttgcatgcaggacattttttggtacattcattccttaatgccacttcgagatgctgctcgtgctgcttgtgtgtctcattcatttttacgatcttggagatgctatccctaccttatgttcagtgaggagctactccgattgcaggagagtgcatttagtgatgatgagagaacgagaaatctcatcagcaaagttaaccacattttacaaaatcactcaggcattggcgtgaagaaactagagcttgttttcttggatagtactgatgtggacttaagttatattgacagttggcttcacaaggctgtcacacgagggattgaagaactcaccctgatactgcctataaacagcaatgcagaatacagcttcccatgttcgcttttatctgatggtaatggtaactcgattcagtatcttcatctctctcgctgtgccatccgccccactgctgatcttggttgcctgagaacattgacaacgttgcatctatattccgtgcgaatcactgggtttgagctagagtaccttctttccaattcacccgcattggagtggttgataatgatggattgtaaagagatagttcagttgaagataccaagttgctgaagcggctccatactctttttgtgagtagatgtcaaatgctgaaagtggtagagagctatgctccaaatatcgccacctttcacttccggggtcatgttcatgcagtgcgaatgttgggtttactgcaagtaaaagaccttgagatgtcatgttcagatcactctagcattctctgctatgctctcaccaatcttttgtctattgtcccaaatgttgaaaaacttagaatatcatcacaaacacaggtaaactctgaagcattacataattatagagtagcaattgtacataaaattgtagacatctattaaaaaattacataaaactgtagacatccattaaaataaaataatacgagacatctttatgcagattgtcagtacacaaactgtaccagggaaatatcttcgcctcaagcacttgcatatatctcttaacaggtccccaaactttgattatctttctcttgtttcttttctcgatgcctctccttcactcgagactttcatcttgcatgtaagtaactagtttcatcttgtaaagacaagtagtatatatcatccataaatataaccatcttttgaagtgttctctctgttttacaattaattttgatcctatatgtgcagatatgggacatatacataccactgggtcatatggggcatccttggactcttggagactctgaacagctgaggcagatgccaggacaccgccatgacagtctcaagaaattcgaggtcgtcggttcctgctacgcgaagggcttggtcgagctaacatgtcatatccttgagacgacatcgtcgctcgatcgtattaaactcgacacctgtggttatgttgggctttgtgcttccggcagtggcagatgttacccacattatacagaacaaatcatggaggcctgtaattcagtcttggctatcaggacatacatcatggggaaagttccacctacagtgaagtttgaacttgttgagccttgcagccgttgccctgtacagtagatgctaagttattaccggttaccatgcccatatgttttttttaaccatttttttaaaaccctacggattgccgacataacttgttgagaaaggatcattgcatcctagtcaatatctttaatatatttattcacccataaattactccagcacttgttgagcaattgttgtacaggttacatatttgttgtacagatctctagtcttaaaataagacatcactgaaaaactttacctctgagcaatggactgagcaactgttggacagctactttccaattcactcgtgttgaagtacaaaataagcagcagccttctcaatccaaaaggatataacaataacatggagttctgccgcctcagaagatgataagatagaaagcacctttctgtaaattaaataaattgtacactcaaatggaattaacttggtacagaaagaacggtggaactattcaaatactggttaatatcacaatattaatcgttttagaagaattaaatgaatatagagataacacatgtcactacagaaaaaaggcatcgttatcaaaaatagtggaacaataaagccaccatgtaagtctgaacatcagaacaggacagaatcatggaactaaaatgtccctaaagttgccgtagaacaattctagaatgttatcgtggcaaaatacagtgactatacggatcggggcagaaatttgcatcatattggggagaacatcagtataccagagaactggaaacatccagtctgtcctaatataactattagctggacattttattttattgtagcacaaaaagaactctgtactgaaacttacaatcaaacatgaagttatggtggtcacttgatgttaaattgttgatatgataatagtttttttttccttccatttcgtgagtgaaatacaagcagaaacatctaatgcaatgcaatctctgtataataacttcaaaagcttccacttacctggttttcagcaagcagatactacctccgtcctatataatataggaatataatataggaaggaggtagtatgattaaccattcatgttttgagctgggccacgatctgaagtatctgagagaagcttaaaattttcaaatttccaaactactgggaactaattcacagataatgaattaaacaagatattttcagggatcttcatgatcacaaggctgaaattagcgacttaaaaactgagtgcactgcaaataaatgacaactgatcaataaaggaagaacaatctgtacggaaccaacctgcaatcacactttcagaggtggaaactttagtgcgattttcaaatatatccagttagaactgagtagattggaaaatatccaatgtcaagttgtcgactaatattttatcagcctgtaatgaacaaaaaatcacatataaatatgttacctcatttagggaaagaacacactaccccccaaaagtcagatgcagcaactcgcaacttcttatattagacaagtacaacactaatagctagtggttttaagcatatagtacagtatattgaacaattgataactggaaaaaaaatgcatatcaactcttacacttggttccatgatgctatagagtcttcaacagagacatcagtgtgaagtgtaaacaacttgtcacctcttcagagtggaacacaatacatgatatgctacatagtaatgaaactaacattctgcataactcaaacatcacatccaacagaaagtgaactggtatagaagcatcaaattcaaacctgatgcaaataaaactcattcaatacactcaattattcttcaaaatgggtttcttataccatcactgttacagggaataaccaaactgttcttttccacaaaatactatgatactgtagaagctgcaagctaacataactttaacttgtgcatgaaaataaggaaatctcagtgaactcctcctaactattcattttgcaatttcattgtgacagttaagctcagcaccgcgcttcgaggtctagtttgctcatgaagattgctactggctcaccaggagaaggcggggtcttgtccagcatagaagcatgcacgccagctttagcacgagcagcctcatcagaagcagacaggacctctgcatgttcaaggcctacctgcctcttgatcagctccaagttctcctcgagaacactcatttcaccaaaaggaagcttcaaattcaaagcgtggggcccaacactcctcgcctcatcttttttcgacttgatgaaaggcatgcagagcttctggacttgtttgaagttagtttcctgtccgatggagcagttcttcaatgcttcattaatctcctcatcaggagcaaacaaacgtgcttggctatcaaatttagactggagaaccctcaaacattgctctttccatccataatagttctcattgacgtagaccagaccaacagtcagcttgttttgctcagatggaggaggtgcagttcccttcttgggtttcttggaaccagattcttgcttctggagcagcttcctgaatttaactatggagtcctgtaaatatttgttagcaattcttagtgtgggatctggggttccagcaattggccagcctgcctttattgcaaatccttccttcctcaggatgtttcgccacacatgctcagcatagtgtggacaaatgggggtaatgagcctagtctgcacctccatgaaccgccataataattcacgattcatgcctgctgctccacaagagagtctgtactcatctctagccaactgtaggtcatagaaccccaacttaagggcatctctgaacatgaaggcattgtagctcttctcagtttctatcaccgcaatgtttatctcgttggcaaacacatggtcagcataggtagagggaggcccagctctcagagaagattcagcggctataacctcttccatccatgcaatttcttttgtaagcctcaaaatagcagcatttgctgtttcaaagacaaagtttgcatcatccataccatcaccggcatcagcaagggcaaatctagtggcatcagaagagaattcttcaatggcctgtcgaagagttcggaaattccctgtggacttggacatcttctcagaattaagcataagatgtccattgcagcggaaaccacgaggccaatgatgctctggaagaagtgctgtatgattgtaaatgctgaaagtcagatggttttggataagatccttaccagagacacgaatatcaaatggataccagtactcaaattccagcttcattttgctcaagagggcaggagggatgtcactattgggtgctggaccatcacagaacacataatcccagacttcatctgtcatttgttctggtctgatagaagatatttccttgccatacatgttgccattttgcaaaaggtgagcgattgtgtaatatgccatgtagagggtggaatcagaaagagattctacaaggaactgctcatcccatggaatgcgagtacctaggccaaaagaacgagagcaggcccactggttcagccagcctaacgtgtgttcaaaaccattacgagtttcagctgagaatgtattcatcttctccaagcattgaactgccttctgcttccattcagtctcaccataagtaatgtaccattgatctgtgagagcaacaacacactcatcaccagatctcgacataactttcttctcaggctcgctatacaacactgctgtgccttcttccaaaagcttgttctttatcagtggcttcgcttcttgaacttttctgccattgaactcccctacaatcattgtcccatcagtaaaacctttcagatatgtcatcctttttgcttcagcaagcttctccttgtcattctgactcttaatcttaagatcgaggcacaccttctcagcagacttgtctccaaattcaggaatgttgattattggtacaaccttaaagggaagaacccattcatctttgacaccatacttctgtctcaaagctggctttgcgactaaatcctgtagtgccatgaaatcatctggagaatcacttgggacactagtcacaatgccagtacctttatctgttaagatagtaagcatgggaagtgcatatatgatctcattgaaggcaagaggggatttcagtggtaaaccaatcagatcacaaccagataactccattaagcaagttggtttttctgggacccttgatagattctgatatgcaagattaagagcagcccttgatgtaacaatgaagacatcagtgtcattgatctcaaaggccccatattttccatcaggcaatacccaacagtttgtctgcccatacattgtctcaggtctcaatgtggctgctgccaaataaacatttcttccttccatggtcttcaacttgggaggaaaaggtggaacaacttccattttaattaacacatattcttgtggctgtacaccttcaccagatgctcgatcatggtcagcacaaggttgaccatccaatggagagtagattgtgtacctcatatctttgacaaccttgcccattttcttcagctttctcatttgccaccggacaaatgcatcatagaaggggttcatgtcagtagttatgaatgacctcctccaatcacagcccagaccaaaggccttgaggtcctccttcgccaatggagggaagtaagttaaccagtggtaaggatcctgaaatttggcgatttcttcatctgataagccaaagcctctcatgatctcccactgaaacttctgcatgccaaccttcgaagcagccttagatttcttgctcttaaatttatctgggacaacagaagccgcattgtcagcctggctactatcagcaacttctgcacttgaatcatcctctacttcaggaaacgctggaggatatccatattgttgcgcctccctagagagtttatctgctgaggccttgatgggcattcccgtacagtggaaagcaaatggcaaaagaacatttgaaccacgaagcctctgatatgcagcaccaaactcaagtttagacaaggagaacgcatggcccaaatgtagcaagccattcatgtaaggatatggaaagttgccaaagaacttttccccagggcccggaggtttattcccaggttcagcctcaaaaaccttgctctcctcccaccatttttgagcatctgactggatcttgagtaaaatatctctccgagcaaaacttctgcctccatcaggatttgatgacattttcctaatcaatcaacaaaaaacaagtggttaaggctttttgtttaataaaattgaactcagtccagtacttaaacaatgtttctacacaaacaagaataactaaccaactcatcaagcacacataaaaaaataagtttttaatgaaccattgttatgcaataagatttgattgaagtcttgtgctaaacatacctacaactcatgacagggcaagtcattgatatgaagctattatgtgatctaggataacaggatcataaatttataaccaaacaaacatcttcaagaagcgaaggggggggagaaagatcagaaagaattagttaatttacacacttaatagcttgaagagaagaaaattcacactaactcaagtgttccataaacctaaagactaggtggatcatgcatcctatggatactacagcatatccacaattccacataataccaaggcagacaaatgatggaaagaagaaatccacctccaggaaataaagtgtgaaaaatacacttcctaccaacggctcaccataacaaaaggaaaattttaggggggttttttccctagaaatgctcatgtaaaactacacgaggaagtagatccccaacaatataacgcaacccagtgacataagcagagaatcaacatacactaaacttccactcttgatcagctacgacgattaactaaaaatcttatcggaaaaacgacgaaccacattgagtaatgagcactctgcccaaagccacacgaaccaatacggaaaataatcaatccaccccctatcaactaaaacggcatgataaaaactaaaatccccaacactgatgtgctaacccacccacccatccagacccctccccgacccgtctacacaaggagcagagcacaaaccgcacagcaaattgcatagcatcaacgagaaaacaaatttccgagcagcagctctgcaaagggggaggcgcgggggatgggatcgatcggccggtcggtacctgacgacggcggcggcggcggcggcggcgcgcaggcgggggagcagcagccgcagcctcagcccggagagcaagttgggagccagcagcagcaggaggaagaggagaaggcggcggcggcggattctttctgcaggggattaaagccgattagggcatatgcttgggaacgacgtgggctttgacggctttgtgaaactaatgggccgagcttcaagtgaagcctctaatgggccatgctcatagagggcctgtctgcgttcgttctcctaagttgggatagcattccctccgcacgaaaaatagagcgacctattttcttataattaattaaacatttatttttaaaaaaattattaatatgattttttaaaaaaacatctttcaatatataaacttttttttacaaaaaaactgtaccgtttagcagtttggaaagcgttgcgcggaaaacgagacggaggacttgggaacagctagaacgagcacagccttaagtatgtactccctccgtcccaaaataaatgcagttttgcactattcatgttcaacgtttgatcgttcgtcttatttaaaaattttgtatgattagtattttttattgctattagatgttaaaacataaatagtactttatgtgtgactaaatatttttaaatttttcacaaagttttcaaataagatgtacgatcaaacgttgggcacagatattatccagtcaagtccatcggaaattcgatgtcttaggtacggccaactccatttttcgtacacatgttttccaaactaacggtggtttctttaaaatagatatgaggaaagttgttttaaaaactatacagcatttaattatttttttaaaataaataaatacttaattaattatgtgctaatttattgttttgttttgtgtgccggaaagatcctattccaaagtcggatgagtaaggatcattggtctcgtaggtggtagctgatcgcgttgtaaggtgaatgactctggatcgaggctgaatctttgcatgaggagaatgattacaacagactcaatccgaactgttcatcttttttttatgacatcatgaatccatggtgctaatcctcacacttagggaggtacattgcaatttgcaatgctcattctgtgcctcccatttctacaacgatcttgcccgtggcatggccttccatgctcttagcccaagcctcctgtgctctgctcagagggtacttggaatctatggtggtcttgagcttcccttgcttggccatgtcgaccagccactccatctcctccttcttgggcatcaggatcagcggcacgagcctcttcttggagaaggtcaccctgtgcaggaacgacctgacggtggcggcgacccccggcgtgaggtcgaccacgacgccgccggcgtcggccagggcgtccctgaacaccggccacggcgccggcggcgcgcagtgcgccaccgcgtcgtacctcctgcccgacgggctccgcagcgcggcgccgtcgggggtcctgtagtcgagcgcctcgtcggcgccgaggccgtcgcggacgaaggcgaggttgcgggcgccgcaggtggccgtgacgtggaggccggcgagcttggcgagctgaacggcgtagtggcccacgccgcccgacgccgcggtgaccagcacgttcttggggccgccggcggcggcggcggcgtcggcgtccgcgtcgaacctgactccggccgccttcagctgctggagcgcggagcccgcggccgccggcaaggtggcgccatcggccgcggacacctcgggcggcctcgccaccgtgagcgacgccggcgccaccgcgtactcggcgagcccgccgcagttctgccacggcgagacagatcgtcaaggcgtgcgaatcgagacgaaatggcttacaacgctgaagaagataatatatagggtggaaactacgtattaaacttgcaaattaccgttaaatcaaaaaataggtgtatttgtccatgtcatcacgagtaaaaattttactcgcgggttcccaggttcacccatactcatggtaacatgaacgaatatcagacattaatttttcaatccaacgatagtttccactgtatttgtagtatggactaaatatttttccctgaagaagatgctcaccgggaagctcatggaaacgaccttgtctcccggcttgaagccgctcacgccgccgccgagctccaccacctcgccggatagatcaccaactgttcgaccatggcaagagttcatggattagtctgaactttaaaagtggcatctgttaacagttgctcagtaatcagtatgcatctcgttcaacattttcaatagcttcttctacaaaatcaatgagtagttagagtacttgatggtgatttacaggagtaaatatcaatgccattttgttcttgaggaaatactccatccgtttcttaataattgacattttttactttctcgttgaccattaactacctttaaattattagaccaaagtgaacataagttactacacgctacttcgagtatcttagccaactactactgccgcgttgttgagcatccgaccatttcccaatcacgccgttttcgtgatgtaatgaactccgaaaagcaatcaaagggaaggaaaaggacgaaaatgtacatgaaaatgaagtgaaaggtagccgaatacgaaagggaagcgaggaagaataatgtcctcatttgcacgtacagatagcgatcgcattcttcttcttcttttttttgcagtcttaaacatacttgtatggacaaatcttcagatttattaaaaagaaataaatgtatcttacgattttctcatggaaaaaaagcattaggcgtcacccatctttagccaactgaagtactgaattagcaactctttcatactgttatacggaagaaaaggttgtggcttgatttcttgtgtagctgaacatgtatcagtcaaaaaaattcagaagaagagcatagattgttgacacctgacaggagtacttacatatcaaaattgccaggcaaaactgaaattcagttactactccctccgttttacaatgtaagtcattctagcatt

SEQ ID NO: 8797 - DNA, 76304 bp, Oryza sativa
  unsure (1)..(76304): unsure at all n locations
gtcttacattgtgaaacggagggagtaacacgcagtggcatgattaaaggtgctcagtaacttccatgcaagcagataataaatttagaagaaagtaacctatagcacctcaaaaatatatcggtgtaatcacaaactaaccatgccaaataaaagaagtgcagcgtattatcaccagtagacttaataaactaattgggtattagagaagtgcagcgtattatcaccagtagacttaataaactaattgtgtattatcacgtagttaacagtagggaacaataaaagcttttctgaacatgtttctataacaagtttgaaactacagaagaaactcaagtagttccaggagaaagtaatatcacatggtatggttctattggaccagattcagactagaattgagaacatggaaaaggctcaactaaatgaagtcatcaatgttaagttatacttgtatgtagttatgtagtgtacagtaagtgctatctacccttttcacaaaaccatgcttatggagactacattaggtaaaatcgccactcactcttggcaagattatgtgctaaaaacagaggtaccacccaaaagaaaatcgattttcaaaatcactgaacaaaggtaagccgaggtcaccaagcatggtaaaacaatcccaaaagacaaacaacatcagcaatttaaaacgacaagctttcatttcctcagcctatgttcatatcccagtgaatcattcgaacaaaccattcctatagatgaatgaaatagtgtacataaatgttctaacactgcctatcgaacaccctaagacaagggcaacactaaactcaaacaaaatatgagcatacactaggagttaaacccacgagcacgactacccaacaatgtctctgttctatggatcaagaaaatttactgattacatatcgtaccttaattgcaatactgtaaaaccatgttgtgtacagactgcacgagttaaaaaatagttgccctaaaattactacaatcaagaccttacgacaagtaaaccctactttatctccccaaaccaccccccaagaatccagccaccaaaccctagctaaatcaaccaaagccatcaccaaatcatcccccatcccaccaaccaattcgactcccaagcgcatcacaaacccacacagccctcccaatcaacaaaccctaagcccaaagcgggcagatcgggggccgcgattcggccgggacttacagctcgcagatcttggagtggtcgcgcgtgaggatgttgtatccgacggaaaggcgggtatcggcggccaccacgcagtagtccgcgccggcgatggccacgcacgttctgcaggcacacacacaccaacaacaacccgcggccgtcgtcagcgagagccggaggaaaccacggcggcgggcggggatcgagtatgggggcttacccgccgttgttctcgtagacccagtcgccgcgcctcgacatggccgcgatcggggagctaggtcgtcggcggcggcggcttgcttgctcgggatgcggcggaggagtcgccggagtggaggaggaggaggagagagagtattggaaaggacacgcctcgctgcgttgcgcttttctccacccttgatccgactcccacgaggccatgggccttggcccaacttcgtattgggtctggatatggatcgggcatgggccggcccgtggtttttaatgggctttttagcgagcccgctttccatggtgacggttgcgattgcatttatatcgtcttgggttgaaatgcgagcccccccccccccccaccccaccccgcgtttgaaacgaggaaattcagtttgggattcgatacaaaggccggcggtttgggagagcaccgaaatttggtcgatgaaattcgagtgaaatttaaccctgatgcatggtacatgtatggccctgtttagttccacaccaaactttctccaaacttccaaatttccatcacattacatcacatccaaaattttcctactcacataaactctaactttttttccaaactactttctccgtttcacaatgtaagtcattctagcatttctcatatttatattgatgttatctacttagattcattaacatcaatataaatatgagaaatgctagaatgacttacattgtgaaatgggggaatatcaactttcctcaaactttttctcaattttaggaactaaatacagcctatgccattgagtttggctctactctttcgagggctgctatacgtacgatatgttttgtacaatagttgtacgatgaaacacttctccagtgtttaactgctgtatatttagtcccacatggatagatttaccttgtgtcgctccgcccacatgcatactaaaataaattgcaaagcgaagtagtttatgatgacatgttttgcaaagcaaagtttatattaaaatactaatataaaaaaatacaagagctaaatacatggtcttactcttagacattgcacggaaaaaaaaaagcgactagcgtaacaaagaatatgtttgtgatgcccaaataagatggattaagatggacatacctctttgcatgcagtctagattagtatcgttgtagattagatcagactgtcagtttagatattaacttaggtttatacagcataaataagaaaacaggtaaaagagggcaaagagtttgtaaactttgtatatgggcttctgggccatgaaggacttgtattctcatcatgtatccatgtttccgtgccgtctgtttggttgccgtatgttcgggcatagtcagcgccgtttttttgacaaattgacccttttggaaaacttatttcgaaactaacccctgccaaaaacttcaaccaaaaataggccgtcgcctcagcgccaaacacattggcgctgacgttggccgtgtcaacgccaacgggactggcgctgacattgtgccaccgtggcggccgggccgatccccagctgacgtggcagctacctcagcgccaaccggactggcgctgaggtgggacttggccgcaacccccaaggcccagaccagcaagccttctggatggcttgcgggctaggacctcagcgccagccataatggcgctgaccatgggacactcagtgccagcccacctggcgctgaggtgggacttggccgcaacccccaaggcccagaccagcaagcctgctggatggcttgcgggctgggacctcagcgccagccataatggcgctgatagtgggacactcagcgccagcccacctggcgctgaggtgggacttggccgcaacccccaaggcctagaccagcaagcctgctggatggcttgcgggctgggacctcagcgccagtcataatggcgctgactgttggaaactcagcgccagcccacctggcgctgaggtgggacttggccgtttcggccgtggcccagcccagcaagccttctggatggctgggctgggacctcagcgccaggtgcactggcgctgagtttggacatgtcagcgccatttagcatggcgctgacgtcccagccctgctaaactttagcaaaactttgcacacaacagaggcaaacatcaaatcacagaaatttacaggcagtaatatatccagagaaccatacaaaacatacatccatccatcaatcccaacatcattccatacatccatagaatccatcaatacatccatatatgaagtccatatatataagaaataaaaacatcccatcgatcctcgtctatacatccagtcgagtccatacatccagtccatacatccatcgaaccatgcatcaagtccatccatctatccatccatccattgaaccatgcactcacctcttcctacctctagtgcgaggacgaggcacgtcgggggtgtacctccagtcctgcgaaggagcccgccggcgtcatggtcgagacgggccgggctgcgagatatccggctgtgacgactctggtgcgtcctctagctgcgagggaccgagctcatccgcctcctcttctctgtcctcatccccttcttcctcctcatctccttcctccgcctctttgtcttgctcgccctcctcgtcacccacctccccttcttcatccccctcttggtgggcatgagcatgttcgaccacatcagtcgacctgcagccgagccttgctgccaacttccgacattgctgccgtagtctctgcataaaaaataatccatgttaagttatcgcttttggaagaaaacaccgtagtttcatctctttccaacgattacctgtagggcgttgcggagggtgccgccctctccttcggagccaggagccgtgcctagcgccactcccgcgtcgttgacggtccgcaagagctctcgagcctgtaggattgaaatgaagtaagtcacaacatatatggcattgaaatgaaataatatacaacattaatgctagaaactaaccactctgtcgcgaacaggtcccgtctcgaccgtggtacctagacgggtacgagtatcgtactcgttctgctcctcaacatcctcggggtcatccgctatgtcggctagtgtccaagccggacgtaggacaagacggtaggtcctgtggagccacgccaagtacaagtcgaactccgtcccgttgtgctgaccctggtctggtactccattctcctcgaacttctcccattgcgtgatatgatcctgatggtagtaagcccaatcagtcaccttcttgttcttccgacggtccaccctgcacgtatgcaaaatgtccaactcaaatatgtagtaaatgttgaagtgactgattgggcaagcaaaataaattgttaagtgaaattactaacttgtgtaggtcgatactcgtggagaaacggtgcgggattgtttgaagcctcccgaattgccgcatcacgcggtggcacatctggaactccactgcatagaagcagatcagtgggcaccgtagggtcttcaacgcatcctctatatggcacatgggatttagttctagctcgagcacttcctgtgcctgatatggcatccacaccacctgcagcaacaaaaataaaacacattgaagcacatttagtactatatagtaagaaaccatcttcatgtgtgatagaaccccgaatagcttacatgttctggctgtaggtagtccatctcgtttgtgtagtggtagtacgccaaattcctgcggcctactactggagatgggaccgattcccacaggtgagctacagtgggacgtcggtctgcatcctggtgcggccaagcctgatgggtcctccacatgggccgaccaactggaagcctcatccacatccaaacctgcgtcacatacgttagcttccaacatgttagcaagaaattgaaatgttatgaaacataacatgcgtgaacttacctgtagcaaccaaacacagcctgctaggttcgcgtccccgccttgccttcggcaagcatcacagagttgccgatacaaccaggctagggcagccgacccccagctgaaggtacccgcctcatcccagtccgcgagcaacggcagccacatccaagaagccatgtctccaccagagtcagggaacagaatactgccgaagatgtacagcacgtacgccctgcagtatcgctgtactgtagcctcgtctgcctcagcgggacactgaccgaagttggctcgcaaccaactcaaaggaacccctgatgtcttcgtctgcctctgaccatcaggtgccactggaggctccagaccaaggtactcctcgaccctctccctccagttccccgacgctgtgtcacctgtaaccggaaattaaatggaatcattagtaattgcaaaaaaattaacaaatgaatacgaagactcgttagtaattccctgacgctgtgtcacctgtgaccgcctgaccccggataggaagacccaggatcatggtgacgtcctccagagtgaccgtcagctccccgcacggtaggtggaaggtgtgtgtctctggacgccaccggtccactagggccgtcagagcagcggcgttgtacagaggcaccggtcgctgcgccatggtcacgaacgccaagagcttcgcccgccgtaggtacgggacgtaccagtcgtcgaacagtatgtgcgccgtgtgacctctgactcgaagggtcttcaagcgctgcatcaatagacaaacataataacataaagttagcgacaatatatcatatacaagggttgtggaaaatacatcatgcaactaggaactttaattttgggattgagcaagaaaactgaaaagaagatctgtgtgtttacatgctctgctttgaggctcctgaactttgatttgagatatctctatgatggatgatctatctgtacaaactaaaatcaaagaagaaaaaataaattcgatcataaaaaaaatggaatattgttgatgctaacctctccgctggcaatctgtggggcccggtgcttctcctcgtagaaatcctccaaccccggaaagtgctccatcctgcaaatgaaaatggaatcattagtaattgaaaaaatgccagggtgtctatcagaaattatacacacttctctattaggaccgatcaacttgtttctcaacatgttgatgaaccactcccagttggatgtattctccttctctaccagagcaaacgctaagggaacaagatgtaacccggcgtcgacccctattgccgtgagcaatgtaccttggtatttaccggttaagaaagtgccatcaattgctagcaccggcctcaagtgcttgaatgcttctatggactggccaaatatccaatatgcacgtccaaatactcgcctctgtactccatccaccatcctggacttctcgggatgagcctcaacacggaaatgcatggtagggttctttgctttgatggcacgcatcagtgtaggcaagcgaacatacgcctcgtcccaatctccccaaatgaccttcatagcaacttgcttagcacgccatgctttgccatacgtaggccgatagtgccatatttgctcaactgcctcgacaatcgctgctggagataaagttggttcagctcgcacaaatgcctgtaacctgtttccaataaaccttgaagtaagttgcaaatgcttgccggttacttccgcactacagcatgtgtggtcttcgcccaccctagtcacccgccacctatctcctccactcttccttgcattaatctgccatttgcaatggcgatcgagacaagccacagtatacttactgacgcattagattccttcacatggtacggccggtggacacggatagaataactctgtagccatattttcagatcatccatcgatcgaaactccaaccccttctttggttcatcacacattggtcgaaaggcnccgtcatattgtggatccccatcagcaattgctagcccagatctggtaagatcctcgaattgtgttatttcggggtttctacccaccagtttcgcaaacacagtcctttcatgctctgacatcttacgcactggacgatcatcatcggagtcggaagcggactcatccaattcatcctctgtatcatactccaaccagcctgggttcaatccactgcgtatcatagcctcctcacactcctctcgggtatagaatttcagcctagccaactcccttaggcccatacttacattcttaccattcgcttcttcctcaggcaactccacatcatctcctacctcccgaccatcctcaacatctccttcctctcttaccggcacattctcctccacattaacttcctcccttaacggcacattgtcctctgcatgtacttcttcccttaacggcacattctcctctgcatgtacttcctcccttaccgggtcattctcttccctgacctccacatccgccatatcatttactccctcgcccccctccacgtcttcctcaatcaattcttccttcctactacacctctccgacagttcgtgacagctaatgggtgattctataagttctttcttccctatcctaccatctttcttccatgcaaacacctcaagagatttgaaatgtgaccccaatactatatctatatatgtttgccattcgatctctccattcaagtctaacataaatttatgtgacatgacaccgccgcccacatcgtatctcccttgcataccaaccgactcatcattccaatccaattcatgcttgatgcgagacattaactcctcaaaggtaggcttcgcaaaaaacactaattgtctaactgtcattccctcaaattggcttccatgtgtactttcatctaccacacaaccaccataatgaagccggaccaatctatccatctacaattttaaacccatgcataaacattaattacttgaaaataatatgtaattaccattgcaataccaatacttcaaaagctaacaacatgtctaatttttccaataaataagtacattactcaaatactacacattatttataaaaaaaaaactctactcctacaaattacctacccttcaccacacatcaacccctttcaaaccctctcaatcaccacaaatccatcccacatcctaggccatcaccacacatccatctcccatcaaaccctagtgcatcaccaaacatccattccaaatatattttgtcaaatgtatcaataacaaccaaatagataaagatatgccacttccacacttcatccccacccatattatccatctaataatccatccttagccaactattatcaaaccacgtctacaaccaaaacaatgcaaaatatccaataaaactttggggaacttagggtttatagaggggtttaccttctcttccgatcccaaactcaatgtcgcacaaatcaccttcgattagagaggtttttgggggagattgggcgaggagaacacggtggcgaccgaaccctaggcgggcggctggggaaaaaacggaggaagaactggctggggcggcctcggccgggctctaagtagccaaggtcagcgccaacttacttggcgctgaggttgggcacctcagcgccgaagcggttggcgctgaggtagctgccacgtcagctaggggatcggcccggccgccacggtggcacaatgtcagcgccagtcccgttggcgctgacacggccaacctcagcgccaatgcgcttggcgctgagccgacggcctagttttggttgaagttttcggcaggggttagtttcgaattaagtttttgaaaagggtcaatttgtcaaaaaaacggtagtcagcgctcgtttttggtataaattgttatactaatctattagcatattagataataatagtttagaataatgatggtagtagataaggttttattttttctgtgagatttttttaactaacaaattaaaaagaaatatacatatgaagtcatagtttcaaaattttaaatccagatttgaaaactttcaactcgaaatttattttttttaagtaaaatttgaaaaactttcaactcaactttaaaaactttcaacccagatttgaaaactttcaactcaagatttgaaaactttcaactcggatttaaaaactttcaactcgggattaaaaactttcaactcggatttaaaaactttcaactcaaaatttgaaaactttcaactcgagatttgaaaatttttaaattaagattttaaaaattttcaagtcaagattttaaaactttcaacaaaaaaaattgaaaacacttactgctggaagattaaaatgtaatcataaaaaaacgcaaaaaaaaagaaacagaaaaaaaatcacggaaaaaaagaaagtgaaaaaaaaaagaaaacggtggtaggttagagaagaaaaaatcacgcgcgtgcgccgcgtgggccatatgagtcgggagtgcgtgctgccggtgtccgtgtgcgaattaggattctcgcgtccgttcgtactaatttcataagtgagaatcgtacgtgaagcctactatttcccccggccaaaaaggtgacattgcaagtattgataaaaataacatgcaccccaaattatctacgtgcacttaaaaacttgggtagtcatctgtggtctagttggtatagtgttgtggaacgagatcctctgactttgtgaagtcagagaagcacagtaccttggctttgatccattctcacccgtagcgagattaatcgatacagtactgctgtttttcgcgtcaacaagtacgctacagtatcagtgaatagtgaattagcacaatggtttttactgttttgtattgttgctacagccaaaacttcaaaacactgttatgtaccatagcaccaggcttattttactgtgtttatctgccgttcgcttgcaaagtcaaagagccggatccgtaggtgttgtacatccacgatttcacgtcatgaaccaactaaactctgcttttgatacaattgatcggtatatatactacacgccaaaaatctccctgcagtttttagtaagcgatgccattaacttttaaacatatatttaatcgtgtaaataagtcatacttgaaatatatatcttccatgataaaccaagttaaaaaaaactgataactacataacttttttaaaaaaaaaagaataatctacatattaaaaatcatctattaaaaacctaaggaacttggtcaaaactccggttttcgaaagctgctaatttaattcaagcattgggaacagtggaacacactgcctatgaatcgtactgtacattgatttgcttgtaccttgtattgatttctgcatgattccttggtttctttttttacacatttacttttccttcaccagatggaataatacacaggaatactagcctaagggcctatttaaatagcaggaatgaaaaaaaaaattgaaggaatagaaaaatcacataactctaacaagaatggaagtgattgaagtgtaaaatagataattgtaaaacacagaaccgtttgattgaatcgtggaaaaaaaacataagaatcggatgagaaaaatatacttaaagggaagtttcatccaaaatctctatagaattgtccatttcatatgaattttttttacggaagttccatatgaattttaaaggattggatcatttaattcgaaggcatttataggaattttttcaataaaattaaaatccttcaaaatttctattttttttctccgaattaaaggagcctaactttttttttctccatgcatgatgcatccaccaccttcctgacctctccctctatatacacaggcgccaccaacaaaaggcacaccaaaaaaaaatctcactactgatcatcacattcatcagtggagtgcagctagctagctagagctaagccaatcgagatgatcgggtggggcgacgtgtacaaggtagtggcggccatggcgccgctctacttcgcgctgggcctcggctacggctccgtgcggtggtggcgcctcttcaccgccgaccagtgcgacgccgtgaaccgcctcgtcgcctgcttcgccgtccccttcttcgccttcgacttcgccgcccgcatcgaccccttcgccctcagctaccgcgtcctcgccgccgacgcgctctccaagctcgccgtcgcgctcgccctcgccgcctgcgccgccgccgcctccacccgctgctgcggctccggcggaggcaagcgcggcggcggcggcgggttctcgtggtgcatcactgggttctcgctggcgacgctgaacaacacgctcgtcgtcggcgtgccgctgctggacgccatgtacgggaagtgggcgcgcgacctcatcgtgcagatctccgtggtgcagaccatcgtctacttcccgctgctgctgctcgcgttcgaggtgaggcgcgccaccacggcggcggcggcgccgccgccgccgccgacggggaccgacgacgacgacgtggaggacggcgccgccgcggcggcgacggcggcggcggcgaggcggtcgctgtggccgctggtgagagcggtgtggctcaaggtggcgcgcaacccgaacgtctacgcgggcgttcttggcgtcgcgtgggcgtgcgtcacaaacaggtgtgcctacgtaagcgactgcatgcatgcagaaattctcgttttgtccgagtctctcattttactaggtgattcccgcgctttgctgcggaagttccgaagtaacttttaatatgtttttaacagggatggatccagcgtaggtgctgtgggactcgagtccccctaccccgcttaatcgcattagtaattttatgaatttgtagtagtaataaaccaacatcattatcaaaacaaaatcagtttgctggaaatgtaagattctctagtcaaaatgttagtaaaaaaacacattaaacaggccataggaaaatgtttatatatagcctactaactgagctttctttattaattagtactctataaaagggacaatcaaagtggatcggaacaaatacaaccattgttagtggaacggctgacatgaacttgtaaaccatatttttgttaattaaagtaacttgatttgactacaagcatctctcatgtttgccccatattaatcaagaattgaatacaagtaaagcaacacactacttgaatatgtattggacgacagtccaatcaggcacatatatatggagaacaactttggcaatttgccataaagttgtctgattcaaatcaggagagaatgtttgctgcaaatgatcagatatgtacctttaatcaaccccccccccccctgaaaaacttgcatattacgcttgtttaggctatggcagattattccaagatcctgttcccaaatcaaacgatgaattctcgagagatttgcagggaattatctttatttgtggcttgatttattgtgactgtcgttcttgctttgcaggtggcatgtcgaaacgccaagcatcatagaggggtcagtgctgatcatgtccaagaccggggttggactctccatgtttagcatgggtacgtaattaaccaattaataatcagctatcacacgacttgatcattcctaacttcttttataataaatatgcagattaaattttttacgtaaaatgatgtggtattaacgtatgattgattgagttttaattattacaaactaaaaaaataaattaatataatattttagagcaactttcatatataaagttttcgcacgaaacacaccgtttagcggtttgaaaagcgtgtcacgaaaatttttatcttcatccaactcttgttggagaaatgaacgggacctaaggactaatgaacaagaaaacgctgtactctcctaactgaaatctgcatttgatttgtttgtgtttgtactctcctgtactgtgcaggtttgttcatggcgttgcaggacaagatcatcgtctgcggcgccggcctgaccgtgctgggcatggcgctgcggtttgtcgccggcccggccgccaccgccgtcggcgccttcgccctcggcctccgcggcgacctcctgcgtcttgccatcatacaggcatacacacatttacacgaaattcattcgccaagttctttttttcttctttcacctgaaatttgtctgaattcaaacggatgcatgcatgacacaagtcctcacgatgaaactgctcgtgatgaacaggctgcgcttcctcaatccatcacgacgttcgtgttcgcaaaggagtacggcctgcacgccgaaatactcagcacagcgtaagtagacaatcttatatacggtttaactggatttcactgaacttctttagtttgatctgcttcagtaccttctgtcaaatttatcttccagggttatattcgggacactggcgtcattaccggtgttgatcgtgtactacattgttctaggcttcatacgatgatcggattaagtttttttttttgtttttgttttttggcacgtcagaatcagagtgcaatgcaaagtagcatggcatgccatcaagctttgtatcactattgatcgagctatgtacttacagaatctgtacttctgatcttaggtaaataatattaagcactatttactcgatgaatgatgcaaaaaaaaaatctgatgcagcaactgcaaatcaaagtacaatagtacccaaatcaatagctagatacagtatatgtgctctacagtggaagaagagttcagaacttcagagttcagatacgaacgccatctcttcaacctctgacatactcctaatggacatggtaggtagcatctgataattaatgccaattaagcagcaccaaaaattgttcggattccatatattgatcatctgatactgcaaaattttgtgcgagtggtttaacgagcattgagtaagcttgcactcatgcatgtttcttcagattcgtgttccattttgtgaagtgcctctgaatttttgtggcattaattattctggttgtcccagagcatcgatcaagctagctacttctgccattgttggccatcatcgattctcttctcgaccaagaataatacttatcactttccacaaatttgctttcgcttggccttaggacaaatgcgttttttttttgtctgtcaggacgtcatgaattgacatgatgccatttgatttgaatgttgaaatgctacaagaatgacctgtttggaggagctttaaattctgaaaagcagctgtttggtaaccaacttctgagaatttggaaaagctctgaaacccagattctcagaagctgtagactgtttggggcagattctagcagaagagctttttggaaaaagctgcagctaggacaagctctcccaaacagggccaattggcttctactccatcactaagcctcaaattgatttgaatgttgaaatgcctcaaattcattgttgacgaatccttgtttgtttggggtcagacgaggccccgacaaaattccaaaatcatctggtaaaacattggtacaattcaaggttcacggtgccatgtaatggatctgactccaataatatccttcgctgctagcttcatccctgatatatgataaatgaataaattacatattggatcactttttataatagttttaatttgaactatcttgaactaagttttcactttttttagaacaaagtttttactttggaccggataatattttcttctttgttacgcctatttccctttggaccggataatatttcctttccgttacaccctgggccacccacatagttctcctttcacctcccctcgcgtgcctctatcattgttgcttaaccagtggaactgcatcttagtggggataattaagggctgctatgttccatttattgtatatcccgagtgatttctccactaagatggaaaatggaaatggattgttaacccgacaaaaaaagatatgaactactttaggaaagcaaaaggagtggtgattatgcaaaacttggtgtaatttcacatcaacgtagaaactgcattgacgaagccacctaatttagttattatatatatagtgcgacattgggtggctttatccattctaggcagcaacttccaattaggagtgttattgctaattaatttgctataggcacaagtgggtgtgggctttttgtttatgctgtagaccaggcccagaatagcccagagtaattaagcccatggtggctaaaacccggctccaagagcccaagacaggttgcccgcaagagagatatgaatctaaatatttttttatattgaaatttaaatcttgagttattattttcaatagtttgtcggctatgggaaatcctgatgccaatattttcaatagtacatgtcaatatttaaaatttagggaaggatcgataatatagcggtaaggttatggatgcatgattatacccgtcaagatttaaatcatagcgctcatgaatattacgaacacattggtacatttttaataagatttaatattaatcttgtattttccatgtgtgttaagggtattcacaaatgtgagtgtggtgtgcatacgcagtgtgcaccagtgtatgcgcactatttataatcaagaaaaactagaattgattgttttttttgttatatatagtcatattacttgttttttacatgtattcgtatgcttcaaattaattaccgttacagatttattgtaagtcaaacatttcagcctcttatcattattttatacaaatttaacattataagatttttatttttacattcgttatcagaaaaactttcatgatgtataattcacttgttgtcaaactgtatggattattaaaattaatgataacgaattagagatagacatgattgatatagtacgcacaataacaataaaaagtttgaaacgaatggaatatttaacttctctagactcccttgttttctcagacgagatgacaaaaaactgtccggaaaatatcctgcaggggcgtaatattcggccatttactacagtggttaataatacaccaacaagtcaacaacaaaatgcagttagcagacagctgcgcaattacgttgcgtgtttgcatacaaaccgataattgattaacaaagttaatgatgcaagcacaggcgttagctgcaaccgtaagttgacttaaatgagaaagaatttgagatcgaatcgtttagtcgctgtcagcatgtgtaccacacctctcccgtactgccggcgtgctcagctaatgctcgaagcctcgaaatcagcaaaaaggattaataaaataccatttactaaataaactacaccatgtaagcaaataactagtaataaaatgccgtctgaattggtttgattggtggggaaaaatattaaaattatgtaagatttggatcatattagaaaatttctcctatttggtgctttaaaataaagctccaagaatcctatgaaatgctcaagaaaaaaaaaagataattcgaaggaaagttagcatgacgttgaactgtatgaaaaccttttctttttgagtctttttattcattctttaagagtgttcataattatattattcctcttatattttctctctacaacttatatgaaactaaaaattcttttagttttcatatactcattttttttgcgggaaagtttttttttaatatactctcttcctacaaatcgaatgatacttatataaattaattattaaaaatccaaatccttttttttaaaacggaataaacccttaccgtatcatacggttaaaaggaccctcaaacatttaggatatttaactatttattaccactcttatatatgataattaaccatttatcacttagatccacatgttacttatgcataaggccccacatatcattgacacatggttgccaaatggttaaacgccaaatctaagagttaaaataaaaagttaaatgccccccaattttagagcggaaatgctactaggagagccctcgcccgcccagagcgatcagatttcccaccccctcccttcacctggttttcttttttagcatcgtattacttttctattttagtaaatttatgtacctaaagtttatatacctcaagtttacacatctaaagtttagagaccaaaagtttataaatcaaaagtttatatatccgattcaaatttgaatttgaattcaaatattttttatatatagtatttctatacatctaaagtttatacacctaaagtttatataactaaagtttatatatccgattcaaatttgaatttgaattcaaatatttttcacatatagtatttctatacatctaaagtttatacacctaaagtttatagacctaaagtttatatacccggttcaaatttgaatttaaattatatccgattcaaatttaaatttgaattcaaatattttctatatatagtatttctatacatataaagtttatacacctaaagtttatagatccaaagtttataagtcaaaagtttacatacccgattcaaatttaaatttgaatttaaattttttatacataaatttttctaactttttattttttaaaaacttttttatggtgtactgtagtaggaagagaagaaagggggaggaaggggagaagtgggaggagtgcctacagcggagtggggggatccaatcgcctggcgatcgatcgcgcgttaggccccccattttagaggcgttttctagtcagtttgatgaaatttgagcaaaaaaacgccgtagcctgacagcctcccctccccttcgcctcgttcctatcgcctctagtgcccaccaccaccccccaacgcccccgccgctctcctgatatccactagtggccacgccgcgccaccccctacccctcgccacgccgcgccacgccacgcctcgcccatctcctccctataaacccccccgcgcccccagctgctcgggcggcggcggcggcggcgcgaactcgaatctcttctgtccccttccaccaccgtccccccacaggagatgctgcgctgccacacgccgccgcaatgccgcctcggcgcgggcggcgcgggcgcgggggtgctgctgaggcagcggagcgaggtggcggtgcggtgccgcgcgcagcaggtgtccggggtcgaggcggcggcggggacaccggcggcgcgggcggcggtggagggtggggagaggacgagcctggcggagcggctgcggctggggagcctgctggaggacgggctgtcgtacaaggagagcttcatcgtgcggtgctacgaggtgggcatcaacaagacggccaccgtcgagaccatcgccaacctcctccaggtgcgccccccaccacccatgccgggattcctccccgtctcccaaagctactcttcgctggtcagattcgtgctctccgtggctcgatttggggtggagtcctctcggattgcgaaatgtgctgcggccacggtttgtgttgggggggagtggaagcatcgtcttcgttcttgttcttgatagattcggtggtttggatctgaatttagacagctccaatttctccgtacaattataatccgacctcatttgctgtgatgtgacaagatttagtaatactaactttcctcaaatccgtgggctatcatttgcgtagattgagctagagctttgataaagtcaggttgttctagtcttattctagtcgatgtcttttttgcttttatttatattttctggcaattaacaaatcctgagccggcgaaatcgcccatcgaaatttcatgggcatatgcttgcattcctaggtggtatcacactcctttctaatgctgattttcttgtccatgtgtaaatataataaagctataattcctgaattattatgcttaaatacctgataagtacttccaataggggttgtgtatcatgtcagtttaggtagttctgttctgtgtgtctggatgaatgtgcgtggctgttaaaaaaatattgaaattctgatttttgagttctactttggcatcaaatcatgcaaacaagtcaaaatatgactgggcgtatatcgagctagttctggtggaatatagtggattgaatataatcttgatttaaaaactaaggcagtatcaaatggaatgcttttttttcctgaaaacttctgatcattgaatttgaaaaattgataaccagtggtaacaatacgtgtttccgcgttccagaaaaacaataagtgtttctgcttctattagcatttttcttagctatcagtgttggctttatttatatgaagaacactgttgagaagcatctcattattttgtttgtactatgagcttttaatggtaagatttcttgtaaatgcaggaggtagggtgtaaccatgcacaaagtgttgggttctccactgatggttttgccacaactaccacaatgagaaaacttggtctaatttgggtgaccaaccgaatgcacattgagatctacaagtacccagcatggtaagttttcaggattgcatcgaacattgctcccacccttgtttttttagcaagatctagttctgactggtggttctgctctggtcaggggtgatgttgtggagattgaaacttggtgccaagaagatggaaagatcggtactcgtcgtgattggatccttaaggatctggctaatggtgaagttatcggcagagctaccaggtacttattgctcaagtataagagtattcataattacattattttgaaagtggttgcctgatgtgcattcactcaaccatgttgtgcatgctgggattctgaataggtattgagggggtccactggtgatgtcttacatgttttaacttaatatttctcacctctttacttttctccccaccttatttccacttattacacctacacttctccaaatgaattcaaccaaggtaagcctgtaaaataggaaaactcaggtactagattttagcaatctcaaaagagagcgtgaatcgaaacactggaattttttttaatgcccaatgatcttggtgcttgtcttatgcttgaatgttcttacacttgctggctggcaattgtagcagccttaattattcgttcttaatgagtgagacctgctaatgattaattggaacttagtagtttgtactgaacgaaccgttctcttttggtggaaaacaacaaacattttcattatttagtgtttacagtgtaacacagccatatcttcttgtttgtccagcaagtgggtcatgatgaaccaaaatacacgcagacttcaaagagtgagtgatgacgtgagggatgaggtttttgtacactgtccaaagactccaaggtaaacctcctcttgtactcatttagccacagttttcttgcacatgcacatttttgttgctttgatgcatctctgtttttactcttcaattgagccacagattccctttctttaacttggctctgttaaacacacttggatacatattcagtggttttgaattactcgagaatcagaagaatatgttttctttgtattcgtagttgcaaataattcattggtagcttgactgaagattgtacatgtattttctcaaatgactgttatggtataataattattgtaacaagctaccattgtgcagattagcattccccgaggaaaataatggcagtttgaaaaagattccagttcttactgatcctgcacagcactcaagactaggcctagtggttagttctcgtctcagaatgcggttcttttgctctgtccctaaacaattctgtgctgacatatattaatttctgtattgcagccaagaagagctgatctggacatgaaccaacatgtcaataatgtcacttacattggttgggtacttgaagtaagttttccattatctcagttttgctaccagttaactgttcttgcttcatgtgacaggctgacagccctctcctggctgtaatcttactttgagcagttatcatccttgttgatttgtgatgatttctgatctctttctttttccttctaaatggcagagtatacctcaagatattattgatacacatgagttacaaacaatcactcttgactacagaagagagtgccaacatgatgacatagtagattcacttacttatatcgaggaaggagaggagaagagttccaatggatccgcatttgctgcaccgcacccagaagagcagcgacagttcttgcactgcttaagatttgctgggaacgggaacgagatcaaccgtgggcgcaccgtgtggaggaagctagctagatgaattccctagttttgatcatacagtcatatgtattctgatccttccatttgttccatcattttgctcttggtgtctggcatagccctttcagagaatcggttgtaccccaaattttgtgttaatttgttacctttgtaatgtaccgtggtaacaattacagtttgtgacattcgtcttacctgaagttgtgcgttgctgtatactttgtactagtagaatcagtgtttatgaatcttcaaataattctatcggcaacagatagcaatggcatgccaagtttggttcttcctgtatagaatacccagctgctttcactattactatgatatctcagtgataaaaatgtctgttttatataatattataataataaaacgtgtgcatgatatgttggatttagaaatgttatgcagcttttattgtttatcatgtcataagttttgccatttaatttttgcaagtctctatgaacaattattcaaataatagatttataaattactctatttgcaagtgaacctttgctcctcatttgtggattatatgacaccgcagtcaacttgttagctgttatttgtatattgtgtttagttatgcccctagatctttgagggatttccttagattggattaatggtgagttgcttcgagctgaacttattactgattcttcttttcttcaggtcggtgttttcttattcttcctccattttacaatataagacaatctagacatatgcatgtgtttagattcattaacatctaaataaatgtgagcaatgctagaaagtcttacattgtgaaacggaggaagtagcctgtaaataaaaggcataggcaagatacctagcactactaaaactttgtaaatcaaaataggagtaacagctttcatagtttttcctgttgcaacgcacgtgcaatcatatgcacaaaactgctgcaaaaactacgaaatcttcaaaacatccaacggtgcatagaacaagcacaaatattagctcaggaaacggaccatcaattaatcccaaattcaggttctctttgagaacacacaaacagtaccatcaccacaagggaccatcaaccaatcccaaattcaggttctctttaagaacacacaaacagtaccatcaccacatgggaccatcaactaatgccaagttcaggttctttttaagaacacacaaacagtaccatcaccataaagagtacagacgcctaaagaaacacacaaacaggtttacaagacaacatgaaagctctcatactacaggagctggggatatatacagtctccaattctcttaaccatggagtaatgtttgatctgagcaacctccaaggcgaaaaactccctgatatgttgctgtatgtttcatgaagcttccctctcctgcaatttcatcaacaaggccacaaggagttcagcgtaacatacaccgatgttgcctgccctcctcatcacatgatgaattcatgacagtaaagcgttctgggtacttccttagtaggtacatcagcttgagccacggtttgcattctgttccagctgctgaagagccagcctctggtgccaggtgcatctggacctggcgctggggccatgttgcactgtaacacgcaacgagctgcaaataatcacagatcagttttcgcgttcatgggtgcagcaataatgcgaaataatgtacttcccccatcttaatgaattcggtcgccgttccttcggccgacccggcaaaaaaaaaatcataataatgtaacaatgtcttgttcaagtttctattaatggcagctgaagtatctaactaattgggaggatagtgacaatggtacaattggcaggcaccactaacttgtaatatgctgagtagtcacttaatttagtataccactcatgtaaaatgattgatttaaatagcaattcgccaattccttagtggaagctcacaatcctagggtcagtaccacctctcaagttgacaaagacacaaagtatttccaaactagtgagtaatgagagacactggatatttccaaaaggtcgcgagcttatttcatgacttccacaacatgttaatctgaggatacggtagggcatatcaggtaggtgaacatttcacaactaaattggacattgcatgctaaagagagtttataaaaaggttatttctgcatgcatgcaaaaggcagaaattgacattgattaccagatacagcaaggttttactttaggctatttttagacctgtgagtttatgcataacttctggcacaagtgatgcgaccaggggtatcatggccacatcaacaaggctatcgaaggatcattgaacttctaagaatgaggacacatgaatgtagttacccaaatatttctgttcaatgtggaactaaggacagtgcaactgatgaatatacttggtccttcagtgcaaagcgtagcctgatgacatatggaaatgaaagtaaatgcctttttctgtatatggatgctagggaattgtttctttttttttctttgagtagaggaattgtctattagttaacaaattattatttctcaaaaatgctgatactttagtgcaacatgtacgaaaggaaaattaaagtgctggataacacaacccacattcctgcacaaaacatatctggaggtggttacactaactttctgaaataaagagacactggacagaaatgagtactcttccacaacaaacctctgaatggagtttttcaataggaatcatctttttaagaccacataggtcagatatcacgattccaatagatgcgagaacatattcctcttcctttagaaggacctcctgctggtctttattattgtctgctggtcttattgctaaattattgactgcataaagaaaaataagctagttaggcatatctacaaataaaataagaaatgtagtaaaaactgatttcttgcatatctgaagagcataatgttaacaaaaaaaataatacaagtgaattggcatagcatgtaccatttagtctagaattatgtttcagtgtatccacaattttgcagaaaaaggaaaacaaaaacttgtagtatcccatatttgttctgttaatattttttttaacactttgcacaactctgtattgaaaaaacaagcagtgaaaaatttaattattccaagagatcaggatcaactaaattttgttataacaagggatatcataagacaggttcacataatcacatgatatgacaattggaaaatcagaaagatagcattgagaaggctagtagtcttggacagttctgtgcatggacctctatttgtccatctctaaccattagtttctgtaatcatgagagctaattgtttatcctctactacagtgggatgcaacgtaaaaatcaatataggccaaagaagtgatagtattattaagaagtaatatgatgccatttcaacctgataagaacaggggaatgtgtgccaacgactgccacaaattttttttggcatgcatgcctaaggatatgcgaacaaaatctgcgccactttggcaagcaaaggacatacttgccacattttttttgcatcaatgacacatgggacctaggtgttaaaaaaatcttgccactagtgtggcaataaccaaaaaatgcctaaatcagtgaaatttgtctaattgaagtgtgccaatatgtggctataaataaaacaggcccataaattttattgtctgtatgagttggttgcatacactttgcagcagaaaaccaaaatttgaactacataaggaatagaaaataagccaaacaaatcctcatgcatgcctgattatttgctttacgattcatctgaacagtttttctgagaagtatgatttccagttttacgtttcctatttgaaattgggtatcatgccaggtaagtaacaaaagataattcacggaatcaggcatatttatcagcatacatatgccatgaatgtgtatactactgctacataagcccatgaatgtgtatactacatattccataaatgtgtatactacatatgccatgaatgtgtatgttgcatatgccatgaatgtgtatattacatattccataaaagatcctaattacaaacagactgattatacacattcaaacttatgcagatacaccaaggtggcactaccatcaccaccaggtgtcattcataaaagtaaatacataaataaagtaagataggaaggaatcaggtctagcagaagaatgtgtcaaagacataccaggctgaccgccaggtgctaatgttggctcaattgtgatgtggtggctgctgcatgtatccaattcaccaaaaggcatcttgttttgattcatgaattcctcttgtgtttcaatgccagctatattttcattttcagcattgttctggatatgagcaggaggaagagtgacgatgccaatttgaccaggttgagcagtgccaatatgaggaggaggagcggcggtgccaatatgagcaggctgagcagcagcacttgcagtgagattatgctcatcagcagcggtgccattgttagcaggctgaaaagcagcagaggcactagggccatgctgattagaggaggtgccgaagatagatcgagttggcaggagaaagtagaatttcttatgtccaatctgaaggaggtcttgggagtccagtttaataggactaccacctggaaggtgaaggacaccttcaacagtgcatccacatttaccaaggactagaagggaaaaccgcttgcattcaaaatcatagaatatgtgtgcgtgatggcgggaaatagtaagatctccaccagagatgtcaagatctaccttttctctcttgctatcgcgtcccaagatgattgaataagtttgcatgaagtactcgaaatcttcaccttgaagctttgcaaatcctacgccacgattgcgaccagcagatgccataacagaaatagaggaagccatcttcaatattcctggtagtagcagtacactgagtgctactgcctttcagtttcttctacaaagtaaaagcaaggcggatgcattaaaatcctttcatgttataaaaatgaaatggttcaaaagatgctaatatactagacaaatgggtactatcggttctttttattgtattactagctaaatgcctgtgctttgctatccatagaaggaaaaaaatatcataatattttctaaaataaataaaagcatattttccatgaaatatgttacccacattttcctatagggaaggctcacattaatttaattttataatgtggcatgtttgtttggcatactcaaattgtcaaagcttgccatacttttttagctaacagcctaacatgcggctaccaaaattgaagccacactttagttcgaagagagcaaccttgccacacttttatgtgccaatgacatctgggacccatgtgatgatgaaggaatcttactacaagcgtggcacgaaccaaacagacacctaactcagtcaaacctgcctaacttgaggcaaattgtggtagtgaaccaaaaaatcagaactacaaggcacattacatgcaaaggtttggtagactcaaactgtgacaatgcacattgacactaaaaatgagaaataatcaaagtgtgcaaaaactaggcacatattttagtgacatatgcttgtctaaccaacctttctacctcttagtatgtggttttaagtaaacatagcggtgtactatagaatggcattgactggtatgaataaaggatagctatgatacatcatgtggatatttttcacaactaaatggactcaataccctatgagcttcaagaggtaatagattaatgaagcagtaaaacattatcacacaaaactgacattgtttcaaccaacgaaatctaggaactgcaatgaatttttatttgtttacttcttcagcaatgtatgatggtaaagttctacataggatgtattcagagaagccctcaaaaggctataattatttcatgaaattgatccaagtactcaaaaaaatgcttccatgtgcagccaattataaatgatcaccaaaacagtccaactcctctttggacataatgggcatagatcaagttaatcaatggacacataatggccttgtgtatcaccttttaggggtgtgtgtgtgtgtgtgtgtgtgtgtgtgtgtgtgtgtgtgttgtgtgtgtgtatgttgtgtgtgtgcgtgtgtgcgcgcacgcacgtgtgttctgtggggaggacagttttgttactctcctttgtaattattttccttttttgtttcttcttaatgaaatgaagtgtagttctcctacgttttcgagaaaaaaaaagttatcaatattgagattgcagaaaatatacactaccagatagattaatgcactgtcacaaactagtgcgatgaaacatacatttcaataaaacaaatgtgtgtgttgctctcatgtgcagtcaactataaatgatcaccaaaatagtccaactccactttggacataatggcatagatcaagtttatcaatattgagaatttttttttgcggggatcaatattgagaatttgagattgcagaaattatacactaccagatagatcaatgccctgtcacagactagtgtgatgaaacatatatttcattaaaagaaaatgtgtgtgtgtgtgtagctatgcccttgttcttaattcttctacctcacttgctgagttcttgcccttctgaagttcttagcgaagatcacacccattaccactaccacataaaaccaattggaagaatcaagaatattcctcaagcaagcactacagtagatgccaatctatgacgaatatttggaattattttcaagacgcagctaaagaaaaaacacggtgcaagagctagatgaaggtgaaagagatatacttagccaagctctcgcgattcctccggagagcgcaaagatcaccagtcgctgcccgagatgagtcagcggctgagcgagagaggaggatgtggaggcctccccaaatctggctcaaaaccctaaggatgaactcctttccactcctcgatgctgcatttaaatccaaaaatttcagttacaattttctcaccaccttcatgatgatttgcgtgttctactccgcccacaggaaaacccctaaaaaaaaacccaagaaaaccatgagatggccttgactggtatgcataaaggataactataatatagcatgtggatattttccacaactaaaaggactcaataccctatgagcttcaagatggtcatagaataatgaagtagcaaaaacattatcacacacacaactgacattttttcaatcaacgaaacctaggaactgcaatggatttttgtttatttacttcttcagcaaagtatgatggtaaagctctaaatatgatttattcagaaaagctctcaataggctataattatttcacgaaatcgatccaaagtactgcaaaaattgctttcatgtgcagtcaactataagtgatcatcaattcagtccaacttcactttggacataatgggtatagatcaagtttaccaatattgagattgcagaaaatatacactaccagatagatcaatgccctgtcacagactagtgtgatgattgatgaaacatatatttcattttaaaaaaatgtgtttgcagctatgctctcgttcttaattattccatctcacttgttgagttattgctcttctgagaaaagaccacacccagtaccaaaacctcgcaagactaattggaagaatcttcctcacgcaagtactgcagtagaagccactctatgccgaacaattcagaatataattttttcaatacacaactaaagaaacaacagacatggaagagctagaggaagaggaaagagatatactttgtcttaatgcattaaagaagaaagagagaaaagtttaagtgcagttacaaggcgcattacatgcaaaggtttggtagactcaaattgtgacggtgtacattgaaaccataaaaagaaatgatcaaagtgtgcgaaaactaggcacacattttatggcatatgctcatctcaccaacctttctagggaatataccagaactgtcacttaaagcaaagacaataatattgatgcagtatccatcgaattcacctcttagtatgtgattttaagtagacatagtagtgtggtactatagaatagccttgactggtgtgaatacagcatgtggatattttccagaactaaaaggacgcaataccccatgagcttcaagatggtcatagattaatgaagtagcaaaacattatcacgcacaaaatgacattgtttcaaccaaagaaatctaggagcttcaatggatttttatctgttaggctataattatttcatgaaattgatccaagtacaacaaaaattgctttcatgtgcagtctactacaaatgatcaccaaaacggtccaacttcactttggacataaatggcggcatagatcaagtttatcaatattgagattgcagcagcaaatatactgcacggtccctagcagatagatcaatgccctgtgacagactagtgtgctgaagcatatacattttcatcgtaaaaataaataaataaataaataaaagaggacatatgtagctatgcccttgttcttagttcttctacctatcctttcaaaacaaaaatagtctgcctcacttgctgagttcttgctcttctgagcgaagatcacacccattacctctaacacgcaaaactaattggaagaatcttccacaagcaagaactacagcagacaccccaactctatgccgaatgattcgaaattattttcaacacgcagctaaagaaacgacacgatgcaagagctagaggaaggtgaaagagatatactcagccaagctctcgtgattcctccgaagagcacaagatcacccgtcgtcgggcgtcgtcgtcggcggcggcggaggatgtgagaggcctccccaaatctggctcgaaaccctaacgatgagctcctttcccctcctcgctgctgcatttaaatccaagaaatttccgttgcaattttgtcaccaccttcctcatgatttgcgtgttctactccgcccacaggaccccataaaaaaaaaaaaaccaccccccggattgctgcaaccttcatccaatcgcaggcgcggagcggcggcgagggaacgccgccgccaccgccgctccggcgccccgctcccccagctcgcccatctcccaccttcagccgcgcgcctggccgcgcgcgcgctgctctcgccgagcccgacctggagcgagcgcccatttgcggcgagctcgcgcggcggaggcggcgcatgcgaggtgctcggcggcggaagcggaggcgttcgcgcgttcgcggagagttttttttttcctttttgatgatttttttttcgaaggggagaaggctgcagctgtgtggctctgtagagagagtctgcccggtggggccatggagtcagtgagatgaagattcttcgtggctatcgtcgtcttcgcagccagcgaggttcggcgagaaagccttcggcaatggcgaagctcgccgttgctcgtgggatgatcaggggcggaggtaaaacaaaacgaagagggtttcactcgttttctttactctaatttagatataatttagtttgatacaaatgtttaagtttggatgacaggtacatataccgtgaaattagataaaatatattaaaaaaagttatgaaccgggttcttgtacaccccatgagacggtggcgtgagaagaaattgagtgcacaaacacacctgaacttagaagaaatcctagcttgtaatgtatcatgtggatcggtcctatttttttcgcttgtgtttattcatatcttattaccagctaaaaataacttgagaaacttagcaattgaaaaacaaaccatgtaaaatagtctacgataaaaactataaaatcaatttcaaaattaagttttaaaatattcaattttggcttaaaagtataaatataaacaaacatatgagcctctagatagattacaaatggagtaggactaaaccataaacgaacaaatcagccttagatagattacaaatggaggagggctaaaccattaagaataaaaaaaagggctacataattgtttttgttaattttgtttgaggaacataaagacggcctagcattgtttaagaattgtcggatcatgcatgtaatttgggaagaggtcaacaaggagatatactatagtagacaaaattaggactatatttgtcgaaaatctttaattgattgttgggggaaaggtacaggccaaggaggaaaaaatatcaaagggaatgaaatcgatgttcattcttattacacgggaaaaagccagagtggatgtaataggatggttttcaagatgccaagaagttggttgcggagagctgctcggtagaataactgatgagctcagatcattgagtttgcgtggagcaaaaggtgatgtgattttttttcttcctatattttcactataaaccgatgtacataaattgatacatcttcttactataacatcaacaccctattggcttggttttagaaaagagagctggtttatcatctattttctaaaatatttatgtacttgaaggattagctggtcaaaattcatacgagtatgatacccaattcgaccaagcgttctttattttattttatgttcgacgaaagaagagggatggattaggttaaaaattaaagcatttataaattgtaagggattgcaagcgaatttttggtcgtgaacgtatttataacaatggcaacgtagattctttattgtcaatttttttcattgtttgttataagtagtttatgtaaaaatgtttagctatgagagcgggaattatgtgacagttagatcatattattatgttattatagagttcttttccgcttaattttatatgcatattacttgtaatcaatagtgttatgttacctcggcttaaattgagtctttactaactaatccaaccatacagtcatgggtttaatatatattcattgctaactttaaaaacctaatttcacccgttggttaatacacatatcgtcatggtatcgaaagaactagatacaaccatgcactttgtagcgatatttatagttaagaatggttgaaaaattgtcaaactatagcgtcatccaatattagtagcttgtgaggtggattaaggagaaagaaagacgtgtgagtctatatgggcccaacctccagtttgggatttgttaagatgcgaagatctaacgatggctaaaaataagtgatggcatgactcaaccaacatgtagccttttataccagttatttttgttggtggccctacttagcatgatagtttgtagcagaatggccattaaggttctctttggcacaactatgtacctaagatattttggagctaggcatttctagttctacaaattcatagatctagatctacggttactttgataacatttagataaataattttgttctcattttagataaaaattaaaatgttaaaccaatataatttaacatacaaattaaaatctaccatagatctgagatatatatttgtgtcaaatatgacctaaggggcacttttaatgtggaaccttggtccatgcgtggatggaccaggctcttctcccacctgctttggcccatgctcaagtctaaatttcatgtaatcagtagcaactttctttgattctcgtcaactacttctgatgaaccctgagttcctctcgacattcaaggctgttgttggcccgatctttcggtgagttgtgataactacgatttgggataaacgttgacgatccgactacaaccgtacgagacgttgtgttgcgccttagcgatcgatacacctctccgtgggttgttgatcttgcctgacggagcgtgggggctcctcaccgggagaccgcgcaggcctccctttgccggttcggccgggggccctgggtgaggttctaagctcctagcctgtggaaagttcacgagagtggaaacacacaagacacgggcgatgtatacaggttcgggccgctgagaagcgtaataccctactcctgtgttttggtggatctgtgtatgaagaagctacaaagtgcgagccagcccccgatcgttctgggatcgtttcccctcctctctaagtgggcaaggtcctccttttatatctcaaggggataccacatgcaccatctctccctctctttcttttgtgtggggactcatcctctcttccctccaacttgacttctcttcattaatggacggagatttgtatggctgccgtccgaatgaccttctgatgggacggcccatacctacctccacttccgccggaagcaggcgcgacgtgggaacatagctgtctgctgacgacatgaccattgtcagaccggtcacaaatcggtcattcttgtccaccacgtgtcagtttaacaatctgcatgttcgcccctcttcatacaatgtcttgcttgtaatggttaggatgaagcctggtatatatctgaccgggaccaacgtgccatctccaggaggtaacacgccggctccggctagggacgagtgcttggaggctctcatcctgatgggatggggcgaggcgtgcgtcagaccgcctgtctccacctaacccacgatctgatcggtctgtgactggtcacagaccggataaacgagcgcgctgcactgcgttacatgcggcgtgacgcgctcgtccaaaccgcaataaatgtggttaggtgagccccgctatgctcacctaccccatatacgcggcgcaaaacccacaaggggtcggggcgcctcggccctcggggccgagacgggagcggtccgactcctcggggagacaaagagaagggcggccgtatcaccctcgggcccgaccctcccccgagggggttaggccacgtgggtgatcgtgtctgcctcaagtctctaagtcatgatactcccggtcccatgtcaccgacattgccggtgcagaacaaccctatttctgcaagcaaatcgaagaaacaagcaagaacaagataaaagcaatctgatattgcaaataggaatttaatacaaatgataagttggggttccgaagaacaagcggacggacggtctagccgacacgcgcgctgcaagcaagtagcaatggctaaactttaatctatcaaaacccgagaaacccttaaggggtacctagctatttaaggaggtgggaggacgaccaagagggtcctagggtcgtgctccaccagcttgggccgcaccccacatgggccccacctgggccggggtcccaaatgaagttacaagcccacaggcccattataggtgacgcagcaccttgttcctgtgattccggccacacgagatggaattcggagaagaagctggatccgttggaaagagggctccgagagctttccatcaagtactcacgggctgaaaacggaggtcgtatgcagattcggcggccgtttgaagtcagcagtgtagtaggtggccgaatcggattccagcactgggaggacttgatctcgatatcttcttgttcatccatgatgtgagtaatggttacatccgtggtagccatggtcacatcaacttcaaataagctcatgtttaaatgccatcaaacaatttatgattttagcccaaaaatatttagttcaaaagccatgaataaagaagacggtgtaagagatacacatgtaataatgtcgtgctaccatggtacttcctcgttccaaaacgaaattgtttctagcacatactttgtttcgaatcgaaacaatttctccacctacccctcctctcgactgataacaaatattctccatctcattttttcacatactatcttttatcaatcaatcacaacatttatcaaacatttccatctactttattagtatcgtactaatctaaaaatatttatattttgggatggaggtagtacgaaattgaacggcccaaactgtccaaccaacccatttacccaacccaaattaatcaggccctgttactgaatcgaacagcccaaacggcccaacccaacccagcccagcccaaattgaccaggccctgttacgtctcgtgctccccttcatctccccatctcattggcagcggctgccggataaaataaaataaaaataaaaacttattttttttcctcccccactctccccgacctccaccctctgccaccccggccgcctcaccgccgcgccgtcctcctgcacggcggcgccgccgccgccaaagctgagcctgctctcttgccgaccgggcgcccaactcccagcctcggcctccacccttccggtaaagctcgccattcttttttttctttctttctttctttcttttctgtttgggttcttgacactggttgtccggcttggtttcttgcttagtcttgatctctccgattcggaaggggatttctgttggtgtagggtttgtacacggttcgtgcccggagtttctgcgcggtcgtgggttttttttcccccttaagcttgacaagatttgctcgtgtagttcgtgattgggttttgtttctctagggtttcttgagatactcacgatatggattacatttcagattcttgcgtctcggcatcggaagcgatggggaagagggtgaaggcgaaggccaagaatccgaggaaagcacagcaacaacaggagccgacggcagcggcgccctctgatgctggatctggggatgcggcggcggcggcggcgcaggactcggggaattcgacggaggaagctgctgctgctgctgctgctgccgcgtcggccagcggcagggagcagtgcggacactacggcggcgacagcgcccgcttggacaaggtcctcttggagatcatgacgtccaagcatttcgcgtcgtgcgagcattgccgggatgatgcccctaggaagaaagggggtggcaaggagaaagggggtaagcagcagcagaagaagaaaggaggtggaacgaaaggttccgcggccaaggcgaaggtggagaagagtgacatgtgggtgtgcttggactgcggtcggcatttctgcgggggtgaggttgatgtgaccaagccgtacggccatgcccgaaggcatgccaagcaggaccggcattggtgggctgcacggtttgatgatccgactgttgcgttttgtttgtcgtgtgagaaggaggtgtcgatcgagatgcctagaatagagacagttgccgcagtgccaacagaggtggctggtgcagctgacagagatctaggtttggttaactctcatggtagtgtaatcagagggctgccaaatcttgggaacacatgcttcttcaatgcagtgatgcagagcctcctcgcgcttgataggttgcgcagtaagatgttgggaccagatgttccaacgggggctcttttgatgtcattgaagaaactcttcatggagacaagtgcttcaaatgatgtaggaggtgcgctgagtccaaagaatctcttctcaaatatttgctcaaagtacccgcagttcaggggcttccagatgcaggacagccatgaattactccgctgttttcttgatggtctgcacacggaggaaaatgaagcacggaagctagcggatgaagcttcaagtgcaaccattcctacaattgtcgattccatctttgggggtcagctgtctagtacagtgtccagcacagaatgcacacacagttctgttaaacatgaccaattccttgatctgtcactaccagttccatccaggaggcctccagccaagagtgtgtcatcaccaccagcaaagaggaacaaacaatccctaagagataggaataaaaatcggagatatgggaagatttcgacccgagtgactcctacaatagaggtgagcaacaaagaaaagattcaaacagttgctgaaggcaataattccctgattcctggttcagagtcaggacaggttgtcagtgagaaagagcctgagccttctgaatgcagtgagtcatgtgcttctgtgcctaatctagaacaaacaggtacttcaaatgtggaggatggcacttgctggttggattacattgatgatgcagatgaagcaaaatcagagattcttgattctgcagattctattgaagcgggacagatctgggaagacaagggtgttacttatggtccatttcttccacaggatgatgccttatcgaaagagcaggtcttgggttctgaacactctggtgaaaaccctattgatgatgcaacatcttcacagcctgttatcttgcttccttacaaagaatttggttccactgccaatgaaatggatggaaccacagaaaattcacagaaaccagaagatgcagttgctcctccagctgtttctcccttgccagaagataatgcacaacctgcatctgttggcgatggggatcaagatgactatgttggtcttggtgatatgttcaatgagcctgaagttacttctgaagtcaagaaagaaataggtacagttgaagatattgatgtgatggcctggagtagcaacagtgctgaagacgaggtggatgatagtaatgctcccgtatcagttgagggctgcttggctttgtttactgaaccggagttgctctctgaaccatggcactgtgagctctgctctgactctattgcatgcccaaacaccaatgatggcaaagatgatgagatggcgactagtgtcaatgaaagaaaggatggtgaggagatgatggcaggtggtgatgaaacacaagacggtgataagttgatcgctaactgcaccgaaaaggagggcattgatcagattatggcaactgacggttgctcagataatttaaatagtgatatgaacagtaaagaaggtggttgtgcaaattcttctttggttggtgctgacaactcagttgatgctaactttccagaaaatgggaaagttgctttactgaaaacaggttcgtcacttgttgacacaactgaacaggcagacagcaaagcatatcgtcgagagattagggatttgaacaactcagcagtggaatatacatcttcgagtaagcaacctcatgattctgcccagcataaggatgaacataatgtggatgtagcctctgaagaaacaactgcaccagagtgttcttgtgacaacgaatctgcctcttgcagcacaaccaataagaatgaagctgaatgtggtgttggtgctgaagaaattgttactagtagccttccatctgagacgcaaagaatcttaccaggtgaaaaagacaatgaagatgttgtcacgcggaatcatggcagaaggaagcgaatgaagatggttggcaaggcacatcaagggcaagataaccaaaatgaacagaaagagaatggaaaaaaggttttcagatctgcaatgagaaggatccttattagcaaggcgccacctgtattgacaattaatttgaacagattcagtcaggactcgcatggtcggttcaagaaattgaaagggcatgtgcactttaaggagacacttgatgtgcggccattcatggacccaaggtattgaactttttttttcagttagaagtactgatgttttttatcaacctgtcagctttctgattagctgtgaccatctgccattagtctattcgcatttgctactaagaggtcccactgtccatgcatagccattgacatttaaatatttacactacaaattacctcacaagtggttttcaactatgtagctgatattactcctgcaaggaaattgtcgtagacacatagttaggatagatagcgaatgtttagcttccaggtaattttggttcctcatccctagcgattggccaatgttgtttgagaagataaattgctgcactatttgtcatgctttttaagaagaaatgtagatcagatttttgttacattgagagtgcattgcattatcgtattcaactccaccatgtccttatcgtcgtataaacagtaatatacctgaaaacatttcatagtcaatgtgaatttggaggtctgggttaatttagcagtgcaacacgatttagactacaaggtagtaagcagatcaatatgtctcttttgtttacctggaaatgtgtttgtatttacggatgctatgtctatgattaataaatgggttgcttctttgaactttctaattcctaaataatcagttatatctattgaaagagaacaacatcatgtggatacaaattggttagcttttagaagctgcagcaaattgttattcaccatttatatgctgattgaaacactttgacttgagcaatggttctgaaatttcccatcggcttcataattttgggatcatgtctagatgttgaccatgtagtacaatagtatacacaacccagtgcatgtacattcttgcccatgatttttcagaaaggatggccagtccaaaagattgtaaaagaacagtcctaaaccagctagtgcctagtgatatgggcatatggtagtgattagcagaaaacaagacctggtttcctcttgccctctctcttctgctggttacacacgaaattaggtagatgaaagttcaatccaatctttcagctgttctttaatttcaagagttggtgttaaaagtcatcccatagatgtcccaaagaaaaggcatttacttttaatagcttgtaccatctacacatgatgacttctcaagtgtatataacagtatgccttcccatctgtacaagaataggggaaaaatgtgcttccagcttccaatcttgaattgaactaagaaacgttgtagatgtgcatgtatcacatctgatttgcacgcgagatatcagtattttcggtttcaatgttattaacttgatattgagcccttttgttgttgcatatttcaactgaatggtcttaaacttggtgtcttcaatttgtaatttatgaatactgcagccttagagttgatctgctcatcacctattctctgtaatctgcaggtctaaggagaatgacaatacaacttatcgtctcgttggcgttgttgagcacttgggaaccatggcagctgggcattatgttgcatatgtgagaactggcaagattgggggtcggcagcagaggagcaccggctccaagtcatggttttatgcaagtgatgcacaagtcagagaagcctctctggaggaagttcttaactgcgaggcttacatactgttttacgaaagggtgggagactaagaaaattatgtctgccatccagcaacatcaatcagtctctatcagggcatgttcaaatggcaagcaatagataagaaacgtcattttttggaaaatcagaggctcagttagtcttcatactaattactatccatcaagtccattttgtttctttgattgagtccagttggccttgttaccatttgtctactcagtcaaagagatttttcacaagtggacttgagcagttaatctgttcatactgcctacagcctttttgtcttttgaagcatattttggaggtgtgcaaatgttcagaattggcgagctgctcatacatatcttggcaagggctctgtggagaagcccatagatattgttttacaaccaaacaaacaatgttcaccttagtactacatattttttgattattatgtctccagtctccacccctaaattttgagtgatgggggtgtatactgtaacgtgccttaggtccatttaaaagtggtaattacatacttttacctctgtcatctgggatggaaaaaaatgctccttttattgagaatttttctgtttcatcagaatgtagtgttcgtgctgttgtttgccctggagcttgtgttgaaatgcagtgttttttttcttttttgccctttctgatactgatatctgaatatctgatggtcacacaagccagcaaaaaaccaagatgataattgttaacacatccagttctaactttacttttgcactcaaacctttttctttaagaaacaatttggttacaatctggatccatcctaatgctagtgtgctagtgccgatgctacgttggaaaccaactatggtgagcagactactcaacaacgccgcgtacagcttgtttggatgcaactggaccaagcaaagctcaccgcagatagcgtgcggattgatggcgattcactacgtactggcacacaaaacctgcaggtttctggtttagcacatctcttgttgccagcacaaaaacgtaagaatagtctcggacaaaaaagatgggggggggggggggggggtaggatcgtaagatctaagtagcgaaggtgacacgtttagccttcctgtattagcttaagctttagatcgaactgattgattcgtataactcaatataggttttttggatgaactgatcaacacatacaactcaatatacgcaatagtctctaaatccatttgtttctcttattcatatgcttatccgaatagcttattagctaataaaaattatttgtgagcgaagcttttcattagcgactaaaaatataaactacgataataaaaagattaaaaataaaattcaaaattaagtttaaaatttaagctttgtcttataagcataatagcgtgcggatcttaaaaataaaacaatgaagccttcagtaccgttccaatttttcccaaacatccaaagggacttcacacagtatggtcttcttgggacttcttgtgcttccagagaataacgctttgatttgtccgtttgacaaaagcacccagccgcccggcgcccaattcctgcatttctacctccttcggtgacccgcgccaacaaccaacgccaaccatccatccatccatccatccatcacaatccggtcactgaaaaatccaccagaaaaaacggcttcggaaacctgcccgccgcttcgtcggaccgcggctcgtagccgactagtccgtccgttgttccgtcacggtcacgccccgcgaaatcacccgccggtcgctgcaaaaacggggcgaaatcgcctagatcgtcttgctcgcgtggccgcggctaaactaactcgagtttttcaccttttgagttttttttttaagaattacacaatacaacacatacactcacccctataaatacacgcacgcaaaccctatccttatgagcatcattgaagactaggccggcaacactcacctctataaatgcacacacgtaaatcctatccctatgagcatcatcgaatactaggccggcaaatccattctggagattgacgaagttactacaggcgccttcctgttgatgggtacgttgcctaccactgaaagcacaaaaccgttaaatcctgaaaaattcgctccttactctaaattattttctaaattctatgactacaatttattgtaatctaaaaaaattaaattgtttggtagagtttctgattttaggaggagcttgttgctccgtcaccggacacggtcagagtccgcgaaatcacgcttcggacgctgcaaaaacggggcgaaatcgtcgtaaccccaccccgaccggcgcccgtgccgctcgcccgcgcgcaccgcgcccgtgggtcgccatgtggtggtcgcgcagcgcggccctcgcgagagccgcatcatcggccatccgccacgtccacactaacggacacacacacgcaaaaaaaaaaaaaaaaagaagaagaagaagagtaaaaccggcgagaccatctgcaagagaggataacacaacacaacacgctgacgctgctgatgcgagtgagataacgagatgcttatgtatttttaggctcttctcgtgaagctgtgtccaaataggcgtaggcttctgcttctccttctccttctccaggtgagtgaggagagaatggaggcgcgggcgatgccgccgccgacgcggacgcggcgaggcgtcacgctcgccgagcagatggccgcgtcgtccaacctccgcgacctcctcaagctccgcgacaacgacgacgacgacgacgacggcggcgggcaaggtggtcgccgccagccgcggccgctgcccgacgcggtggtggtggcggcggggcggcgacgcacgctgctcgacgtcatccgcggcgtcgacgacgacgatggccacgaccacccgcccaccggcgtccttgagggacaccgccccgcgacgtcgacgaggacggcggcggcggggggagcgcggggcgggagggtgtcgctgatggcgctgctggagcaggcggagcggcagtggacgacggccgccgccggggacgccagccggaggcgcgtagcggacgaccacgcggcggcggcggaggcgggcacgaacaagggcttcgccggcgccgccgccggcgtgggagggcggtgctgcgtgtgcatggcgcgcggcaaggccgcggcgttcatcccctgcggccacaccttctgccgcgcctgcgcccgcgagctccgagtcggccgcggccgctgcccgctctgcaacgccgccatccacgacgtcctcaacctcttctgatgtcaccatctccgccgccggcgacgacgccgccaccattaattccgtcgacccaatacaccattgctgtaatgtacttgtagataaaaaaaaggttctactacttcttggcttcttggcaactgcaaatcatatcaaagaattctcagagcatcacctgttcatcaatcacccacccgtgctacacaaccaatcgcgcgattcttggatcgatcgaataaccctctgttcctccatggcagcaacgatccgcagatcccggcacaagtgctttgctgctgattagtaattacgtttgcagccacgcgagtgattgaagattaagttggcgcatgtaattagcacataattaattaaattttaattattataaacttgataaatgagtgtatttgatttttttaaagcaacttctatatagaaagtttttacacggaatatattatttagtagtttaaaaaaaatgctaatgaaaatcgagatataatctacccactctgttttataatgtaagttattttagatttattaatatttatataaatacggacaatattagaatgatttatattatgaaagcaaatcttaatgagaaaataacaggttgctcggtttcagtgcatcgcagtcaccgttgaactccacccgtttgctcggtttcagatcaacgcattagttaaaataaatcaattgttttttcagacgatgcgatcatgtgatgtcatggctggaggagagaagattagatagggatgagttgaaccgtgagcccatctgaccaacggtactccaaacctgacaccttcgttctgatgatgttgacttccctgaagaaatgatcaaattaatttatttcagactaagatcacaccaattgacggcctctgcatgatccggagttccggacagtccacttaaacggctaaaccctgaactgacaaaaatttactgtactataaaatggtttcagaggagatactaaaaatgtggcacctttaggatcgtaaaatcactcttgaactgaaaacgtagaggatacgtacatcattgcttattgcatatgaatatgatatcttgtatacttgtgttgaggctatcaaggccagcactacagtgccaatcactttaatcacacttgtactaccatatttgttagttaagtactagattgagccaatggggcactaacacacactaacatatgcaaccatgcaagcaatgggcactgaaagtgtactttgtaacattggatatattatatcatgttgggtaagctaacttttaccatcaatccatcatgcagaagcacgggttcagagtttcagagcaaaaaacaccccaatcttaaatctaaatctatccctctctagcctgtgattgcgtgcattcgtcgccgttagcctgtctttgcgagcggcgacaccgggaatgatggcgacgccctgcatctgcatgcaaatatgcaatgcaaagcgctagggaccgggaaatggttagctgaattcgctgaaatggcaggagagaagaactggacctttttggagatttgcaagggttcagacaaagcgcattagctggggtggaattgccgtttagcgagcaggaatcgtgtagggctcatgcagtggctgatgacttgtgacagcctacaggaatggggtacccaccactgtactggtacttcgcctgtaatggatcgagagaataattgtacactcagatcttgttgcttaatactttaattccttctggaattacagtcccatcgatcatcgttttgtctccaactaattgtaacccgtgagaccataaaaaactaatatgtaggtaaactttttatatatgtgttcttagctatttaaaaattaatgctgaaaaataaactacgatgagaaaaattatcaaaaacaactctaaaattaaattctaacattaaaatttgcatgcgagcgatggccaataagcatattttacaaactttacaaaaaaatatcttgtgatagattttagcgcaaatcagtctctgtaaaacatggcatgggtagctagctctggtcgccaataattgatctcctcatgaggggacacaatgacctaagcttaattaggagtttaggacagtgattcagtgaacaccgttggttgatgctgtcctagatcgcggtggttgagctgccccgtccgtctgcatggacgcagtcacactatcacaaattcacacaccatctggcattctctgcttcgatggagatagcttgcgaggaagaggaagatgaacagtggcgtcgcacagtttctgatcccaatttttatccattgccacctcagcatggctccccacaataggactatatataaatctttgcctgcctgtcgatctctgtatcttgaattcttgatgtgttcatcggacatgcattgattgattgattgcatgggactccaatccatccactgtttggattggatcgaccgtttttttttttgtggttggcactgggaggaatgtttgtcagaggccggccggatgattagttaaccaaacgtacgatgagaaagaaaattaacaatgcagctagctttagctcatggttgcgaacttgggatggcgaactgtgcatggtccagacaccatacacaaatttcagaggagacgatatacgtcgtgatcatgtactccctccgttacatattgtaaggcattttagtattatcttaaatcaatttttagtgctgattaaatttatagataaatatatgcaacgcttataataacgggcgtattgtttatccgtcgagagcttaacacaaaaaactttactggttgcccatatttcctaataaaccaaacgacttattagggaataaaaattaatttataggtaaaatcattatatatttattcgtaactacttaaaagacaatgataaaaagaaataacgttgaaaatatcttaaaattaacttcacattcaaattcaaaaattcaaattatgcctttttgttttgacttattaggccaatcaatggggctccaagatccatttaggttggaggagatgggagactacggagacaaagagaaagtagccaagtaggatcagaaaagaagcctttcgccttcccatcaacgagtattcctcagttgaggtccttgagccctgaggacgccagcttaggggcctcatgcctcctccgtccagtgtcctgctcgataacgtgcttgtccatgcgattccatgtaacatgcgctgtagccatcagctatgctatgcaacagttgcaggctctacaggttagcacctaacagggatctcctcttagatgctagcacagtttgttatgtttcaagatcaatgtaaatatttttttagaaacacgttacaatcacataagctcacaacgcgtgccctacccctataaacattttcggaagattaggtcaatatatatcttgagattaatgaagtcaccacggccgtatctaactatagtacttaatccgggtgggttggttccaccacaaggaacctaactagttgagctacactcacttcgcaagatcaatgtaaatattaccacgttaaatctagaaatcttctattatatactaaaagtccattaaacttcctacaaacgctctcaagttgccacatggcgctctaataaattagagaaaaccctagaaaatctgagaaaaaaagcaaaacatccgtacattgattttcattaaaattggtgggtccaatattataaaccgttatattagatttgtcttaaagctaaccgcaactacaactatggtcccaccagcctctcacctccccataggtacgtacatgatgtacgtatgtatcgcaacaaaaaaaaacacgccgctctccttccttttgtatctttttttcccttgtatatagtttctttggaatataaatgcatacatatatatgtcgtatttttggattggtactttgtaaagaggagaagggttaatgcaaaatataagtacactgtaaccatgtaaggtaattattatgtctatattcgcggacaactagctactaagctcataactaaaatatcacaccagcgttaaatctaggtctttacagacatatataaattttatcatcatatcgctctttccaaatatacatacctaaattagaaatgcaatattttaaaataaagtttacacccattatatatatagccatttattatctatctattatatactaaaagtccattaaatttctagcaaacattctcaagctgccacgtgggactcctataatcattcctaagacgccacatgacactctaataaattaaagaaaatcatataaattttgggccacatgggacttctataatcgctcctaaaccatatcacgtgaccctctaataaattagagaaaatcatataaattttgagaaaaaaacatatgtaacgtttattttaacttaaattggtaggtccaatattataaactcttagattaaattaatcttacaacaacctagacattagaaattagaagtacatatggtcacacctgtacgtacgttacgtgcatatactctctcccacccactagcccacattgcaagtacatatatacatagtacgtatatgtttcttccttcctctaatcatccctccctcctacttatataatcctattctatagctaataaaatttgaagggtagaatccaatacgcttccggtccgtcacagtatatcaattcattcattttcacttaaatgggtggttccaatattttataccattagattagatctattattaaaaaaaagtaacaccttcctcatatatccatatacatgaggacaaatatattattgtggacctgggcaaaaaaatacttcttacgtacgtatgattgaagaaagaaataaagtaattattacttactactgttcgccacaagaaaaataaaccataagcacatatatacttataataaatcatgataaaggaaaaaacatatgtacgtactacgtgtacagttaggaaaaaaggtcgacgtgttctaaaataatatttctacaatttaaagataaacaacttacacagctgaacttgatctatatataattcaaatataatatatccaatcaatgttctttaaatgttctatattttaaattattttaaaattacatatctactttattatttatatttatgtaattaaataaactactaatatctatggtcctaaatacatcgcaatacatggagccgactgttataataatttttaaataattttacatcatattttagtttagggtgtcagataccactagaggaatatataacactaatttaaatctgcatatgtgaaaataaaaataaaaataacataatttagttgtttttaagtagatatgatttaattttaatttgacaaaaaattggaattttttaagactatttgattggtatttgagaagtgagagaataaatacaacataggtgtgaaaataattatcaaaaatatttccagcctatgatcttgctatatataatacaactccttaatccatcttgatatttatggtcattatgtatgttttttctttgctatatagttttgataacaaataaataatcaagtaacatgtgcgtaacaaacttgacgttacactatagatatttgtcaaaatataaacaataatatagtgcttaggagattatcttggtagtattctttaaaaaaatgactttgtcccggttacatataaattcctcttttgttttgggataaaatttgactcatcgaaattatgtgacgaagggagtataagcaatataagtctatctttaattagataaagtagtctattagctacgttttaacgaaaaataatttcattaatatataataaatccataaagtcatctatagcacacaataaaaaatgttagtaaaattttggaaactgaaatgctaaattctaaaaacgaatcacatatagtacaaatatatatgaaccaactccatcattgtgacacaattttttcttggttgtacagtttcaaataattttagtatagagtttatacgttgcaaggataatcagaagaaaaacataaccaatgtccaaacctattattaaccaaaatatgtttaaaatggactcaaaaaaatatttcaacaatatcatcctaacatttgtaataaaaactaaagcaacattaaataaggtgtctgcgcgtatgcgcgggctactttcctagttttctataaaacctatatataaaaatgtaatccatgtctttgagcaacggtgctgaaaaaaatgtgaaaatgtggtgacaccggtataagataatagcagcgcattgccatagtgagttttgttcggtctctaaaaaattcagctttgaacgtttgagatagctgaaattgatggattaatagatagtctgacttttctgataactatttaagggtatccacgaattaattctctctttcaaagttgttgcataaaaacatttcaaggaaaaaattatatagtttttttacacaaaacgtatgatttagtagattggaaagcatacagatgaaaaatccaaaattcataatcagaaaaagaagtacgtgaaaaaacaaactagcaatgggccaccaaggcccatctcaacattgccaatttctatatgggccgcaagtaaaaccaccgggatatacgaccgccgccgccgccgccgtgctctcgctcgcagggcgcatcggcgagccgccatggcggagcggaaggaaggggaagggaaggtggtggtggtggaggaggaggaggaggagcggcggctgcggggggcgctgcggagcctgcagcaggaggccggggtgctggagcggctggtgtacaagcaccggaaccagcaccgcggcgccgcctacttccagtacctcctcaaggtgaggcgcgacgtgaggctgctcctcgccgccggcctcggggacgtcctcaccgccgtcttccccgtcctcgcctcccgcaagccggccaacaccatcctcgccgtcaacaggtcaagcttcattcctatgcccccccttggaacttgaatcaacgctgataaaattttgtcgtagcgaggcgtagaattagacgaagccgctctaggattatggcttgattgtgttttttttctttaggcagagtaagaagaagcctggtgcaaaccattgtcaccatgagaggcttttgggtgtcgcacgcttgttatcagaggtgagtgttatactgttattcttttttaccccattgggattcaacacttagcttaagtgtttagagaagttggaagttggaaacactaatggtagtttggacttaataatgtgatgtcaactgacatttttttttcttttctgctactatccagctaattatgacatagatgcaaattattgtgattatctgtaacttatttaggatggcactcttcaccggcccaatgaaaattattgtgattgtccttgcatatttcaaagtcctaaaggaaattttaggtcatatgcaaatccatttatttcctctatggtatatgcggaaaattaagtgacaagctttgtatgctatattcaccattcttgatatgcttctggacagctctagctgatgatagctttacccaaagagaaacttatattttctctgttatgtgcagatggctgaacctgttatgatgggagcagtgtatcctttgcctttttttttgtttctttgttccttgtattctcttgtgcatagaaatattttttttgactggatgcataatatattaaactgtacacttacaactggtttgtcttgtgcaacgcgtgcctcatatttgtactagtatctttgcccattcttttactttcatatagttcaaatagatatgttcatttccctgttttggtaacaatcgatagttccttaacctgcggtatagtcagatctcgtttttacttgcaagatcattttttgttgatctttgcacagcgattcttgctttgctagcaagagtgagggctctggttcaacaggtgagagcagctgcagaattacctacagccaagactgtgttgctatagttatagtaggaaatatatatagtggaagcatatgttggctagtaaggttctttccctcttttcactgaccctatattgtgtgcagatgctacttgatgttgtctcagtttacaacaaggcttctgatcttattgataggaagcaatctgttaagattagtattggtggagcgcaggtgagtttgcttccagagtagcactctgcatgcataactgtcaaatgtcaagcatgatgaaactatactacgtcaaatcatgtttggattggcagaaaactatatttattcaccacataaatcattcatgtcacctttttttttaaaaaaaaaaatccctacaggctttcagagagtactatccctcaagcaatgatgcccgtacttttctggaatgtgtttgggtgaaagataaatttgttttgcatgaaaatacaaaaggtaactgtgagaaaacccaagctgaggatcaaaagtcatgtgcttccgaatcagcagtcctgtatgaaactcttggacaagtttctgaaggttgggatgcaatattttctgttcttcatgatatatttattaatactttggtttcttggtcgcattcttggaatatttacaaatgtccatggcatgttgttttgcatggtatcatgatgtatattagtatggcatttaacttctgattgttgtatcgttaccaccagataatttgattgtgataggtgatatggtgctggctagtatgttttgcaaatttcttcaattgcaatgattacttcatggaataaaatgaaaatgttttcattaccaatagttatgtactccctccatccacaaaagttacacatattacttttgacaccaagaccaaggggaaattaaatcaccttggatgttacaaaatcaagtagtgttgcaaacatgcaacaaatgagtatttagatgactccttaagttctaataaaacatttaatttatctcttcatttaagtcttgaatacataaagactacaaataggaacaacttatttggaaaaactcaaatgtgaaataggtgtaacttttgtggatggagggagtatttaatatgagagggcactacttttatttatggtttgatagcgtcaaactttaaaaggaagtttcagataattctagtgcttctgacatttttttcagatatggaaaatgctgaaggattgaactctcccatgaagctaccagatgccaccttagcaaaccagccagagaaaacccattgccatcgtgatgaagattctcaaagtaggaggcaattggtgaatgacaacaattctaattctctttcagatgcagttgctactcatgtgcattcaactccatgccctgatgtcaagcctgagacaaagaagagagttgcattcattgcagttggaaatccgaaagccactgctagttcgattggaacaactttaactaagaagcagagactagatgtgattccacgcgccactgcagaacctgaagatctatatgtcaagcctgagacaaagaagagagttgcattcatcgcagtaggaaatccgaaagccactgctagttcgagtggaacaactttaactaagaagcagagactagaggtgattccacgcgccactgcagaacctgaagatctatatggcaaattttctgaggatacagacaagtccatattttagattgttttgcactgcagctgaccagtgatcactgaaatacttctcagctttctaacatgaaaagaacaatcaatacaaaagagggctcggtgtagctcaagatatggttaaattttgaagcaacttttgctgtagcatctaggaggttgcttggtttatctcgctaaatcattagtatagccttcattgtattctgggatgcaatattattttgtcatccatttttcaggtgtaattttgcacaaagatgaattttagttcgtcccatctgatgttcaatgtaatatgcattcattctttgatttgacgctgactgcattacgtttgtggagtggccttaagaactcgaaaattcaggagtctggaacgaagtgtatcttgaacttgggttctaaagcatcagattatgcattactgtcgaaaaatcatatgcagacaaaacatggtaataattcctctgaaaaatcctccgtaagtgttaatgctgatctgaagttatacaagaacaccagaattgcatctaataccaagtgatgtacgtcacaagatcagaagcagaaaaaactaacagtaacagattctcctgctgctatctcatcagggcaaactagggagagcagctttgttggaggagaggaagctgacccgtccgttgtcaacatggcaaaatttcagaggaatgccctcaaacttgttttcaacggtttctagttcttcccttgatggtggtttgttgctgcaccaaattgaaaagcaatacatcaaaggtaggaacaacaatcgaagtacacgcaaataacccaaaagtcatgaaccatacgtcgttctcaattttattgcatgtaatgtgacctcttgcgcatttctttacctaccttatgacttgtatggtattttcgttacttctcagtattctttaggggaagttggtgaacaaaaagagtaagtcaaaatagatggagtcaatgataaaatataaaagaaatcatatgattgggtatgcaatttgatgagatggcaaccaactggaacttcggtgctaagcttgaatcgcattcatataattaacatagaagccactttgagtggatataccaggatgacaaacagatctatgactacgtagtacatgaatagcacgtcatagatacatcacgcatgacaaaatacaaaagcttcataccatatatgttactaaatttatatcaagaaaccacaaaaaatgatcatttatgaattgacaatggacggtcaatgcagtaattcaaatatagcactagtgaagatgaactttgtgatcaaaataaaacacaaaccatgatgagatgaaactagagcacgtttctaggtctggatggatgacattcaagtgaccggaaaaggcaacagtaccttaataggcataggacgaaactagggtctcctggggatgtcttcttaaatttgctattcggtagatacacttcaaaggatggatgcatatcatctatgcacatttccttgagcaatttagttatgtcattggaggcaccaccgactctatttaagctctgaatctgatcagtttcaaccacacttgtggaggcatcagtgacgctgtaagtatggctacgcttaactgtccagggaacgccatatcgtccaataatatagccgagcaacttcaagtgcttgtaagcttggaaggcatcccaggagcacccatatttccctccagcaatctttccgtagatttcctccattccaattgtttcaccctcgtaatcaagaagaaccaatgcccctctttctgccaagaacctgcacggtttggtcagctgacaagcctcaaattgagaacgaagcgaaaatccaaggcgtgagaatcatctataatctaaaagcagtgcagcagcgctagtgtagcattgtaaacagagtgcaaactttgggaatgtgaccgaagcaagtgcaatcaagtgtacaaggaatccgagtagcgcaggcatttcatcgaacaggtggcgtacccaatctcctcgacattgtagtacagcttgccgtcccggttgacaccggtggtcagccagagcttgcccttgctgtccacaacctccgccgcaccagcctcctccagccacaccgcgcgcgacgccaccttcctgctcccccgctacacaacccgatgagctaacacgaagcaaaggaaaaaaaaaaaaagacagcacctgaactggactctcgacgaagacgacgacggggcggcgtccaagaacggattgagatggtgctcctcgccatcatcctccgcggcaacggcgacggcggcgatcgccggagctcgcccgctcctccgccgccggtggtcgacggcgcgcgtgggcttcggcatggccacttccgtaatttttcccaccaaatttacccttttacctttttaccccccaaccactgccactaaaccaacgggcccacgcgccgggccggcccaccagccggcttctcagccacatgggccacggcaggtggggcccacccgcaagaggtcgaagcccactccgcctcgtcctctaccccctcctcgtctcccttttaaacaggaggagaagaatgggaaacgacctctcctcttcttctctcttcactcgtgttgaaattgaaataaatcgcggtcaagataaaaaaaaaagaaaaaaaaagaagaaaaaaatcgcggtctcctcctcatcgagccgcgcggctggatcgaggattcgagcaggtgcggaatctccaatccctcccgcttctgttcgtttcgatttcgcgtgggtgggattggctcgggtttgggaggcgttagcgatttcgcgtgcggatcgacggggagtttaggtttgatggttccgattcgtgggggggggggggggggtgttaggtttggatttgatcggggaattttggtttgggtggattgattcggtggagatctcttcttcttcttgggggaggttaggatttgggagcccgtgaactacgtgttctagtttacttcttcagtttctggattgttcgtgtggattaaccggggttgatggctacttgtacgattggtggtagggggttggtgggttggtaggttttttggtgataaggctattggatttggcaagtcgagaggttaatttcccaattctgttaaactgttcgcgattttcatttcctagtaagtgtgtatgttgtttcaagattcgtaaatttgtgttctgaattttagaagtatgaaatcctaataaattcaacagttagtttgaattgaaagacgcgaatattagggaaggacctaatatcaaataattagatatttagatggggcgaggcttcgaacacaggtcatttagcccaccaccttgtggagctagccggaagacccctaggtgtttctcaacagttagtttgaattgaatcatataagttcgtaaccccttgaatttcaggttgatttcagagttgagtgccactgattcagctccaaagttagcatgagtactgtcagcggcactcggcgtgccccaaggaggcaatcacaagatggtcctggtgataaagtcgttgtgaacctggacgcgatctcctccccagtggttggaagccgtcgcgcggtgccgacctccactggtgcgcgcgcctcccccattgatgtggaagctctggatgatgaagtgcagacattgtccgcttcgcaagtgcctcctccggtatgtcactttttgttatcttgaactgaaagtattagttcagtcttgattatattctgtactattatctgtagttattgttatatgattgggttcataatgatgtttaagtcttttaccagggtttatgtactactccctatgtttctcaggcacactagatgttcctgttaagaacgaactggtgactttgtctccatgaaaaaaatgatgcatcccttgcccacatttgttgaactgtcttgcattttgcagagaaggaaccggagaactaggaggcagcctgtggcagtagttgatctggaagtagatgctagccgggaaggttagttcatttatacaaagattgcattaatctgtcctaattcataaattagtaatcacgggaaacatgggaatatgctatctattcctatgtttgccattcatcaatctgtcctaagtcataacttaataatctgtcctatgtcacaacaataatcatgtattaagtcaagtgtgttttgtgatgataatacacagggaacaaacgtcaaagggttgcacctgttatacactgcctctctccagaaaggggagaagggtccagcttgaaggtatcctataatactatacaattgatccccacttagtttattttcatactccctccgggctggttttatttgtcgttggagctaagttagctgtggatgagaaaatttgttgttcgagtgtttttctcacgtatgggacgagattgcccttgtgcattgatgttgttattcttcccagatcaactcctccttaactccttgaatgcttcgttcccatatcacttaatgatggcatgcatgcatgcagcaaatgtggtataaatacatgcgtaatgtgtggcaaattagcgcggcaaaaagcgtgcgtaagcaaaaacgagattttctagcggcaaaacgcgcgcataagcacaaagtataattggttggtttaattttcgtatgaccttgcacgctggctgcaccgaagctgcatgcatggtgccatgcataatcgccaagacaaaaaaaatgcgcatatccgagaatcgaactcaggtccccacgcaccaagacagatgcactaagccaactgagagtaattagttgcttgtttggatgatacacccagccgtatttaataaggacaaaacaggaaataggaactttacttagtgacttcttggtttttgagattgtgtccgaaacgacaaataaaaccagcccagagggagtaatttccaagtcttcaacttttcagctttaagggcctggttggttattgattacttgtcgtcgctctttattttcttctatgtaaaaagtagctggtactgctgtgcgctcaatattgactcttttggcctccctatagagtttacaagttggcctttcagtggagtgagttatttgttttaagttgaaacttgtaggcatttttcttggtccattatgtcatagaatactcatgcttgtagtattatgtatttatgatgatctggtagagagctattaaaattgttcttgacagccactggtagttaagattcttgcttgtcacaaacaattaggattttgctaaatttcaagcattgtcttatgcattctagtgtaaaagtatctattacatgcatttgatacttgtggctgatggcttattgcgttatgcatttagcttaacactgattgcatttcctgttttggaacaatgctgtgaagactagcaatgagcctcctaaggcaaaggaaccggtttttaactgtccggtgtgttggaacaagttggaggagccctccacaacaatttgcggccatatcttctgcacgacatgcatcaagcaagccatccagattcagaagaaatgccctacttgcagaaagagtctgagggcgaacaatttccaccgtatttaccttccaaactctgatagttaaggtgagtcgtttacctatcaattgccttctcttgtatacctggcactctagtgaacttctgatttcatcaaatcgattgccttctcttgtatacctggcactctagtgaacttctgatttcatcaaatgcaggctcattggatgtaccaaaggaacttctggcagcagcagcagcatcctccaatctaatatattcagaggaacaggagttctcccataacgtgtaccattttgctgtggaattgtgtcacggcaaaatgaccacctagacccgcatgttcatccaaggctactgttgtttgtatgtagatgcatcaccaggagctcatcagctgcaggtgacaactctggtttaggctaccgaatggcctctctgcctccaaaggatacacaacaaaactaactatagtccccattggttagatttatctagtttgtgtactgttgtatttaccatgcgtttggccatgtaccttaccttctctccatagttgttgacgtagccttgaatcagcttgaaatcgtgatgatgttaacgcattacatgtttactcttgcttgtactcgtttgctgttctgtcttctgtgtcttcaagtttgccttctgtggcagagttgcagccaccaagtcggcacaagtgcagctacatttgtgttagaagtgatgttttttttttcagatgaaatggcccgtgatgaacgaactcggaataacaggagggttgaaggatgcaatcatgcaggtcgaacgaatttgacaggcacttcaacgagcaaacgagcagagacaccgcaagaatttttcaggatttcatttgctatagaaactaaatagtaccaaagccatgtttttttttacacatcaaaaacacatacagatacagaccattcccaacccgttgggatcttcattgtaaatgatttgcctcgcaagctgctgcaacaggaacagctgtatatagttcggaattctgaattaaatcgttcgttaggggcaattctgaattctgatactatatatatatatggctttgaaatataaagttctccaaggaaggtgacacatatttcctgttgtacgagcataaggtgatttgacgctcagactgataacaactgaactagggctcagtctgctttaggcctttgaaggcagtttgttcatcacaggggctattttgtcctctgggagccctctttgaggatcaatcttgtaggtgtcatagaagtccaaaatttccatcgagatattcttgacctgagaattgatgaaaatacaatcaatcattaatggatgaaaatagcaagagaatcaaacgatgggagccagggcaagatcaagtgatcaacaggcacacttacaatgttcatgtcaacacggagctcttcaaaccacagagttatgtccttgtctttaagaacgcttgcaatgtagatgcaggctaatgctatcatatatggtgggtgtatgagaataagatccatcttgtaagtatcattgacaattcccctgcaagtaacagcagatgataagcataggaaaaggtatagttgaaaattttgcgtgcattatgttcactaatcataataaagacaattcaattcatttgtttatttctcatgtgattccagataaaagctactagatcttattgtactctatcacactgaaatgattaaaagtggtaagagtccttcaaaggatattcaatatgacaataataaatggaaatactctcttcaaatctaaaaataaatgtcaacaaattatccatgtggtaattaaaaagggttagacttggaccaccaaatgccagaaagcatctaaaacagcttttctgcataaaacaaaactcaaaacagacttcacagatacaaaaatgcaaattgttataagaagagtaccaggcaaattgtgtcagatctgttatgccagcatcctgcaataacctaaaatcaaagcatctgttaataccattgcagctctgatgttcatttaaagtatatataagggcttcggtaattccggtgaaagataatgttgtttcatcgcatgatagtggaaaaagaatcttactgtaaaagaggacgatatgggtggtaaacaactaaataatagtcaagtgcctccaggagcttcatttccatttcaaggatatccttgatttcaaaccggtacttctcatcagaagctacattttgcggggggagagcacatgtttagttttaggttagtgcagttcttcccgataaatatgtgtccatttatgattatgagccttaccacacatcttttttatgtaaaagacaagaagtcttgcttgcactgtgctctcttccacctttgatgccaaatacaaacaggttggtgctaccagacgaggatcatattcagtcatgctctttctgtaaacatatccagcatcagaacaaaattctaatagcttgatgttccactgcaacaaagaattaaatgttctggaatgaaatattagaaagcactgtgcactgtgccactgtgtactctagttcttatcgaagaaagtagagaatcacatcaacatagtagagaatcacatcaacattttgcaagccccccacataccataattcttagggcattaattagctagagaaaggaaaatgatagccttattaggaagttagaaagtatattgtttatagattataaggtagtcaccttaatgggaaagtaaggccatctacagtgtgaattcgcaccaaacaagctataaagcagtctcgcagcttagcattgttagctctagtgtgttactcatctcctaattaacatttggaacccataatcaagtcactctcctctccacctctctcttgtatatcagggaatatatttattgtgcaccaaattgagaagttctattttacttacatgagagatggctttactttcccattaaggtggcaaccctataatcttaaaaatacgctttctaatttcctaataaggttatcattttcccttctctagctagttaaattgacagtcaaattcatatggatatcttaggcactctttctcctcgatgaatagaaggcaactgcctttcccatgtatccttaaagagaatcataccttgtgtatacacgcctgaaataagtaacagcagtagctatcaccctgaaaatacaaatgacataagatcagtatcttcaaaaacttgaggtcggtatctcaaggtaataatggataagtctggtggaaaatggacaaaattagtagatatagagtaaacattatgagttacagttaaccttgtgagaacgttgaaatgcccttatggttgacagatactacagtaaagggaaaaatataaaagtataactaacatgttcgtttttctcttaaagaaattatatctcagtctttaaggccaagcagacagcagaaatgttacagcaaaaatgaatcttgacgagggaaacattaaaacaaaaccaaagtatttatgtctctaaagtaatgagccagcaatttatacactataacatatatttccacaggcttgaaagtaatccttcagaaaagtaactgccaaatttgttgcaagtagaaaggaagcagaatccccttcttaaaataattaccctaaaaaagtcacccttggtaacatttttagaaatagtctacagcgcatagagtgtacaaggaaagcctgctaactaagtcccaatgcaaaatgacaactttggttgttcgataagggcatcctataacaaatggtacaggccagaaagtggagagaaggtttaacctttgtctaactttcacctgttgtgccaatcgccagatatctgaaatcatcaaatgatttgccttaatttgtaggactaacacaaaagtacaaaacatgaacatcgagcaatcttaagtgagacgctacagcttctataaatggaacgaaatactatgcgctcctatccattttcatacctacggtagttatgctacacctttgtcgatttatggaaacaatgctagcatagcttgcagtgaccccactataaccgaataagaatacaaatctgtatgttcgagaattttccatacgaagatgcataacattgcgcaagggcatgactacacatcctatgacaacttgattcattgcaattacagcaaaaatctgtgcatattaatggctaaaagttccctttcttaaccaccgaatgaccaaacaacacatgccgtgagctgaaaatgctttgcatacaacaattatacactacaagcatactacacaaatttctaattgccttgtaactatagccaattcctttgatcaacacaacccaattaaaacgtactagtatgcatgtgacacaaagttgtatatactgactaccgaattcatctagaacgagcccactaacgctcgcatactagttcctaaaatcattctcaaatccgtttatgctaagtagcagtatctccccaattccagaaaccaggcaatcacaccgagcccggagctgagaacaaattcgcgtcaacgaaagcatcacaggaaagctaaagggaggagaagctcacggaaggacatgtggatcttgacgaggcggaactcctccagcgtgatgccccggtcgctgtccgcctgggggaccttgtccacgtcctcctggtccagcagctgcttgctgccctcgctcgccgcgggatcacacacgaacgaacaccccccaaatcagcagcagctcagctcacggattcgcagcccaagaaaccgaatcgagagggggggaaacgtgggggaggttggacgcttaccagtgcgacgacgtccagaagttggcggccatcgtgggcagggcggaggcgactccggcgagcctctccggccgaatcggcggcgctcaccgggaagagctcggagttcgccggaggggaggggggaaggggaggggacccaccggcgtcggggatggattaggaggtggttttatcaggctcgagttttgggccgtttgggctttgggctcttcgaggcttactcggcccagaccaaatgatgggccgattcactatttcgctagtattttgcctcctaaagttcaaaattacaggagcctctctggggaatgttaagattgtaagaaataattggttggtaaccagtttttgataatgaaaaaaaaataggtttttcaacttctaattttcagttcatttttttagtctacaactatagattcttagaatctggacgaaaagctctgggagaagcgggaggtgatagaaactcttcaaatagggccttgaactgtttggtgtttggtatgttacccaaatcaatcatgataaatcaaattatgtaattcctctattttgttgttgcgtcagcaaaaatgtaattctgaattgtgacaaaaaaggaacttgtatggtagaggtatgtgaatgcggatgtgatagtatttttggtttgatgccttccaagatgtggtacctcgtattacatttttggtatagtggggtacttaggtttgtttggattgctaccttccagaaatttgctatggttggtttgggcaaacataccaaacactttgttttcacaagcaaattggagctcttttttaaggagggaaatataattaaaaaccaaccatgaattatattagctttttttctaaaaggtgaaaaagtataacaaccatgaattcaaaagtgctacatcatcaacattgatttaaataaacaaagggtaggagtaacctttcatacctgtcttgtaacatgaggattgctgtggataaaatgcctatttaccccccaaaagtgctcattcccttatttatccctcgttctctcaataacactcgagcccatattccacatgtcaaaactaagacatctatacattctatatagttataacccactaagtttaaaactcaacatacaaatatactagctcatcattcactaacaataattacatataaaaactcatacaagtattcaacattatttacaattcattgaattctacaaatcaacatgcaaagcatatgtgattatcacaccttacatcatttccataatattttaacatatctattcatcattatattacttaatatatatttatccggataacatttattgattgctcccagcgaaaaacatttagtccttatttggttaatccttacgagggaggaattggaggggatttattgtggtgtggaattattccccctcaatcccctctaaaccgaacatggccttaatcattgccaaccggggctccccttttcccattaaattggaagtcatcgggaaatacatttcaccgagggccctggcaaatgacactgtagctagctctggtaggccttctttggctggtatgacaagtgccctcacatgtaggtcgttgtgcagtgtcatatattgtacagtactacatatgagtacttgacaggaggaaaaaaaaaagaaatctctttaaggtggtcgctcagtcgtctactcaccatgtaagaacaaacagttgctgctcccaaacattcacatgctgtcctctcccaagtctgaacatgcatattcagaccaaaaaaaaacatcagtataactaacagtccaatatgtactcgtgctatgtcatttgctctctcctgtatcgtaggatcagccgcagctaaaatctataattttaaaacttaattttagagttgattttaaatttttttcgtaatttatttattaacactagttttgaagtaactataaacacatcttacaagttatattttttaaattgctaataattaactgtggacgaaacgcgatggaatcatactgttcatcttcgaagaacagatgtcggtttgcacgtccttcttggcgcaattcaatacgattcaggcttgatgtcgacgacgacctgtcatggaatgataccagaattaatggatggggaacacccagcatgttgacgtctcagcaaccaatccaagtgaattatgatctaactagctactgaaaattcctttatccagtgctaaccaatcagctctaacgatgaaactgtcagggaaaaggttggagtgaatatccatgaaaacgaccgggttttctgaagaacattcagggagacgaaatgcttggatggatacatacatacatacatacatacatacatatatatgtatgtgtgtgtatatatatatatatatatatatatatatatacatatatatatatatatatatatatatatatatatatatacatatatatatatatatatatatacatatatatatatatatatatatatatatatatatatatgatggatggttagtttctgcattgggtctcattcatgagatgggctgtctagcttatccttcagtttcagattcttgctaagttctagttccttctgtttggctgaaaatttgtagagtgctgtttatctatctcccactgtctgaaactctgaattacagttcactagtatgagtatgtttgtttcagtctttcagaatcatgtaaattatactgttttcagtaattattgcccatatgtctagcactcaactccagtgattcctcaacttttgcatctctggctggattgctgtccattgaaaacacccattgaaaacacttgttttcagaatgttccaaagtttctttaaccaaatactgccatgtgtgtatacctgtttcagaatattccaaagttttttgactaaatattgccaagtgtggcatactcatttcagaatcttccaaagtttttttgaactaaaatattgccaactttgcatctctctatggattagatttcactaaagatattttcatcatgcagccacccatatgatccttgtacttacgcaggccgtagggtcccttggcttcaaaaaagtcaaggaatccaacctcaaatcagataaactttagtgcagcgattggaacagatgccacattggatctgattggacttgtctggataggattatcaatttatcatggccaaaacatccgtcatgtcatgtgcatacgcctgttcgtccattgccagctaaatattcagaacctaacactgaactttttccacactgatcagaaattaagaatgccaaacacaactagctcctgatcaatcaagcgacattacaatctgcaactgcaagtgagtagatgcatgtgtactgtagtataatcgcattcaaaacgaggagtactacattgcaatgaagaatttgtttcgccaagattgatcaacctgacatggcagctccttcgcaattgcagcattgcctgcccttctcctgaaagtgccataagtcttcctgtacctgaagaacataaattcttgcaacaccgaacagatcaccaataaatcatggtacttttgaaggacatatgttcgtcagatctatgcatattcagacacaatacttatcagggcaaatacttatcgttggaatcagctagcaattaactccatgaagtttcagctatacatatacatattcgatgcaagaattaatcaatacggttatacggagatcgacagacataattgcatctagcttgacgccttaatctgtctgacctacactcgtgtctctcgtagtactactactaaatatcaggattatatatgtcaatggcatcatttccattctctgcattcaatccaagaacctttcaggctttcagtgacaaccaaacggtccccctttgcaagcctgcaactgccatggattggagagcatgcttcgtcataaagtggcatgctctccatcgaaaatgacatgcgtgtgcttgatgcttcgatcgatcttgatttggtggtctcatgacaaattacgaattggggttgcacaaacatgtcgacattttctttcaggattttgccggtgccaacatgatcaatggacttattaatagcagcagcattagcagcatgttcaaccacatgtatcatgtacaagtacaactgcaactcacttaatctggaacatgcgtaattaaagaagggacatggattacagactcgtgtgtatagctgaaatagtgaaattaaactgtactctaccctgttaatcatttacgtttcagttttttgctacctaatactcgtcaaaaatatttgacgagatttcgttaaaaatttaaagttccgaccatcaataatttctttaaatttgctgcctgttactatagaaaatatttagggcgagattcagttaaaattttagaattccaaccatgaataatttatcaaatgcttagtttttttaagaaataataaacatggatttgtctcaaaagtagtatcataaccatgatatcgtaaacttattggatatcataaacttattctaataaaaagttggtttttagaatttaaaagtttgatagaattttatcctaaacattaaatatttataaccgcgcgtgggactaccaaattacgtgaaacatagtactaggtcagttcaacccaaacaaataacatggaatgtaaaaaaaaacacaaatattagataataaatagaagtgtgagccttcgaatctaggccggctagtctaccaccctatggagttagccgaaaaacgctgggcgtttctcaacagtgaaatatataacaatcaaattaaagaatcatgcatcatatccaattatatggtcgagcttaaccaaatgattagaggggagaagggagcacagacgttgctctcagctcgctctgtcactacccagtgagccactctgtcatgcacgttgcctcgattgctcagtaacgcactccctccgtcccacgatataagggattttgagtttttgataacaacgtttgactactcatcttaatcaattttttttaaaatataaaaaacaaaaagttgtgcttaagatactgtagataataaagtaagtcacaaataaaataaataatagttttaaatttttttgaataagacaagtggtcaaccgttgcaagtaaaaactcaaaatcccttatattatgggacggagggagtagttactagagtaatacccatgcttttctaaagataaaacaaaatatattatgatattatctaaaataattcttttataaatatattatctgtcttttttctaaggggaatattcatcttaacttagttttatatgtgtttatcatttagatttggatagtttgtaaaatttatatgtgtttatcacttagatttggatagtttgtaaaatttataatagaaagatgaagtggtagattactatcaagtaccgacatataattaagctggattgaccaagcatgcaatgatataagttactaagaacatccatgtgaaataaatatatattccttccgttttttaatagataacattatttactttcaaacacatatttaaccattcattttattaaaataatattatgcatatgtataagatataaatcatacttaaaatatttgaagtgataaaacaactcacaacaaaataaattataattatgtatttttttaataatacgaacgatcaaatgtgcgataaaaagttaactacgttatctataaaaaaaatgaggtctatggcattgctctcactctcagctagccaccgacacatccagaaacgcgtgcagacgccggccatggctgatggcttaggtacaggtacatgccctaacattgtctgcatttgcatgtactcctatatgaatgcgagaacgacgacgaccgtacgacagtaccggcttttgtatcttacgatgggagctgggcactgtgctgctgtctaacgctgataataataatactagtaatcaattaagtcatacccttgctgctggacctgtctgtcatgtggaagatacgactgcacccccccatggtctgctactcatatgctagctgactgatcagtgatccagttgtagtttttcgtttcctttcagctatctttatgataataagctgtaggtgtagggaccaaagaggatttttttttatttatttttgaacttttctatttttaatcttaaaaataaacactttcaaaacttatttacttataagatctgaatcttttggttatgtcatgattggcatggcaaaataacattgtcacgccgatctggctggcgtggcagcgttatttggccacaccatcctcactggcatggcgggataaaactgttatgctcgctgtgtgtgacgtgtcagtattgtttcgaaaataagttttgaaagattggcatggccaaaggttcaaattctgaaaacaagttttgaaatggtctacttttaaaataaaatataaaaaaataaaaaaataaaaaaatcaccaatgcgtggttctttaaccttttgagatcaatcttgcaaactcgtgcttgttttgcaccctatattcatcggatttttctcgcctattagagcaagtttaatagtactctttccgggttgataatacttgtcgttttggataagggtgaggtcaaactttagaatctttgattatcaatcatttttaaaatatttctctttcaaatatggtgactatatgtatagattggtcttaaaaaatactttaataagatcatatatttgtttaacacttttatatatattatagtagaaaataatggttaaagttgttttttggagaccgtgcctttgtccaaaacgacaagtattatcaacccggagggagtataaccaactactagctctaattcatctatagtcaatctaatagttcattcatacaatagttacctatagacatatactaatccattaatatatggtctcacctctcatacacatacaacgtattggagtccgtgccgcagctagctataaatctgtagtctgctttccttctctctcttcttttctcttctctacatgtgtttgtagctgacttatagcctgccattgtactcgctcttactcgctccacgcttgtaagattatacgatttctcaaaaagctttcatctaatgcattggttaaaccattatttcagatgttaacgaacttgccgtacacattttgcttggactttttttctttaatttcgggttgagatggctcagttgttttcagttttcagttggcagatcattaagtcgattcggatcggagtttccgacaggtacattggttaattaattaagacacaactgagaatacaaagataatgcacccggtttttttcaagctacactatcgaattatttccgcgggttttttttatttactatacgtcttgaaaaatatgtttcctcaaaaggatttctcaactttttttaaaaaaaaaccattcctccaaattgtcgacgggggatacccatagactggatatagagggtattggggtacgctagtacgaggatctacgtagtacaacatcaagcaaacaagagacagagattatactggttcagaccccttagtaggtaatagccctaattcagttgatatgggattatacgatgggaatcacagattacaaagggaatagtggaacttgataccaacgagattgtagtcgagttggttcgactagatcacccggtgacttggctcatgtaggctccggcttcgtaggctgtggtggatgtgttggcggtaagattccatgccttaggtcctcccaggggtcccttttataccgcaggtcaattggtctccaagtagaacttggagatgtcggaccccatacgatacagtaacgatccagttctgtccgagtagtactccttccatctgtggactccgtgatgaatttccttaacgtgtacatggaacatccgtatacgtgcaggtataccatatcagtacacgacgtatatccaagggtagagggtataccttatccgtaactctgacacaaatctttgttaaatttattttatgaagtttataaaatatttaattcatcacgataatcaagtagataaataatctaaggtaataatgcgcaataacctgttttcagacagcctcgctggtgacggttgagcgctagcaaacagctcgcgcatgctgcccatgcagagagtcaatggatcaatccatgtatgcgctcgccggcggccgctgctcctcactgtgcgccataaattccaccttcggattggatctgaatatctatcatctatttttagttcgatccgtttaatttaatttgcccccaattttcactggttgatctgacctctccatcgactgattgatcgatcgatcgagccctactagctgtacatgaacaatgaacaattacatcgtgatctcttaattgaatgcatcttaattctgcatgaattcatgcatgctcttctcgatcgatcgtgttcttgaagcgatcgaggacggacgacactgtgtacttggacgtgaccgatatgcatgagagctttgtaatggtagcgttccaacgctaattaaatacaagcaaattaatcaaggtcatgtcctaatttatgcatgactaaattatgtatgagacagtattgcagcttgcaggtatgccatgatgatgttaacagtcctgcttctggtatccttgacaatgaacgatcgatcgatcgatcgatcaaattaaaggacattagctacgcacagtactgatcaccagcaaaacacatggtcagttgttaatctaatcaacctcctttaatttactccgatcgatcgatccaggtgctaaatagctgttcattaaattcgcagaggcatcagatcaccgttacattcatccattaatccagaatttcaggtactatttcactgcctgcgactgcagtatttgcttctgtgctagtaagagtacttcttttctgaagaatctgttactgctgctgtgctcatacccaactcgatcaatcacccatgggtttagtatcctctatcttcgaagctactacataattttatcactggtatatgggtccgatagaccctaggactcacatgtgagacatagttacaatcggtgttgggcctatatatggccgccgctttctcttccttcctcagggcaagcggcgtcccgcatgctcaccacacctcgaggctgattcattgctagggatgcggttatgcttgcggcatcttaacatgggcaaaggtcattacccacaagaagtggcggctcatcgtccttatagatagagttggtcctcttagtgcggcatggcctcacatgatcttttggctaaaacaactacggtggcgtcaccatgacggtgacaacaacgactgggttagaggtgaactcgagttaggatggactagttatgtccgcacgatccgaagactgccacaatcagaacggtatctttagtggcgattgatgagtgtaaccggtaacgtcagaaatgacggtcggtgcgtcgtcattggcgagctggcttcgatagccatggtagtggcaagatccgacaagtgactgttttacacttcaattactcttcagtgatatttttcgctttggcttgacatcaatcatcggcgctgatgtgcacaaaaattgatttgaataatgatcggacgctgattttgagattctatattccgttttgtaatttgatttatatcgacggtgttatctatttctttagactaatgttctagctagttttcttattagctatcaagttatgatttgtaatccgcggatgcccgatctataaattctataataattaagtttagcttctttaaatgcttcggtccaacgaaaaatatctcgaggtaccgatatctcacggtaccaaatcgttttcgatcgttagatctaacaatatctatcctgtctagttagattcaatgattgaaaatgatttgacaccatgaggtaccgatatctcgagatactttttgcagtactggagtatatctcttattaaacaaactaattgtctcaaaatcctcacgaggaagaggaatccgacgttatggcccgtgagaaagatggcatcaatgcgcaccccccgcatcgcctcatgggctcccctcccctctcgctacacccccggaagcaccgacccatcgacccccagcacgtcacatgcgctttgacaacgatctgagatcgatcgatgtgccgccgcccgccggcggccgcaaccgcttgccggcgacaaaaaaaaccggcgatccccttttgaccttgccagtctccacatgtgcaggcaagtccgtgtgtgtgtataaactagttcagcacggaacgaactcacagcacagcacaatgtgtcattctgcctgctttttttagaatgatattttttatccggtctctacatccaaccatatatatatatatacaactcttttaaattgaaaacttaatctctcaaacaacctaatctaaaaattcactcatatgaagatttgaactcagaatcataagatgctacttagtcagtgcaaaattactatattttgatcaaagttaaaacgtctttgtaatctggaacggagggagtagaatatatgtgtcattctgcctgcctagcttgctagctccactgccgtgcggtgcatgcgaggtcggaccactcccactaccgcgtttcgcccaagttgcgacgagccgaacgaccaaacacaaacgctggatgctgcgattctaccgaattttcgcctgctttctcccgtgcgatctcacccgaattcctctctctctcgtctcgtccccgtttttttttacccgtctccacgaaccaaaaagaattcgaaaccaaaaaaaaaaaaaaaccgcagcgcgcgtcctctctctttataaccttcaagtgttcgtccactccctcctcagctagcagcagctctagcttattactaccaccaccactgtactaccccgcacgacacggcgcgacacggcgcgacgcgacgcgaggaggtgagcgcggatgccggcggacgcggcggcgaaggggatgaagctggagaggtacgcgagcggcgcgggcgcgatgctgctgctgcggcgggcggcgagcgggaaggtcgtgtcggcgtcgtcgcacctgctgttccgcgccaccgtgctcgccacgatggcgctcgtgttcctcttcacgttccactacccgtcgctgctgtcgcgctccttcacgctctcctccggcgccggcgccggcgaggggggagccgcggcgcacgcctcgcaccggagcttgctcatgtcgtcgtcgtcggcgtcggcgtcggcggcgtcggtgtacgggggcgcggcgtgggagaaggaggtgaggcggagcgcgaagccgaggaaggacggggggatagccgtgctggtgaccggc

SEQ ID NO: 8798 - DNA, 64693 bp, Oryza sativa
accccatcaaaattttgggtgggatataaacagggccaaagccaaagtctgaactttcgaaatcttctctcctgcatctgcacaaatgtgacagtttttaattatacatgctttgactatgactggtactagccgggagaagaaaggagaagagaagatgagagcaagaactgaactgttccaatccaaggccacttggaccctgccttctccagtcgtatctggcgcaggtggcgatccttgatgatgatgaatcggtgacaaccttgtggagatttgcagtttgcagatttgcagatttgtgatgatgatgatgatgaatgtgagcttgagtaagttgagtttgcagagcagcatagcatacggccatggcagctgcatactccactatgcacaagttcaatgcatgcatttacaaactcctcgtaccccctgtgagtgtgacagaagaagagagaaaaaaaggatgccatcttgcattcttgcctcttgtcctggtccaggtccaggtgcagtgttccatcagatttaagacaatttgttaccattatcatactagatgacatatcattaatttcatgaaattactccaagcagatgcaactcgtagtatggccttgtttagttggagaaaatttttggctttgattatcatatcggatatacggacacacatttgaagtattaaacatagtgtaataacaaaacaaattatagattccaccaggaaactacgaaacgaatttattaagcctaattaatatgtcattagcaaatatttacggtagcaccacattgtcaaatcatggtgcaattagacttaaacgattcgtctcacaatttacacattcgatgtgatggttgaaaagtttttgtcttgggacctaaagcagtcctatgtatactaagtgatgttcacttgtttgttagccatcaccaaaagaacatttacggcagttgaaccagcttcagaatctctgcagttaaatatttaattttataaatatttcttcaaactaaatattttaaacattattaatagtcaaggttgtactccctccatttttaataattgatagctataatttgtttccatttaaacttggaccactagatacaatttaacaacgaaatgagcaaaaaatatttttatatttagggtaataacatggctttatatctagtttttgtaaatattagaagaagaagacaagtggtcttagtttgaaagtgaatattccaaaaaaaacaattttataaaaatggatcttttaaccttaatcttattcaaaacaacaatagttattgtcgattctagaaatcgacaccgagaaaaagggtagcatatgagatctaaagtggatgagtacaaagacaaagatttcgacatattcagaccttctcgatgagaaataatacattatttttattttggggattgtatccaccggatgttgtattggtctgataatcttggtgttcctatgccctcaggggactccctccctaggttcgggggcaaggttacaaaggggaaaacctagtcagacacgatatggattttcttattcagttattcaattgcataagactaatactacggactatgccttaaaacaacttttaacactcaagacttatcctaaaatataataacttctccaccaacattctgttccaaccaatcaccactatccatcattcgctttttccacctacctccatttcttaaccaatcacgacctctccctatttaattctacctactttcttaaaaatcatgtctaactctaaaacttcttatattctgggacggatgtagtaatatacaaatctggtccacctcctaccttcagtcggataagctgtccgtgtagatatatattacccaaaatctccacagctatgtaacccgagggagaactagcatacagctgcgtgtgttgtctcgtcatctaggtggtgtttggttgcaaggatgggatgggacgaacccactttgaggagtatttggtttatgggttagtgggttgggttggtccctaaagaggaatattcctctcaaaatctaggaccaagccatccggtaaaatcaaccggacgagctcgtcctacctagacggagtacacgacgtcagcttgtctctacatccgctggcgctcatccgtgatgtctgccacctccgcaactgccgacgcctctctgcaagcggctgccacctctcctccacgaccctccgccacctctcctccacgagcggtcgacgaccctccgcgacccactgctgccgaccctccgcgacatgttgccgcttctcctctgcgagaggccaacgctcctccgcgacccgtcgtcaccttgtctccgccgcctctcctccgcgagcggccgcctcgcctctcctccacgactggtcatctgccttctcgctcgtccgcccgtctgcctgttggtcgccaccactcctccttccgcctgctcgctcgtgcgctcgtcgagtcatcggccacgccgtccctcctccgcttgctcgctcgccgagttgctggccgcaccgctcccaccagcttgccgccgggatcgaacgtgggttgacggtagccacaaatggcgtccatcccatacctccctcatcctttctaccaaacaaagaactgggatggtctcatcctatgaaccaaacatgcgagtagaatcatcccatcctaaaaatcagggatggtttcatcccaccccatctaatcccagaaccaaacaagtgttgttcttggctttgatgatgtgccgattaattttccaacgactttcggtactccaaatactccatcaatgcactggcacgccatatcgggggtgtttagatccaggggtgtaaagttttggcgtgtcacatcgggtattatatagggtgtcgtatggggtgctcggacactaataaaaaaactaattacagaatccattagtaaaccgcgagacgaatttattaagcctaattaatccgtcattagcatatgtttactgtagcaccacattgtcaaatcatgaagcaattaggcttaaaatattcgtctcgcaaattaatcgcaatctatgcaattagttatttttttagcctatatttaatacttcatgcaggtattaaaatgttcgatgtgtcagggtaaaaaattttgggtgggatataaacagggccaaagccaaagtctgaactttcgaaatcttctctcctgcatctgcacaaatgtgacagtttttaattatacatgctttgactatgactggtactagccgggagaagaaaggagaagagaagatgagagcaagaactgaactgttccaatccaaggccacttggaccctgccttctccagtcgtatctggcgcaggtggcgatccttgatgatgatgaatcggtgacaaccttgtggagatttgcagtttgcagatttgcagatttgtgatgatgatgatgatgaatgtgagcttgagtaagttgagtttgcagagcagcatagcatacggccatggcagctgcatactccactatgcacaagttcaatgcatgcatttacaaactcctcgtaccccctgtgagtgtgacagaagaagagggaaaaaacaaggatgcaatcttgcattcttgcttcttgtccttgtccaggtccaggtccaggtgcagtgatccatcagatttaagacattttgttaccattatcatactagatgccataccattgttttcatgaaattactccaagcagatgcaactagtactagactactagtatgtataccaagtgatgttcacttgttcgtcagccatctccaacaacatttacggcagttgaaccagcttcagaatcactactcctacctgcagtagatgccatttcagatagattggcaatcaattaagatggccttttggccgctcaagaaactgtgtactaccaatgaattgaatgcagatggaatttctcgcaagatcttcagggatatgttcagtctgcatcggaggggagctgatcctgcacagtttctcaattcttggcatattagtagaagtagattactagcagcggcatcgacgatcaatgcctttgttggcttttttttttaatacgcaaggagcgcatctttgtattaagaaggaataaatatatgtacaaagcgggaaaaaaaacaaagcgaaggggacagggtacaggaggagaaccaagaaataaaagcctaatctccaactaaattttgcgacccttctccactaacatgagctaccaaaacggggattgcagctctagctagccgccacagctccgcttcacccgtcataacccttgcaacctccgcccaagttctgctcttctggttgaagactcgattgtttctttccttccagatcgtccatgcaaccaacgtcacgatggtgtcgaaaccccggcaatgttccttgaccatcttcttgcgacagtcgcacaaccatgagaggaaagagtgttcattgagcggtaagcactctgaatgcccgatagctctgagcgcaacccaccacagttgccacgactccgggcatgcgaccaagagatgatcaattgtctcttcgcattgatcacacaaaacacatcgatccgggtgcgacaaaccacgactccggagacggtctgctgtccagcaacggttaagagctacttcctccgtttcataatgtaagtcattctagcatttctcacattcatattgatgttaatgaatatatatatatatatatatatatatatatatatatatatgtctagattcattaacatcaatatgaatgtggaaaatgctagaatgacttacattgtgaaacggagggagtaccaaccaaaggaagtagcgacagcgagggggtgccaaagattgccaaattagcttgtgctggagacgagttcttccaaaaaagagaacacgagaagccgagcgggaagagtattctcctgaggtctcccaccgccaagatagagagtccggctcttcggaaagccgcactgaccgaaggcaatcccaaagcttgaaatactccaggatcgcttgaatacccaacgccgaactgatgtcctggatccatcttctgttagtcattgcctcggccaccgtgcgtcgattccggagatgggcagggattgcagcatagacagccggcgctagcaaccgaatggaggaaccctgcagccagcaatcctcccagaacagcaccgaattcccatcccctaccaagcataccatagaaatcgatactagattgcgctccttctgcgagaccagaatactaagcccttgccacggcttttccggtgaagttctctgctgccagagccatcgcgacctcaaggcgattcccaacctctctagatcaggaatccccaaaccaccatactccttgggcgagcaaactcgagcccatgcgacccgacagacgccgccgtttgcataagctttgccagcccaaagaaagctgtggcggatcttgtcagcctttgttggcttttcaccatctgctcatgaactggtcaagaagcgagcactggttggcacatcatctctgaactctctgaatcttctctcccgcataatcgaaacatcaaataattgagttcaccctaacctcaaaaggcttaaaaaggtggtctgaccgtaaaactgaagactgcttcgataacgtttctgtagaaactcgttttgtccaaaaccaaccgttagatcaagtttactttattagaataaattagataaactaagaagcaacttcaccagatgaatttgttcataatgtgcaaccacaacacccctcatgagtttcttataagaccataatacaaagagatccaaactctcgaatttctcgattgtggcttaccctcaggggttaacctctctcgctatttatatccatggatgtgatgtccaaagtcacgaatttaactagtactactaggaatcctaatcacaaagttgggagtgcaccagcaggaagagaagcataagcaatgagtcatctgtattctgtcttgtaaaagaaaatgataagtgtgatatctgagaaactggtttcataatcgaacctgcccacatatttcacctacgctactgcagtttttggcaatcttgcacttttctccttctgtcactgaattgtgggtccttagcctcacgtgtcaatgagacagacaagaagtgcaaataaaggattaagggtgtgtttgagaagaaggggattgaggagattgagaagatacgcaaaacgaggtgagccattagctcatgattaattgagtattaattattttaaattttaaaaatggattaatatgatttttttaaagcaactttcctatagaaaatttttacaaaaaatacaccgtttagtagtttggaaagcgtgcgtgcggaaaacgaggtgctctccctcaatgtcctccaaacgaacgctgcctaaattgttgtagtgtaaaacaaggaaattcttcagcatgttgaaattttggttgatgtttgtgctattggctgttaatgtttctttttgaagatggaaagtacaacgcaccatcaagaagagaagcattagtatttggagacattttgggtttcctatcttgtaaataatcgatatatagtctcgaagaggtcgttgcaaattgtttcgatatatataaactgcctatcgtttcttagagctaggaccgagcacagtcctactcctagcaattaacataactacgaattttaccaactcttcttttaccataaaaagaactgaggcggcaaagacgctctgtacaatcttcgtacccattcctttgtaaaacccgtgcaatccttcataccggatcatctttatgatcgcgtcaatcgtacctggagaaaacaggcagtcagcattatattacttgcacaatgagtagcaaatattccctccgtcccaaaatatctatatccgtagctaaaagtagctacattttataacggaagaggtatagctaaatgtctgacacacaagacataggagcagcgcggaaaaacaatgatcccaacaaatatggaaatgaaacagtgttttctgctagtaagttaaaatggtaggaaatgatttacctgtgtatctggacatcacattcctgccaatttcttgttttgcttgcaacctagactgcattagttcaatacaacaatcaggatagcacaaacaaacatgacactattttgataatgtaaaccattcatacactcaacccagatagactggcattgcctgcaactacttgcacccgtggcaggtctagatattgtcgttgttgagtaaagtctcacaagattaaattatattctgaaggagagcaaaaatgtggtgcagcatattcatggggttgttgtatgcaacaatgcaggacagctattagtactgtagttgttttgctgaaagcatttgttttaacaacatcagagaaacagagtagagaaatggaaaagaaatctctagcatcgatgtggacttccgggtttctattcaggcctattttggcaatcctgagtggcccatcactggctgatctgacaagccagtaattcctcatttcttaaaaaaaattgagcttaaacagatgtacaagtgagaaatgcatcagttttaacactttgcacaagataagatgatttacatgtatataatattaagtttaccttaaccactagcaatgggtatgtcacaacagtagctccgagctttgctattgcacctaataagaatacctgctcaaagagaaaatggtaaggataggacatataaatgcatcaaaggaaatttcaaagagcttaagatgttatttagctctggatctgaagaataaagaaacaaatatatggtctgtgctatggacataattaaacaaagggaagtaataatgatgaatattctttagtgcattcatagaatcataaattgactgcatagctaattgtagtatgaaattactctgtcctggcgctttatgtggccaaattatctggtttgctcaaataaccgtagcatgcatctttaaatataataatttatggagtacaagaattatagacgaatgatttgaaggtaattatagcaatcccaacgatgattctttttacattgaaccaaatattattgatcatgatcaatgtagctttatttgcatcaaagcggataaacggtgaacaggtttataggattgaaagatacaatacaaatttctagaaataaaaaagaaacatgaagttcctaggaaggcagcacatgcaaatagctgatgccatctaactgttaaaaactcatatatccacagacacagatacatgcaaatttctaatgcagagctaaatcgaaaaaacaaatccatacctccatagcagtaaggttcttttttgggagttcctttccagatctctttgaccggagacgctttgccaatgtttcatagatcataaattgaattgatggattacatacctaacaatttaaatggttcattctctatagtcactcttacataaccactaatttcagctcaaatgttttgagaaacataaactaaccataattagtgttggaataagtcctttccagaatcctcttatgcctgattcacggtagacctcccggacctacatactactgataaaagtaagaaaaatcatgtctgaccagtgacaaatacatttgattagttaaaagcaagtttgtagagcccaaaacttgaaatgcaattgcagctactattcattgtagttttttgcaaacagaattttaaaatctgtaagtgcagcaattagttctagaaggaagaaagcaattcgataaaaaaatcaagaattcttgtactatctaaatagtacaagtgagaaatctatctaaatatctagatgtggtcacaactctcaacaaaaaatagagaggagcagggttgggtgtgggggattcacgtactatcttattttatgtgctgcataattgttaagaaatggattatatatacaaaataatgtatagcaacttaaggaatgtgagtgtgctcaattactcaccgcttgaattgtcccatatggacgaggcttttcagaatcaagtttatacaacctgtccttaagaattgagacctctattgaattggccctagcaacatccttcagcaaaagctcctttttagactccatgatcttcttttctgcttgtgtatgtgtctgaaaaatggaataaagttaatttccaaactgatgataaaaaaacttacagatattttgaataatattagaatgttccaatttaatagtagttgcatagttaatacaagcttggttacaaccgaccatggtcttccaactaatttcacaaaggatgtcatggaccaataatccttgtgattcggcgcctcctgaagtttcatggatcattgtcatcataaaaacaaagctaatgcttggagtcaggcaggtacaaagaaggtaagtatgctaccagaaagtgggggcaaaagcaacagtaattaaattcaatgggtgcaataccaatgttaatattctaacatattagaagatttcttctctttttttgaattttgacaggacatacagtatagtaactcattaaccccatcatcgacgatcttttttggtgttatatgtcattttaaaatatagactgttaaacaaaatttacctgcatacgagtcacgagaacccatattggattggtaagaagaacattgattgacctgcagcagagaaaagtgtccatcagaatgcctgaggatcaatgttgcaatattacattcaaagtgcaatcttcgccatactggtgactctatttcacagcgctatggttttccagaacaaaaaccatcttaactggaaaggattacacgcttcaaattcaaagttaatcaccgccttcagtcagttctaaggaggcaaggccatacgaacaatcatggcaaccatacattaccatgaattacattttcttatctccctttccgaaacaatttaaggtttcaacgctctgttagcctttgcaagctcagtcaaattcatcagaactctattacaattcgtttgacaggatactatggagatgccctattggaccactaccaactgataatgtcccggttgtccagactgaattgttcattccagcattaaatggagacaagcattcgatttgttttgggtgaatgttggggctccaggttgacttgacatataaatgatgtttagcaatttcagtgcgagagtagatggcttacccagcaacagctgcaataccaagccaggagaacatcccaacagtaccatcccctagacccttcttaccgcgagcaactgctagatcttccaccttgtttttgagaatctggtaaaagtagtaatagattccctacaaccacaaacaggatgaaccataaatcctgaataccaccgtacagactcatccaagtatcatcacattgacaaacagggaaatacaattgttacagaaaaaaatgatgtgagtagcaccaaattactaaaccagtggaatttacctgtgaagcagcggtgccaataagagagggtttaaggccgctatacaaccctccccatccttctgtttggaacagctgcagtaactcgattccacacttggccattataacattagaggaggcaattccaaataaactaaaagtccaggaggaactacctggagcatctggaagagggtggaagtattggcgatggctgcgccattggccttcttcttttttgctgacctctctgtctgctgccgggtgttcacctgctcaggccatcatcatgatgaggaaggattgagcagactataaaggaacagcagagctacataagatggtagggggagaatgattgtacagtctggagggggtaggtgatgatctgggcgatgatgccaccaccggcaccagccaatccattcaccgccgcactcgacatgcgccaacctgaaaaacccatgcgcaatcagaaagcaacgcaatgaattcctataagctacttgtttggtggagcagcatgaggaagacggacgtgtgcgttgatgcagaggcaatggacacatggtgccgaggcaaggtccgcacgcgccatgcagaggccactaggtattgccactaagaagctactaaaatacatttcataatgtaaaagcctttcctttcgcattcatctaatgatgtcaatttgaatcaaattagcaactaacaattcaattggactattttgatcaacgaaataacccaatatcgttatttgctttgtttcagccactggtagttgatcatgaagaccggcctagagaaagccatacttggcctatgaggttgtgagttgtgactccttacgtcgttgcgagagatacataggtagtgtttggtttgaaagcaagcttggatgggttttaggcatccatgtttttgggggatgatccaagttgcctgtctggttggatggattggatgaaccgattttttgtttgggatacatgttggatgggattggacgacaactaaaaagtttacaaatgcgaaaggaggaggctctattaagtaggggtgaaaacggtacggaaactttccggattccgggcctgttttcggaaacggaatcagccggtcggaatttctcggaaacagaatcgaaaacggaaacattttctcggaaacggaatcgaatatgataatagcagtttctgtcggaactcggaatcggtcggaaaaattccggaaaaaatatcggaatttccgaagttaaaaaggcccatagaatcaatagtctataactcgtccccaagttttaagcccaacccaaatcgcggcatctacccaaatagtggctaaccctagaggagagagacagccacacggcatcgcaactttgcgagaccgcgagccggcggcggagcatcgcgctccgcccaccgctagcgcccaccgcccggcgcccgcgccaccgctggtccgccatcctcggctcctcgcaacctcacccccaccgtcttcgccgtctcgtaccgccgccatctcgcgacgctgtcccgccgtttcgcagcgccgtctcgcggccgcggcgccgtcccgccgtttcaccgccgctaccaccactgacgacgacgccacagccacaccaaggagccgacgacgcctcgcctcgcagtcgcagcagccagcagcccagcggcagtagccaacagcccagcggcagcagccagcagcccagctacgagccgacgagcctaaaccattgatttgatttcttttgtgctgtagatttatgatggaatcatcaaatgcaagtagctgttttgtgattgatccaagtactgtactgatggattgatgtgtgctgctgttgtgtgatgaccgaaacaattgatgaactatgtactgatgatggagtgatagctcatagcagattagcagtagctcatagcagattagcactatagcactgaataatagtgtatactatatatcttatacaagggtgttttgctgtaattttttttaaatatttgttatgcaaattatatgaagttatagaagaatatattttgctgttgagacgatttcatataattgtgttttatgatgaattgttgactgttgagacttgagaattggacttgacaaaagtttgaagctcagtttgaggggttgttgtattccgataaattttcgttaccgtatccgcgccggttcgtttttgctccgttttcggtttcgataatattcgtttccgttttcgtttccggggtttccgattccgaaaaaaatatgaaaacgaaaacgataaaggttgtttccgtccgtttccgtaccgttttcacccctactattaagtccaagcatgtttacacaagttcaatcattcttacatattttagtgtttagataattcccatcctatccctttcattcattgacctatttctaatggcttgcctcatcgcatccttttcctttttctagacgcatatgccctgcagccctataatacaaaaaagcttggtcctcttgtccatctataacatagcgaggcaaacaagaacacactacagtgtcatacaacatagcgggccatcgacaccgtctccaatgcacatgtttcatccttattttttttcaaactacatatttaaaggaaatattaaaagtataaccatatgaacgtgttttttcacgacaaatctatcaataattcaatatcgttttcctgtcaaatcctaatattttttagtttgtttaattagttaattaaccagttattaatatcttcgcatttccattccaggaacgaacgacaacttcacaagtaaataaataagcagttcagatttatgtaagggcacaaataccaaatagatcatgtacaaattcacgagcatgaaaaatcatcactaataaacaacatcgctccatgaagactcgatcctcacctgcccgaggttgcggtgcgtggaaggaggagggacgacgcggccgcccgccgcccgccgccggctgtgagcgccgccctcgccgcgcctcctgatttcgtggataaggaggagggaagtgagtgaagggatgaacgggagatgtggagtggaaattttcgacagattaaaaatgtttttctgactttcggtttatttaatctgttacgtgaagcctcggttttcagaaaatatcagttctgtaagaaaaagccgaattaaccggaccggtttttcagacctgttttttttttcttcacatcaaaattgaaagtttgattgaaattggaacgatatgataggaaagttagaagtttatatgtgtaaaaaaaagttttaatggaacggaaaagtcggatgtttggtgaaaaattttgcaactgaacagggccagaagcggagcacctgcacgaggcgaggacagaggaatggccggaggtgcgcctgcttgcaccgccgatgtggtcgccgccgcagttcgctgggcattgggttgggttgggacacgtaaaagtcacttcggtgtctcctccacaagccctaatgtaggtgagaaatttgggattataccatcccacagttcgtccaaatgcgtttccctccggtttcataattatttattttatggtttgaacatcaatacggtcttcgaaatatatatatatatagttttcgcactaaacgcaccgtttagcagtttaaaaagcgtgtcacgaaaattttaatcttcatcaaactcttattggagaaaagaacgggacctagatactacacgtcagagtgcttaataactaggataaaatacaatttgtgcttgcttgcgccgagctcatggaggagggagggcgatcaagctcgaggcgacataggtgaatggtgagcaactgagcacagggcaggcagcagggttcacaattatggtctaactcgatttgcaaaatctttctgaaccggggcaaaaacacaaaccacacggttattgggtcaagctaaaaaaaacaaactgaatttaaaaatttggacaaaatttatcaggatcttatcggtttttgtggtttatcaatgtattccataaaatccgatgatattgctcgtgagcggattatagttgagttgggtaattcgtatgttttataaatatagtagcatagataagtaagagagaaattagactaaacataaactcaatcgtataaaaagaactactccctatatctagatatagatgtatttaacattgaaatattgtgaatattcctcaccttagccaatcaaactatccgtgtatttaacattgaaatattgtcaatattcctcaccttagccaatcaaactatccttgtatttaacattgaaatattgtcaatattcctcaccttagccaatcaaactatcctttatttaaattgtatctgaaccttaatccctccaaaaaaaaacctattatttaaattgtatctgaaccttaatccctccaaaaaaaacctattatattttggggtatatgtatcattcactcctccagccatgaatatagccaaaaccagccatgaacatagccaaaccaatctcaacgaacagtactgcacaacggcgtggctgcatatgcaattgtttggttccacttccactcagacgtaatcaagcaacatcagacaggagacgaggacgttgccgcatatacaattgaaccattgcgcacagatggcagaacaatagaaatggaattaacagagcagcttccgagctccgtacaagaacacagttagcagtgtatttatttggacaaaatgcactagttgaccaaacatttataatgttttaagtgcttcaaacaaccgctagttccagacacattgaagtgattgctcgacacatacgaaaccgagttcacaaagcagcataagagtatacatgcgataacaacaggaaacaaatgaagttacgctcgtactagattctacatatcgtttattctagcagtgttctactggtaattcctcccttgtccgtccctctcataagccggcacaccggcattgtagttatcgccgccttgctggtagctagggttgcctccttggccatggtagcctggtgcatagccagggttgccaccttggtaaggaggcgggttgccgccctggtaacctggccctcctccctggtatccagggttgttgccttggtaagcagatggtgggggtgggggtggaccttggtagccctggttgctaccttgatagccagggggtccaccttggtagccaggcgcaccgccctgctgatagtttgtatagccttgcggatttggtgcatggggctggtagtttggaggacctgcatttggtggtggaggtggaggaacattaccctgagcatggtgcatcggaggagcatcacgaggcgggactgggccctgacctggtgggggagggctgttgaatccctggccaggaggcacatctctgttctggaagttctgcatgttctcccttctcctctcaaaattccttgacctgtcaaagtttctaggcctatcattgcgccggcttctttcattggcacgcgcattgtttctcacccactcctcgtggtacttagggtcataaggaacggcttccccatttataaaaggttctcctgcaataaaagacaaggtgtcaaatacacaccaaatgctcatagatcacatctctatgattccatcacatggataaagacattacaaaacagataaaaataactatgaactcataaaactctgctagatataattatgaactaagcaacaaacagcacactaaaaataacatatgtattcaaattctcaaccacagaagatggtaactgccacggacagtccgcaatcactaccactaccatgacatatatacaactacaaacagaaggtccaagttaccatttactccctcaaaactagataactaaatagatattactgactcaagtttataaagtttgcttgaactagttgatttcactgcgatgactactgataatcaagcaatccaacttatcagatggtctagggaagaaatagcaaactaaatttcaagatatcctagtactaggagatttcacaggatacagactccaaataaaaagttcagtggtatgctagaatacaaggtgacaccagagcaatcagcagaagagttccatggtaaaacatatacttgacgcagaaaaaacataacctctataaaacaagagccagaaattatcagttcaaagcattgcacagggacattagaattaatcagtttgatcataatatggcatcatacacatagagagcaattatcacagaggatctatataactaacacggaaatgatataaaaacagttcagaaaagaaagtgatgatatgtaattcaataggaagagaatgaacatttacctccgtagtccttatttctgacatccaggtatgagtctggaagaacccagcggaccttgggcaactctggcaaaataatttaatagcacagcgttaaagcaagaacacaagtgacccccataaaacatcccctacaaagaatttcatacaaccataaatacctttgagtttgtaggagagttcctcagatacaagagctccaaaagcaaagtaatgccgagttgacactgagtagatcttatgccttgcttcttcctcactggaagaaaggacacatttggttaaaaagaattatgagcaatttatataatggccaatacccagggcatatatcaagaaaataaatgaataaactaagcaaataaattgttatacagtaggacttacatgatgcgataattaaagagaaaccagaaaaactagcacatgctaccatgaagatggacgcctaaatatgtcagtggttgacagaattaatagaacacaatcaattttcaaaacagggcatgaagcatgattaaaaaacatcgtgttgataacaggagggcatgacctcccttctaatttacaaatcatccccatagaaataccaatttattcccccataataactaactacatgcaacaccatgagaccagattaatatggaaaccgtagcgaatcaaaagaaaatgacaaatacatgtggaatctataaataaaatcccagtcacatttgtgaaaataaaataaaatatgcatcaacagtacagaatacactatcactgaaacaggtatttatcagccaatccaccacagatgaagttaacaaataataccatggaaaaacttcacatatcacctaactataaatatccccaaatccacttcctccgtcccatttcctcacccccaatcacgacccaatcacgaactaacagattaaatcgagtgtttccacgaaatcccacggatgcgagatgcgcgtgagagggagaagggggggaggatcgttcaagacggccatatatacctcccaaccacctgtgcgagggttttgatgtagccgtcgataatctcgtcgcgggtgggctccgggttggagggatcgccggggggcggctccacgacgaccagccagtgctcgaagtcgcacccgtcgaggaggatcgtctccttggggggccggttgctccagttcggcgacgagtcccgcagcgaggaggtcgcgggctgcgtggcgaagcacctcgccgccgccgccgccgcgcgcggggcggagggggcgagcgccgccgggaggaggctccccgcggcggagagcgggcggaggaggcgggaggtggaggaggcggcggcggcggggagcctggagaggaggaggaagcgcgacgccgacgccatgggggaaaaccctagattgggaatgaggggggctgagggtttaagcctaatccgggcaatcggctcccatttttatagccgcatattatatattcctcgggttgataatatttttagttttggattagggataatttccaaaacatttgctttacacacttttcggttaattaatcactctactatttagagaatgagagatgttcgaaaaggatttattaaagatgttcaaaaagaatttattaagtgaattatgtatgatgatgatttaatatgtttgtatttaaatctcttaaatttacaatctaataaattatagaatcatagataatataacatgctttgcctctagaccgcctccggcagcatgccccgccggaccttgtcggtggcggcgtggaggtaggtgatcccatcagcgtcggcggggcggagcccgatgttctcccagatcgagatctagccgcgcggccggaagcgggggtcggccagcgtggggtcccgcgggtcggcggtggatgcgctccagcgggagcacacggcgtggaacgctttgtactccctcacgccggcggcgagcagccgctccgcgatgtggttagcgacctcgtcgtggagcgacgtccagtcccgctcctccacctccacgacggccgccgcttcccgccgccaccgaggcaacacgcacccgccttgcgcttgccttgtacgttcatcccccctcttcctccgctgtcatcgcctcccgccccgccggaacaaaacaagggtttatatagcaactccggggaacccgcctccgatccaacactcgatgcaactcaatcgatctccgaatccgattcataatacaacagtgagcttggaggacaagggtgtgtaggaggagggaaaggcggtggtcgccaatctcgccgctcgccggggtctaccacaaccggcggccatggatgacggcgtggtagggaatgaagtggagacgagagagtgctggactggtgtattatatgtttttagttttggactatgaataattttcaaaatatttgctttattacaccttgttcagttaatccctctcacaaaagaattaagagatatttcaaaatgatttattccacacctattatagtgtggaattatgctcctcaatcttcttcaatccctctagtttgattgttaactgaacaagactttagaaatatgaaccataggatataggcatagattaatcttaaaaagtaatataataaaattatatatttttgataattctatatagaaaattatataatggttaaagttgctttttaaaaacatgttattgtctgaaataacgagtattattaagagagtaatctttttttatggaaatatctctaccaaataatagtccttttagcgaaaataagtgctcctaattttagggatagagtacccacagatgttggtcaccttactaatcttgagaaaattgcaaaattttcaaatgaatattttgctgataataatccatatttgatgctttggtttatatttaactccaagagacaaattattctgttcagaataagcatcacacaaaaatcggccccttacaccattaagtcaagtcaggcatgggctttggcccagacaagtcaagaaaacggtccactagtctctggcccaaatgaagaaaataccgcagctcgtttcagtaggaataagttcatctgaggcccttaacttgttaacggatccgattttcatccttcaaccgaaaaaccaaatccaacgagtccttctactgttaaaatcggtgcaaaataagtctcaaagcggtttggacggcggtttcagatgacgtggcacctacatgactaaactcagtcttcatttgacgtgacacatgaatcaaaatttaacaattagaaaaagaaaacaaaataaagtctcacccgcttctgtaacagtagccatcatgttgctgatgctgtgttgcaagatcaaagggatttatgacttgtgaggaagaaaagagtaagttcgtcgtctctctcaagggcatgataatgagatggtgttcacctatgatcctcagtttaaaattatgagtactagcttattctgaatttgcatcgtatgaatatagtaattcacaagaattttcttaaaatatcttgcatttagcagatgatctagagtattgtcttgtcttgcagaagaaatattactactactacttatggctagtgcagatgaggaacttgtgatccaagttagcaatggtcgggagtgaagctaatcattctgttttatacttcctactctctcttaagacccaagggattactgtgctccagatctgcatttgcgtgctgcaatacaatgtgcagccagcagcagcagcagccttcagcacatggagttcagtagtactgtacttcatgctcatggccctcagctgctgccaaacaaacagctgaaggagcaagcaacttagaatgaaagctaaccctggtttaccatcatcataatcatcatcatcaagagcttgcacgcatgcattgcatggacatgtgccatgcatgtgaccaagcaaagaccttaatcttctcctggaaacaagtccctccaaaagtgagacacatcacatcaatgttatcaagcaatgcaacaatgttttgttaccctgatcaaacaatgcaacaattaaagctaacatctctgcatttaggacaggaatcacaggcaggatgtttcagtgctaatctctgaaaacttctgaaactttagaccagtgggagacctgctggattgaaaggagaatcactgaataggtcagcagctttctgaccagtaaaaggagtgagaatgttcaggctttggccaaaactaagatgagaaagaaagctaatttaaggccacttgcacacaaatcaacttatcaaggcaaaagaaaccctgcctaacctgccaaacatactgtcaaagttgagtaatttatactcaatacatgttcagaaaataacctactactaattgaaaaataattacctctagctttgagaagtttacatgtcctgatcactaaaagtgactaggtcctaactcctaattaaccaagccgagcttgaggcggccaaagcggatgaaatcattgggcatgcagtttccggggtcctagctgcttatctggggacagaaggcatcaacccaagcaagatcatttccttttcttcaataatatttgcctactagatgctatgaccctagccatcttttcaggccaagatagtactagtaatcaactcaaagatcagtattaattaaggttggcaattgcagtgtttgcttcagttcatgggcaagggtctcaccacgcacaagtcagaggcacccgcactccaaaggcattgacaatctgccacacaaggagaaagcaacccccaagtacccaaccacaatatgatttagagatcgttcagtagcagtagcagtagtgtattaattagtcttaagctttcagaaataactccagaaaacgagcgatgaacacaccactgttcacacctgcacacacacgacatgatcgatcatgatcatggcgacatggatcgatcgatcgatcggttcatcgatatgccggtttccgggttcctaagttaacaccgggagaaatggaaatggcttgtgttagaggaaatgtaggacactctagctgattgatctgtctctgcttactgctactactcatatgattggtctgtacctactgctgatagatagctttttctggcttgctctctgcagctatctaactctaagcctcagtttaaaacaaattattgagtggattgttactacgaattatctacttgataaataaacttggtctaaacaatacagcaacacaaggttttttaagaaaatttatttttcggagcagaacaaataatccgtttcaatgttccggtaaaaaatctgaaaagataagcctaaactagcagtacctgaaactgcacttgctgtttgtttaaggaaatgggagcaatgacatcaggtgagacagacaattgtgtgagttgcaaattgcattgctctctctctcccctgagccacactgatccagctagataggtctgaaccctgaaagaaccctcaggacacactcaatgtttcatggaattcggtcgggattcgctcgaggacgatgccgactcgcgacagcaagtcgacgaatgagggtcgtggagagaaatgagattggtggggggtgttctcatcaggattcctatttctggtccagcatcacctgctctcctggtgcccagccatgtgttgtttgtggccattctgtcaacaatttgcattattgaaagatatagtgcttggaggagttgaaggggacctgttgcttgggcacttcaacttgagcctaatttctgtccccatttctcctcaagtgtaatcctgaataataaagattcgtactagtctccctctcatgcacttggtttggtttcatgtgctacttagttacatgcaccgaaacatcgtcgataattcatgaatggtggaacataggtaaattgtgcacgagagaaggtgattccacgccactaacttagagccagtaaggtccctgcgccaagaaaagcttagatgactggtttggaaaatttctgaaatagttgcatgtttatgcctaacaacgttatagagacaaggatattgttctcttaaacaggcattccccaaccatttatcttcccaaaaccgaacttgagagccatctttgatgttggaggagccaaacctgagaaaatcaggcttggacttcattagactagcccaaaagtgtgagtctcctgctttccactgagcttgagacaaaggttgtgacctcaaatatttgttccttagcatttgttgtcacacaccatctgtagtgagtagtttatgcaaccactttctaaggagagccttgttcttaattttaagatcttgaattcccaaccccccttggtctttaggacgacatatgatgtcccaccttgctagtctatatttccttttgtgtccatccccttgccaaaagaaccttgatcagaaataatcaatcttcttgatcactcctttaggtatttccaaaaaggacatcatatatattggtaggctggtaagcactgaattgattagtgttagtcgccctccaagtgataaaagtttgtctttccaacttgccaaccgtttttcaagccgttcaatcacttccttccactccaaattacgaagtctcctatgatgtataggaatgccaaggtaacggaatggaaaagaaccaacctcacattgaaaaaggttagtatattgatcatgagctgtttgggcttcaccaaagcagtaaagctcgctcttatgaaaattaatctttaagccagataattcttcgaaaacgttcaacaacattttcagattacaagctttctctagatcatgttccataaagagtacagtatcatcagcatattggaggatggacaatccaccatcaatgagatgaggcaccactccaacaagctgtcatgcattatttgctctctggatcataaccactagcatgtccagattatattatctcacgaccaagatgagtttaaatggaatctaaccactgatggcagattctcggttaaatctctttatcttgcgttggtgcagaccgatgttcccaatataaacaaaagaatctggaagatcaaagccctcctaaagattaagatcttcttatggtacttacgtcgtggagtagtcttaacaaaagataatcttattaaaaggaattggagaggaaacaagtcttgttctttctgccacaaagatgaaactattaatcatttgttctttgattgtcgttttgcccatgcagtttggtctttaatccagtttgcttcgaatattagtttacctaatagtacaactcatatgtttgggcattggataagaagacaaccacgcaatttgagatctttggtcttattaggggcaacaaccactatttggtctatttggctttgcaaaaatgatgtggtttttgaaagaaaaaacatatcttctcctttgcaggttatctttttgattacacattggctccgctcatgggctatccttcagaaggtcaatttgcggggaactatcgttgtggcttgtcaacaattggagctagtggccatggagttttctaccccggcgcatgggtggcgttctaggctacggttagagggctcctgaagttctttttgtccctgctatttggatgatgagtttatcttttgtttctttcttgttggctgtgtgcactctttgagtgcagaagccggaggtgctctcagaataattgtatcacttgatagaattttactgagattaataaagcttccattatctaaaaaaggtaaattgtgcgcgcttcctcatcgtcttatgcttttaggttgaactggttggttgtaactaagtatggtataaaagccagagcttttaagttcaaaaacctcatttttctcaccggtttaagcttttgggtaattgggttgaactggttagtgcatgaaattcgataataaaagacacgtagttatcgttgttgacgtcataggttcgaaacccgggtttgacagcgttggcaacattgcatcgtcacatagactggtagacatctagatgcaatgaaaggtaataacactgagcaagttacctcttggggggtaaaaatgatccccttttggcacaccaaaaagtcgccgaatttgattggagcaaggcaagcaattccattccacaagcctctcctcccgctggagttattccaatccaagcctgctgtatttgtcacggtaatggcgacaggggagcccggagtttttcaccctgttgcttgcacggagttgctctgtgagctatgcttggacgtcatcttccccggcatggtgcgatgctgtgacgtcaccaactcaccattctgtttaacctgctgttgttaaatactccatccgtttcaggttataagatggtttaactttggtcaaaatcaaactactttaaatttgactaagtttataaacaaatataataatatttataataccaaattagtttcattagatcaataattaaatatattcttataataaatttatcttggttgaaaatgttattattttttctataaacttagtcaaacttaaaacagtttgactttgaccaaagtcaagatatcttataacctaaaacggatgtagtatttaaatgtggctttgcggttaatattctcacttttttttgaagagaaaaatagcatgagagtgtgtctttttcattaaatatagcggaagaacaatacaatcctaagagcgaagaaatataaaaggccaagaaattatgacactatacgaggtgcgattaatattctcactcgtttcgtgtagattatgccctgctaatgctgatgaattgagaggagaaaaaagagtgtgtctgaaccaatgggcattggatgagacttcatgagacagttatttcttcctgtgcataatcacacaaagaaaaaaaatatccatttcttcagaaaattcaaagagaaaccagtacaagttacttcctctgtcccagtttactagtcgttctaggaaagagatgacaaaatatggtgttggaaaaatgaccaacgtgcccctacattaatcatttcaatgcttaaaaattaacacaaaactagtactgcgtctgttattccgatatatctgcaaccagcatggggaagaaaattaatagaagtactcataatagtggctagcctgctagctgccctacgcctaaacgaccttctttctgggacaataactctacaccccaatgacaactaaaccggaacggagggagtagttatactaggaagtcagatgctgatgcagatgaatcttaagtcagataaaatgttttttttacagtgcccttgaaatatctgccaggtgtgtgggcccaggaggccctaagattcagacattggagatgcttggttgcttggaaggagggggcaggaagcaactcggcatattaagcaacggccaaaagagtgacatgattacaattagaagcaagaaaaggcgctaatgattcctcctaatccacacgaagtaccacggaagcacgcacaacacatggcgataatcagctctgccaattaagccagttgattagctcacaaggcaatcactgacaagaacatctgcacctgtgtgcgtgtgttcctcctgtcagtcacttgcaagctgcagtttgcatagggcacatcagggtcgaatccgatgtgcaaaaacgagcaaagtgccaatcctgaagtttgcttcatgatttttatcagaaaaaatgtttttaaaatgaataaccagacaaaaatgtccctaaaaacatggaatcatatagcaatcatagaaacaatagtactcaattttttttgtgcaatggccaatgggcatataaatccaagccatcgagtcaagtgaattgcttacatggcatgattaacaattgaccataaaccctctagtctatcttaaaaccaaaataaacaattaattaaatctctgtcaagcgctacttggattttttttctccactttctgaaaaaagagggaggagaagaaaaagtttttgtatcaatcagaatttaggagacatgtttagggtgaaacaagattggatcatgtcaaatcggagaaggaatcatactatttaagcaacaatggtggcaggattggagtctgctccacgccacatggatcctataaattccccgcccttttcttctccactccactcatcatcaaactctctctctctctctctctctctctgaatctctggatctctgaaaactctgaacattccaagaactcataagttacctgtgatctgtgaagcttgagctgaagctgtgacagtgtctcactgatcgttgatcactcagcttggctgctactgtgcattcactgcgtggttagctagctaactgagcagaagagctttagcaatggcgacgccggggcagcagctgccgccggggttcaggttccacccgacggacgaggagctggtggtgcagtacctccggcggagggcgctgtgccggccgctccccgccgccgtcatcccggacgtccacgacgccaccgtgctcgacccctgggacctccccggtgcggttttcttgatccgttttggtttcgaggaggtgcggcgccattgccaagctcgaccgagcgggagactgatcgtgaactctctccttctgtgcaggcgccggcgatggtgaggcctacttcttcagcttccggcagctcgcggcggcgagcggcggcggcgggtggcggaggaggagggcggggagtgggtactggaaggcgacgggggcggagaagccggtgttcctgcgtggcttcgggtgcggcggcggcggcggcggcggcggccagcacctcgtcggcgtcaagacgacgctgctcttcctccgcgcgaagccgccgtcgcgcacccactgggtcatgcacgagtaccgcctcgccgccgccggcgctgtcgccgtcgccgccgccggacagacaaagcgcgggaaccatgtgagtctgaattctccaattcttcagtaataacactaatagtactgatacatgtgattaagtctaatgtcattctgaatcatcattaggttttgcttcaaaggttcaaattaattaaccccagttttagttcaaacttttattagaacaaacttagcatatgtatgtgaaatttttgggtaaattaactgaagagaagtttgcagcttttgcaaaaggctttccacagcgcacggcagcatctcaatcatgcagacatgagagaatctttgcctcctttcaaagtaacttaacctgcttggctacgtggattaggacacttcactgtgtgcggccacttgtcttgcattgtgttccatcaaaaaatttaattgaacctctttgtcactcacatctcatctactagcatgcacccgtcgctgtaaatttaaacacgaattcagttcagttcagacttgagagctcaatttgatcatctggaatctgatgaatggtatcattatgtttttctttgcagagttgcatggctcagccaggagaatgggtggtgtgccggatttttctgaagaacaacaggtcatcaagaaggcgagccggcgacgccgacggcgaaacgccggtcaccggtgtccacggtcaccgtcggcggcagccgtcgccgtcgccgtcgtcgtcgagctgtgtcacggctgaggtttcagacggagaaggagaagaagaagtcagcagtggcagcatcaatggtgctccatctgcctctcaaagagaggcctagacatgctgaaaatctccttaattaattactagtactagtgattttttttcttcttcttcttgttctcttttgtccctccattgcttttcctgtacttctccttgtaccataatgattagtaggagtttaagtttaagcagcaggttgaagagagaagccccagcttaagaaagctcctaagtaaagattactgagcagcagctgtgacatctgtatcaattgtaacttgtaagtttctcttgatcatttattaagataaggaacctcaattaagcaggaacatcagatcgatcaccagttgctagctaccaccagctaccattattcagctgtcatttctgcagcagtcagattaactttagtccaaaatttttctctgcctcctctagctcccaacaaaagcctgtcaactctctgtttgaagaaaaaacgcatgtatacactgttttagatcagctgaaaattaacttctctacagaaatgaaatcatatatctgtgtaccaaaaggtgtgtttagttcacgctaaaattgaaagtttaattgaaattggaacgatgtgacggaaaagttggaagtatatgtagaaattttttttttgatgtgatggaaaagttggaagtttgaagaaaaagttgggaactaaaccaaaccaaaatggtcaaatgcctcctccacgatatgagcccgatcggttgaccaatgatggattatatgctagaatggctttagtagcgatacaaaataatttatgagtaaaacttttatatgtgtctctagcgacttaaagatcaatgctgaaaagaaaacaaagtccaaaataccttaaaatcaactccacaatcaagctttaaattttaaattttggccgcgactgattcgttgtaagataaacgatgatgcttgagacaaatggcctccctgaactggagagagagaaaaaaaacttttgcagctttcaagaggcgaaatgagaagtttgatcagcggaaggaaggaagggaggaaagaaggacgggtccccctggctcgagcgagtcaagtgagagtgagtgacagacacctgcgaatccaccgcgagatcctggcgttgaatcgcggggcgctctgccgatcacgtcgccaacagtgtgacagttcagcaaagatggcgatctttcttttgctctcgagtggcctcggtactctgaactcttctgaagtctgaagtctgaactccttcaagtggcgatctgcatatagatactagaggttgtctcattatttatttgctcccgattactgtgaatagtaacaagaagtagtattatagtagtatgaatatatttttctgaagaattgtgacatctagtatagaaaagaacgcagtaaaagttgagaaaccagaagtttgcaggcattattttttatccagaggcaaatgcatataaggaagtgagggagaaggtttggtctgtacagttaaactgattccgctccctttgtcgtgaaaatacaatctcaaagacatgtttatgttcttacattaaaaaaaacctcaaaaacttgtttatgttcttaagacaaaaattactcgtccctacacaaaagtcaatccacgaattactcctttaaatattccttatggtggttttctaaatgtatagttgtagcggtagagtcacgagtgcatgattctactcaccagagtttaattccttgtgtccataaatatggttatgttcatcctcgttgatgtagagatgggagttatacatttttcccctttttttttgggatatacagttcccctcgcaaaattcaggtcgttaattggaaaaacatttatgctaaacaggccgtcattacggtgatagcaatacgaaagcccatcacagcagtctcccctttgacgggccggcccaattactcccacaaaccaggctgggcctttgggccaatatgtaattacagtaattattccttatactaataataaatgcgcattaagctggggggctttcctgcaaaagagcgcggaaaataaaaatctcgcacagaggcgtatccacgctttccttctcccctcccaccaactaatcgatctcctctctctctctctctctccctctctatcccattcgcgaggcggcgtctcctcctcctccccgtctctctcgcttcccccccaaatccggcggcgaatccagggccccgcgccgcgccgacgaccaccgccgatcgcgaccaggagggaggatgctgggcgccgcgaggaggcagctcggatccggccccgtgagtgccgacgacctcctcggttttttttcctcgctcgctcgcccgcccgccatccctcggatttcccggggtttggtgcggttgggtttcgatctgtgatttggggggtcgctgacgggtaatggatggcgtgtgtgggggttgcagatgctggggcaggtgctgcggaggctccggccggcgacggcggctgcagcggatgcggcgagggcgtactccgcggcggcgaaggaggtgagggcctgggtgaaccctagtttttttttaattattttcattcgtgctcgctgcattggtgtggaatgaataatgatctggtctggcccgcggaattgcgttgttctgtttgttgacgggaaattgggttttggtggttggttgtatcattgatgtcgtgtattttgttgtttcggtagtattaacggagcgaattgtttctagtttggtgttgaggtggttggggatggttattggaagtggctgacggttcatggagataatgtgatgttttaatgtgtacctatttttttggttgagatcaacttaggattggttttgatgtcagttcttatgtatagcacaatggaattaggttatcccgattgaagaatagaatgttgtcatgttttgatgactgctgatttgtagccacatgtagactcgatgtcggagtgaactgatatctaaactgcctatagatgtgggtcgcgtgtccaaatttcccacagacagtcaggctacagggttaacagtttgtattgattcatttggcagtcactatactagacgtggagatacagtctcttcggatggtattgtgcggtttttctttagatgtatcgttgtggagatgtagacagttgacttcaaaactggtgactactatatctgcatagttcgattacttcctttggggcgtactgtactgtacttgtgttggtggtttgtggtgatttaatttgtatatgctggaaggtcctatttatattcctaattattttgttggtaagccggtaatgatttttctttgtttgataaagatgtattgttgtctggtaatcatgtctaacatgtttgatctacattgcttgctcaccttggttgttatggcgcactaggcggccatggcccatggcacttgctaaatgaagcaatttctatcgcatcatatatctacatgcttattcctttgcattgttcttgcccttctcattggcgtttattttttcctcaattacttatcaagttagtagcacagtgaatgaatgcaataagtgaagtatctgctggcttgctctttgcactgaaaggatcttcatagtttgttgagtgggcaaaggggaaaaatgacatttctatattaaaatttgtttttctttgttgggcaccttgatatggcaattggcaagttatctgcaacatattttacttattcagatgactgtccgtgaagcgctgaactctgcactcgatgaagaaatgtctgctgatccttctgtttttctgatgggtgaagaggtacacttggaactcactcactttctctccctgatttgtgtgtttttctaaggccttctctttcgtggcaggtgggagagtatcaaggtgcatacaaggtgtgtgaagttaaaaaatattagtagttgtgcctttcctcaggtccgctgtaaacgtattagctcttatcgttgttcatgaagtgtattctgttgcagatttcaaagggcttgcttgacaagtatggtcctgagagggttctggatacaccaatcacagaggtgattctaaaaaccttcttacctacctttcttttctgcccattcacatttttttcacactaaggtatcatgcgttcatgttctagtacttatctgcttcagttctgcttttccaggctgggtttactggcattgctgttggtgcagcgtatcaaggtcttcgacctgttgtagagttcatgacattcaatttctcaatgcaggttggtaatgcacgaattatcaatatgctactatgatagtggaatcagtttatattgttgcttgcagcaacggattgctgttgaattttatattagtttttgtctatgtaaagcaatgtaacacttaggtaagtatgttgtacaactagtttgttaatttgctagtatagattatctttcctgcattttagttaaaccatactctaatccatattgtacacatgcttgataaagtgttcgtcactcaggatctagtgttcggaggtccaccttctttgataagaaaccctcttttttttttctgaagcttaataattgacatatatttatcaggtgtacctcattagtgtttacttctgcattatttgtaccaatgacatatttcagtttttgtatgctgtgatttcgttttaattatttatattacacattcaggcaattgatcatatcatcaattcagctgccaagtcaaactacatgtcagcgggtcagatatctgtccctattgttttcagaggacctaatggagctgctgctggagttggcgctcaacactcgcaggtttgtgatcagggaatggcttatgaattagtttatcatcctaggaccccattgaactttgtaaaagttcattgtttccttttgttgtgttgttctacccagaaactgtcctggatgatctggcaacctctttgctaatgctgaaatacttaatatccccctctccccaaaatgctggtctttaggtgtagaaaagaaaccaaagattaattatgagagttctttacagcatgtgaagctgcagtgagctgagcaggaagtttgactgtttaagatcagtttgccactagcttttatattctggctttttaggcatcacttgtttttgataaatcatggtagaattattttgccacttaaatatgtcattataattgcaattattcatttacaaactgaattggtttgcagtgttatgcggcttggtatgcacatgttccgggtcttaaggttctggttccatattctgcagaagatgctcgtggcttgctcaaagctgcgattagggatccggaccctgttgttttcttggaaaatgaactgctgtatggaacatgatcttgttatgctatactgactagccgtcatttccccaagatgctgatatactattttctgcagctatggagaatcattccctatttctgctgaagtgcttgattctagtttcgctctgccaattggcaaagcaaaggtatgttgtactagctgtgtacacatgtttgggaaagaaacatacttgcatagaattaccttgattatttcacaggagtcccttttaatgaacaccttgttttctagataagtgtataccagatacatgctgatatatatttctgttatacagtcagtgaagtttgatgtacttacctgtgggtcttctctctgtagatagagcgtgagggtaaagatgttacaattactgcatactccaagatggttggatatgctcttcaggtgcgtcattttgtaattggtaaacaatatggatgatgagtatgttacgtcgataactttatatgttttggctcatcatttgcgcagttttctatggtgtggcatatcatatctctgtaaattctgattactgtatgtctgtagcggcacttgtgagctatgccttttgggaatagcaatttatttttcattttgtgcggatagagggatcgtttatcaaacagatggttggtacgtccataagtctgatagttaaattgatctgccatattgttcctcagaaagtgtatgtttctttcagtttatgctatttgaggttttaagtagtaccagcggtacttaaaatctttcacatttatgattgcaatattacttttctatgttcttatgctcaatttttttcaggccgcagatatattgtccaaagaaggaatcagtgctgaggtgatcacttgttaaacaatttatgttcagtataataatctataatgcatcaatcttttcaaccacatactgcaaaagtttccttattttttactgctatttgccaataggtgataaaccttcgttcaattagaccacttgatagagctactatcaatgcatctgttagaaaaacaaatagattggtgaccattgaggaaagcttcccacagcatgggattggtgctgagatatggtacgctctctctccacatgcattggcacacctgtgtgtggataaggacttttagttctgacactcgttttctttgcagcatgtctgttgttgaggaaagctttgaatatcttgatgcaccagttgagagaattgctggagctgatgtacccatgccctatgctgccaatcttgagaggatggctgtcccacaggtccttttctgtttctatccaaaattttatgttgtgtcttgtacacatgttttgtttatgattcttttctccaccgatgcattttgtgccaaggacttgcacagagtagcactgtttgggtggaattcctagttttattggttgcatatatttatttctgttgacataattgagtagtagttacttccattcaacctttacattgtggggtggacatgtgctcctatttcgtgaagttgtgctgaatttaatgggagtgatgatttgttttcttcaagttgctctgtttttatttatgcctaaagccatttgattggtgcttctgaagggaatgaatatagtgaatctgatattagcagggaataaagaaatatcagttctatttcgtagttgtagtggcggtgttgaacaggatagtgtgcatatagtgttgattactggctgaccttgagggtcattccgatccaggagactctgaattatgaagatggaacctttttttaataaacagttaccatcattgtcataaccttatttgttaaaacaaatcgatttgtgtgggccatcctatgtgtctggattacaaaaatatttgcaggagcaatgtttcagtagagtaaggaaaaaagtgtggggctattgacctattgtagtttttatagtgtataatgtagaggttgctatacgtgcatacacactcataaatagaagtatttccttgattgccctttccactcaacaacttgagcaatagatatttgatcataagctggaaagcatatggcacacttgtcatgggatattacctaactgtactatggcttttagttaagactttctggtggatgttgtctgccacccagttatccctggaggtgctcactattaagaagttggtaattctgtcctattgtcggtttgtgtgttccgggtgaccactgtgatcagggtggtcatcagcatttcttcgactctttatggtttgcagaatggtggaagtacttgcggtactctttagacactggttcagaatcacatttgatttctgcactagcaatattattaaatatacctttaatgtaaatgaaatgtgaagtctaaactccgcttgcatgtttttttgtttttagctgtacctacagttttaaactggatctacgaggctatgcaattgtgaaatgcatggacctgcatcatttattatcccttatatggatcaactatgctgatcatttctttatcttcatttatattaacgacgttattgttgtgcttgcaggttgacgatattgtccgtgcagcgaagcgtgcgtgctacagagcggtgcccatggcagcaactgcctgataggagagacctcttttacatcatctttcttttcccgtccggccaacatatgattcataatggtgtccaacaattgcccaaactcaaagcgagctaattttgcaagatatttccatgacccccacctattcttttagctgcagttgcatcactgcgttcgttggtggtgacccaaatttccctctttttttttggtgtgtatgcgagaattatgcagcttatggtgattggttcacagtacacactggcgctagttacataaatgaaagaaaaatctgagctcttgatggacacatttgttgcaaaagacaacgagggcaatgaataatcccaacttaagacaacgattgcgcatgtcgcatgttgctattcgcccaaaatccggggtctaaactctcacgatagtcaacattttgaactgtctaaaacctctcgctgttgatgtcgatgcctctctctgatcaattagttttcaagtttttttttaatcttttcccaaaatcgacttaattagccgttatctccaatccaatcttgtatcgccgcaattactaacgatgtgatccccaccgaattgctggtataatagtgacaaccttttctttttagtacaacggtacagctaactaggaagacctaaatgattttttggtcaaacggtccgtgctaattgatcacggatctggtgcacgtaaccatcaatcgctataacaattattgtaacatctctcatcacctaacagaaaatcacgttccattacattatactccctccgtttttaaatatttggcaatgttgatttttagcacatgtttgactgttcgtcttatctgtgaaatatgtaaaactatatgtatacatataagtatatttaacaatgaatcaaatgataagaaaataattaataattacttatttttttaataagacgaacggtcaaacatattttaaaaagtcaacggcgtcgaatatttagaaacggagggagtattaaataagaaaacagcaataaaattcagctggaaaaaggtacttggttgatccacgcacacttgcggtcgtgcagaaaatgtatttttcttagtagtactatctcatcttttttgcccttttttccaaatctctccctttgactggaccatggactgcaacaagcaacaactaaagaaagaaaagacattaataaagcagcaaagaaaagaacagtccaattagaaaaaagattaaagtgcaaataccaaagccaaatcatccctattattatatataaaaaggattagaaatattattatttgtactaccaaaccgagcaggaatgtgtgcaagcaaggcataaccaaaaccaaccgctttccttttgtccaccgattgctctctctttgaccaaacaaagaccggggcagcttaaataaacagacaaagcaatcgaaaatactaaaataaaaaaaaacgaggcactaattaatgtcctgttcacatctaagaatttccaaagctagatattcctcgcttcacaaattcatgaatataaaatttgcaatcacttgataacatttgtatcaatcattttatttctactttaaataaaatacatatttaaatcactataattaaacaaacaaacttcaaattcaaattcagcgtgaatctaaaatctaaagctgtgccaagcatggtttggcagtcttgcctacaattactccttaattaagtcaccataaacacggcgcgccattaggggattaaagaaagcgcaacagtacgccactcgcactcgagcccggaaagaaagaggcaaaaaaaaaaaaaagaattccccatttccttctctctctctctctcatctctctcagtgaggagtggtggtgtagctaagctagggtttcgctcggaatcagggttcggtttcctccaccggaattggcggcgatctggagctcggcacggcggcgcgcggcgtgatccggacgctcgggtaggtgagggagggagggaggagatgaagtcgtcgctgcggaagctgcggggcttcgcgctgcagcgccacgagcagcgggtggaccgccgcgggggccactccccggccgccgccgccgccgcgaacgagctcctcgccgcctcgcaggtgagggggcacctgctccgtacctcccgttctccgtgtgggcgcgtgggtgagcgtgcgtgtgagtgagtgagacttggcgtgtggagatctctctctgcgggagcggttctccgcttctctgtgcgtgtggttggctggctcttgggagtccgcgaaatcggttcccgaatcccgattggttgtttgtttgtgcaaattgtttttgggaattttcgttgccgatggagtactatgggatgatgtgttcggatctgtgctccatgttctgtagggagattgttgaggaggcagacgtatggagtaagttccatggcgcggtgtgcttgaactgtttgtttcctgggtggacactgggaacactcgaatttcgcagtcttatctgctcacatttgccttaacgagcagagtttcatgtaatttgagagaaacattcctttgatcttctactcttgagtatggagttagcaaaaaaaaagaaagatcaaaacaatttagaagtttagttgcactaccatcgtagccgccgacataattcacggctaagctgaatgccttgtagtaatgatggccttgtcaattctagttggatctgacaaggtagtgccccattacctagtggcgattgcttcattagtgtttgatactagttgaaaaccaaaatgctgaatgagggaggttgtctgaataggtggaaacattgatgacatatgagaaagcatgtggtacatttttttttactacagtttagtcttatcaaatctaattggatatgacaagggagtcgctgctcaccattacctagtgtccttttctaattgttgaaaatcaaaatgctggaggagggtggtttttggaataggtgcaaacagtggtgacatatgagaagcatgctttttttttaaccaacagtagagcttaatccagattccaccaagtttcctctgttaaaactttcccttgttaggttcttactaaatttgttttaaactgcaatttcactttcaacaggatatggcagatatgaggagctgttatgacaatctgctttctgttgcagcagcgattgcaaatagtgcatatggtatgtttattccccaatagtacattttgtcttttgagatcagttaagtatgtgttcaatcctgtaaaaatatttttttgtgtattgttgccatttcattttacacatgccctgcaatagaactaacaactgcccattttcaaatggataaaaaacctcaatgtttcttggttaatcgagaaagcatttaagacgaatatttcatagttttaatctaaagtacagactacagagggtgcagaaacttaggtgttttatgagttgttcaccaattcttctcgtgtatagcctcagttcatttgctcttttttcatatgctagcagctttattagttcttatgctaattgtttataaggttatagcagctagaaatataggtgtcttgactcttttttgcatatcaatgatcattttatcctttcatgcatgcagagttctcagaagcactgcaggaaatggggacttgtttacttaaaagagtcacaccaaacaaggacgggattaatggtaattatgttctgttgtgattaatggttctcactcccttgcataaacacatatcttgcaaattaagctcttcatgaaaacgacaaattgagccaagggaagttgtttgtgcccattctcatctgctagttgatagtcactatctcaaattgtgaggaaaatgaataaaaataggataatgaggccatcttaatgttattgatcattccatgtaacttttgcctattatacactttgctgcttaatgcttacattgaacagtatcccccagataaagttttgctgttgcttggaaaggcccagtttgaactgcggaagcttgtagatagttatgtaagttttaagttgtttatcggtggagtcacttatttaccataatcttctactgctaatcaagtcactatatttttcccagcgtgtgcatgttcttaataccatcaccactccatcacagtcccttctcaatgaacttcaaactgtagaggtatgttctcccattctaataattttagccattatgtacaattttttgtgcatattccctcttatgctcatgctcttttctctggggcctattccttccttgttctatgtcgttttactatttccccccctgccctttttaccctgctgatcatatgtacaatacatgaactcgctaaaaacaaaagtttggctagtaaacactggtctgtggcatgaaggaactcaaatcaactctgtagtccacttcattaatttgggttacattttattataaagtgtattgctgatcattcaaatgtggttttacataaactcattgcaactccaatggatatacatgataatctgaaattgtgtgtgtgcgtgtgtgtttttttccttttgccattcagtacaatccctgtttaaagggagcattcatttacttaaaatatagtatacatattttttttgttttgtctactcctatgcagattaacacttcacagctttgttttgtcatgttcttcttgttgcatttgttcttattttttgagtatttattatgtatttgatgcttgattacctaatcgtagtgaactgttcaatagataactatgatttattccactcagaactgcaattaagcaatagtgtttttttattacaggaaatgaagcaccagtgtgatgaaaaaaggtatgctgactgtacagaatgtggcttatatttttccctgttgacacaatttttgagtttccaaatgcttctttcagagagttgttcgaatttctgctgaatgcacagaaagaaaagggaagatctaagaatgccaaaagtgacattggtgcgtcagagcaattgaaacaagctcaggacgattatcaagaagaagcaactctttttctattccggttaaagtcattgaagcaaggacagttcagaagtcttttcacacaagctgctcggcaccatgctgctcaggtgcacattctgtcatttggaaataccccacttccttttttttttctgtggcaatctgtacaaaagctaattttgtgtaaatttgtttatattttactccaaccagctaaatttattcagaaaggggctcaaatctcttgaggctgtagagccacatgttaggcttgctgctgagcagcaacacattgaccatcagttcagtgcacttgacgaggaggattactctgtggatgaagaaaatgaggatgattacaatgacagtcatgaagatttatcctttgattatggagaaaataaggaaggcacagaagctggtcatgcttccaggagccctacagaggtaacaatgtggattttaatttgagcataattaactatcctacagaaggatactctagaattttgcatggtctcttactattagcaatcatagttcaccgcgcaggtgtaaagttgcattgctttaatgagtttaatgcatgactttgtatttctcacctttttaagaaatgatgttacattttcaaaattccatagctactacaaagtacaaactgaataattatgatgacataaccagtaagaatggtatatcgttattccatctgttaggaaagaaagatctaagcagataaatggcattccatatgttcaattacaagacattgtgcttccatgtacttaatttgttaagttgaatttgtatacggctacgcatttcttttccttttttagttggcttccttttcttgtcccaaaatatacctgtttctttacaatcatgtttttcttttcatgtctttggaggccttaattttctggatttgcaggaacttcttgacagaagcaaagcagagtattcctcttttcctggtgaaaggcagagatctggaagtcagtcagccccactttttcctgaaaaaaaacttgaggcagcagagagaataaaagagttgcggcgttctgctacgaggaagctatatacttatgttttgcctactccaaatgatgttagagacacctctcagacagttacagcaaatcctactagtggatctcctcttggaaacaaaggtgcattctattcatctccactccagccaagtacaaatgtgggagatttgagagacaataagctaccaagtcctaccagattatctaatgcacattcagttttgaaagagagcaataccaatactacagacaccaggacaatgcttgtgctccctttgggtgatctctctttacctggttatcatgactcgaaggcttctgacaacaaaaaggtgaagagaggatccttttctggtcctattgttcccaggtcaaggtcaacagagaatattgatgttgtttctgtaccacctaggcacagctcttcacatcagccgtcaatacatgtcagagtttctcccaatacctcgccaccactgttgtcctcacctaaaatcaaggagcttcatgagcttcctcggccacctgctaatgcatcaaaacatacaacatttcccagtttagtcgcccactctgcaccgttggtgccaaattctgctcctttggcacccagaggccaggatcattttaggccgaggcaaacaccaccaagtgctccccaaactgcatcacctttaccgacaccacctgggcctatatcccgcagtttttcgataccttctaggggcatgagaacatcaggtatttcagatggtaaagagacagaagatcttcaggataaagggcctgccagaatgagcctttctagtcttccttcagcacaaacatcgttggaggatcatcggccattgtcaggagctaccgagtcagttagcaaaacatagggtgagtctagttttctgtaatacaacgccaattttggtagaaacttccttataagcaatttattgtttttagtccatccttagtagttcatgtaagaacatcaagtttgggttaccccttgaagattttttttttctgtgttagttcggagcttactatcatacatgagggcgaaaacatcagtgatgctgtttggactatagaagttttttcatttgcatttatttggttgccatcactactggccgcataacacaatatggatgtatatgcacacatacattaatagatgtggatacaaatgtattatggcattatttcaagtgattttagttccttttgagagttaagatgaactagaacaggtccaagtagaaggtagtttgtcaagcaccttcattttattgttgtgacatgtaatacaatggctctatatcagactaatcctttttctcaattaccttcccttggcagaatatttggtgttgaggtgaaagtttatttatcaaggggctcagctatctcgccatggaagaatattgtacatattagtatgtgaactcggccaatattgcaaattagttggtgtttcgtttgtatcccccatggttaagatgtaattgtgcaaataacgagttgtggaataaaatctccatttttctctccgattaattgatgtaagatttgtttgttgtgcccttgagatgacttgaatgccacctgttttccactgctcatgtaagcatcctccatcttaatttttaacatgagggagtcaattttgccaaaaaagaaaaacactagtgctgttattcatggaatctgcatgtatcatttatcaccttatgacaatctttaccatctgtgtgaactgctgggcaataattggctgtggcaagagaatgaagatgtttcatgagagttaatctacttctgtccaaatatacaggcagtttgttatacttttgagtgtattctgcaccaacatttctggttgcaaaatcaatagcgtagaacctgaacaaaatcaacatttaccatgtgcagtactttttctaagctgaagttaactccataattctgtactgtcagttagattgatcacattacgacatgggacgtaccaggttgtaccgatgaatagcttcagaagtacgaaaggtgtagtttcttcaactgggtcgtatttgaagaaacgatcaattaattgtaaagtctaacaggtgcggtcagtacatggaccagcaagcaattgtgtagctgtcacatgcctcaatcatgaacgccaaggacaatgctagatcagaagctggaactacctgacaatcttggatctgtatttgatggttttaattcaatctgtttgcttctcagacagggttatttccagctatttgtttttattctagttgttacaaatggcaggaggagtggactgactgaattgatcaaaaagattattattcagagcaaaactgaattacatgaagctgtccaagaccaagcttggcagcttgggttgttcgttttaggagaatggaatggcatcacgcttcctgatctgttaaacacttaaacggtatgatttagaaatatattatatatgaaattcttataatattggtttaaattcatttttaactttataatagttaattcattcatttgtacacttgcataattatattcagtattgcattccattcaacccaaatgaacactcaattataaatagacgattataaggataaaatgcatatcatgatgttaacaaatagctttgaaaaaaagttacccaaacaataccaataataaaagtttttttgagaaatattaccacccttttatataagtagttcaaaattgaactaatcaacgttaaacaaagaaaattgagaggggaggaaagaagaagattgtgaagatacgtaaaatcagacgaaccattagtacataattaatttagtactaattattttaaatttgggaaaatggatttgtatgatttttaaactgacttttatatataaagtttttttaaaaacgaactgtttagtagtttgagaatcgtacacgtggaaaataagttaaatcttctctcaatctctaaccaaaccaaagaacacagtcttaacagggttggtgatattaatgtgaactgaattgaagatgttcaactggtcactgcaatctcatcaattgatgatgtctttgatgccgagtaaaaaaaaaagagtgaagcatatctttgccttcttttgccaatctggacaaagaaccgacggcgtcagcggcagggagagaccggagagacgtagctgccgaggcacgcaacgaaaaacacaaaaagaaaagcctttggttttcacgtgcctggtcggtggccttgcattggctgcgcctgcacatctttgacgttccttttccattggttttccctgtgcagccagtacggctgctctccctttttctttcatgccaaaagttgggttggggaggaccagaagcattgagcagccacccaacaacgtactgtatgaatgatgcggcagcggcagcagcgacgtaatccctccgtcttaaaaaataattcgttaatccacctaaaataacgaattggataatcttttattcagatttgttgttttaaatgaagtcacatttttatctatgttagattttttttagactagggagattagccgtgcttctttcttttttttttttatgtatgtatgcttctaaagaactgtacgggattccatcctgcttgattttctcttataagtttggtactacattgcatactgagacttgtgcatcaggttaggctgcctagcatgtccatttgaaatcgggacagagctagaatgaaacagcaaagtgggactcacgtattttactctagtttgaactgagtttaggttgatacgtgtgtttgaatttgaacccaattggatgcacatatacgatgaaaatagataaactataagttgtaaaaaaaattagaccgaattcatgagcacctcctaacctaatgtagctcttccacagtttggaatactccctccgtactcgtaaataaagtcgtttaggacaaggttgaaaacaaacattgggaatataaatcatgaataactctcaagttgttgagtttgaaaatgtaaaaaatatatgaatagatttgtcttgaaaaatactttcataaaagtatacatatatcacttttcaataaatatttttatagaaataataagtcaaagttgtgttttgaagaccgtgtcgctatccaaaacgacttcctttacgagtacggagggagtatatttttctttatataataataaattaaaaaacccagcatctatgtatagtataccaaatccacttgaaatacacggttgttctctgttcgtccaaaaacaaagagaatatgaacacttccttgggatgtttattgaaaaaactgtaaaattcatgcgtcgcaaactagctccaatttgaactctgcttcaattttttgtgattcaaggatgatgatgcttggttgtctagttgtaattagacaagcaaataagtttagtagatactaatatacctttccaaaaaaatgtactagctatctaggagtggatttgacaccatctagaactaccaatgtggattactgatagctatatttcaggaggtagtatatattaccagtattgctacattgctatgtctcaaatcgtcggtctaatatctcaatttcacacgatccgatctaaatcctcttaataactcaatccaacagtgagatatctatcgctcattggttcaacttctacatcaaaaaattaccattaggtgccccctatatctataaattcatgataacttcaatcagacctaaccttcacaaatatcaaaaatcagggccctccatctctctttatctacggtcaggatcgcaaaaaaaaaaaaaaaacaaaaacaaaaatactgcttcaaaaggagaccttcagttaaaaaaaaaaagaaaaattgccggaggggagagaaaatccatggaatccgcctatttaaccatgagaagggagaagcgaagataggagagagaagaacaccaccaccaatccaccatcacgaggaggaggagaagagaagacgcgcaagcgaaatccaggggaggagggcgagcgagagagagagagattctcgcggcaggaaatggcccattccgcttgctgctggtaattttgcctctctaggcagatgagatgagatgagacccccgcgtgattttttttttgtggagatgatcggatcgagctcgcccccctcagattgtagagatggcaaaccgcgcgatttggcggttattgggagccacgattgttgtttttttgcgcccgatttcgtgattttggttcgcgatggccattcgtttgcgcttttctgttttgttttgagatggttggggggtgggggatctcggggggggggggggggggtagatgcgattctgtttcttcgtgtgttctgatcatcgacgccgcgatcgctctgggattgcggttgatttgtccgatttggggcgcgtcgggtgatagctgccaagggattttgtatgaacagcggtagatttcagacaatgtagttctgtagcacttcttaggagcttgggataactttatggttagcgcattgatgcctcatttatcaaatcttcattgcgccacaactcaatgttgatgtgaaatggatgtcttattttttgctctgcattgcatcatgttgatatgctgatagcctgtttgctcttttgtggttgatagttaatgctgtcatgttcattgtgctagagaaattattgaaaagcttatttaacagtgtgcggtgacatcctccgatttgtgcttgcaggactctgatctgatctattggaatggttcatcccaggttccttgttgcttgttcaggctccaaattgtgcttcatctccaattgttgcagtaactattggaacatgattggtggtgggatggtgaaatcattagtgctgatggggttcgattcagaagccacattgtagttttagccttcttgtgtcatcatagtttagctgattattactggaacaattgctagagactttgttgctgaaaataagaggctgaaatggatcatggtaaaatctgaataggaacaaagtgtgggcaagaggaaaattggtttccttttgctggagtaactctagtgagatgggtttgcctcaggttcctgcaatcaaggaggaagtgcttcctacaatgagtgcatctcttattgttcgtcctcattttgcggggaatagcacctgtcatttgggtaagcttcctgcagaaagctcaagtaacagggcatctccatgctcatacatcagtgatttcaagagaaatgatgttttagattctttgaatggatttgatggcaattttagagccagccatgctgcttatgggcctgcaggcttccaaggtctaaaacctgatacaggggatgtaggttccagatcaggccctaaattgggatcaaatgttcagatgcctgcaatgaggattgttggctttgaatcaggttttgctaattccactggaggtcctgatacgatggtagctgacaatacggattcacctttagttattgataattgccattcattgattgaacagcatgggcctcatgcgaggaaaagggtgttgtcgcctttgaacaatgcgctccctggacatttccgaggtgatgccctgaatattggttctggtgatgccaaaattcagcattctgattgtgctaggagactttatacttctggctttcaagatcgtaaaaaggcaaatactgcaattcttgattcttttgaggcacctacatggccagcttcgagatactccaactggagtacagagcagggtgtcgataaatttagtggtagtacattcactgatggtcctttgcttgagagcagggagtcatttccttgttcagatcacctggaagctcttgaaagtgttgctgttccacttgcaaaattggcacatcctcctctgcttaatctgtctcctcttggcccaacatggatgcatggaacaaatactgtaggatctcatggagaatcattgagagaaactgaaggttcaacctgtgaagggtattcagaaggtcatggtaggtcaaggataagagatgcgtttgaaaaaactaatatcttacatgatgactttgatatgaggatccctaagaagagttcagatagaaaatctcaaaactggggcccggaatctgcctctgtatccccacgcattggatgtattcggagtattggtctccttcctgtacgaaggtcgttaattggctcttttgaggaatctcttttatctggtcgctattcctgtggaaaagacaatcaggtccgtagaatttatacgctcctaatttagcttttagtggtgtaccataagttgatatttttcgagtgatgccagttgatatttctcctaaagtgcagaatattgacggtttccttgctgtcctgaatgtgactggtggtaacttctctcccccaactcagaagcttccattttcagctaccagcattgatgagaacagctccttactctactattcatcgatcgatcttgtggggaggctgcctatgagcagtagcaaaagcccaaagctcaaaagaagcctgagtaatcatgattcacgatcagcgaagagtcggttacgtatcccagttaaagggcgtgtgcagctggtaccatattcttgactttgagatttgcattaattcactgtattttgctcgattgttcatgatgcattggtgtgtatatatgttagtgcatatgcatgtgggcgacatgcatatgcatgtaccaattatgcaccacaagtctagttatttatcatgggatatttactctcataccattatgggtactggggaagctatatttgtaatgatacttttactactctgcatcatgtctcattttatgccctcctgtcatggatagctttctttggacttaattgcttattctcaaatggttcttccattatttagtcttttaaaagatttgttgaattgtcatatgcttcgatgatgtgtctatttcaccagaagcataactcttgactttgacaggttgtcagtaacccagagaagacaccgctacataccttcttctgcaactatgatttgagtgacatgcctgctggaaccaaggtatgagaaattgagaattgttatattacttttctttttgcctcatagacttatacgctggtggtaactgcaaatgtttctgcattgtcttggagttcctatgatggcatatttataattgcctatatggacaatgctgccagccatctaattcatgctggacacatagatgtgctttacaccatccatgaacttcttatttctggttgtaaaggtctgaccatttcatgccattggtcttacctggaggtgataatagaagtggaaaaatagaagtcatctattagtttgtactgaagcaacactaagcatttagtaattaatgatcctgtttgtagccacaccaccgggtacatgtgatttttctagccgcacaattttgctattcgcaatatattttttgactggtttgcaaagtttggagggatttctggtgttcttaagcagttaccagcaaaaaaaaaaaagggagaacgggcagtggaatggttcttattgttggatagtataggagaggggaatactgcgtaacatgggacgatagtattgagcctcagggggccggtatatataggagtacatggggaggagataaggaaggattacagatatggaaggagtctacacaaatcaatcctatcataatatgactctaactagtaactaccatatactctaacacttatttgtcctaaatggtttcttgaaccctgcttggaacagtactgcttcacttggcaggataagaactatctcatcgtgcatgaaagatgccattcaaaagtaatgccagatgcacgtacggtattgtctgtttagaaggaacaaacataagatgtctacgtttacggttcagattttatcgttttatttctttattttttttctcctgaggtcatcttatttctgttattgtaaaatgggacagactttcatgcggcaaaaggtcactctgttccctgtttctccctctaatcaaaagaaagaaggaagcaaggccaatgaaacaaaggtcgagtcagtccagtttgggagtgaacttagagaatgcggcactctattttctgaatgtaatgtagccattacctgtgatagctaaatccaaattttagagtttataaatactgacaaattgttgttgactatgcaggctgtagaccagggcagaactgcaacttgatcgatgactcggaaaagggcggccgcaagaacatgacatgttgctctatggagtgtgacattagagaatcaaatgactctagctctctagaaacttcagaaaatggcagtagtaccaatgtttgctgttgtcaatcagacacatttcccttaggtgaaaagaaatactgctgtagatcgtccaagatcaatgatccagctggaggtgctcttcgttatgctttgcacctacgatttctgagcccatttgccaagaaaccgtcaagatctatgcagcgtagcaaatctgatgtatcatcagaaccatacaaccatagttcagggcctgaggaacacagacgattctatctctacaatgatgttagagttgtctttcctcaaagacactcagatgcagatgaaggcgaggtatgcagccctacagcagctaccctgttcttgtttctttctacatcagtaggcttaagtaattctgaccaatagcattgctagcatgtaggtttcagtaattctgaccaataacatagatagcatgtaggtttcagtatttcatatagataaagtttctcagaactgttttccttatcctaatactatgatgcataactctttcgcatgttcccaagaaaaaaaagactttcttgtgccctttctagaggagagttagtttatttgtttatttatttatatatttattttccctcaactctgttttctctaaaggacattttttttccctgcagctgcgggtcgagcacgacttccctgctgatcccaagtacttcgacataagcaactgatatttactcgcgcacttcacatgaaatctgtatatatcataccctcattaacccgtccatcaatcccttgtgttcataaacattcacccatttgtataggactaaaatcttccaatgaaatacctcatttcgttcagaatcttgtgcatagtctctaaataatgttttcaccatacatggtgatgttgtcatctctgtcatgaatgtatagtttttttttggtaattttaccatccttgagaaggtaccaagaggtaaatttgatacctctaggtattaagtacctcgaggtaccaaaaattttaatgtaaaatttaggtatctcaaggtactttctcaaggattgtaaaattcctcatagttttttccccagcaaaaactcacaaaatggaacaaagattgtaaactgaattttattaacctctatggtctgaatattgccgtcaaattgacaagcagaattgctgagagaaaaaaactgataactatgtgaaacaaaaatgcatgaaacaatataaacaattgacttgaatgtactcctatctaattctgcaagtgaccatcttagttctcacggatcaaatgtgggaacttctgcatcaagaccatgaaccatctgatagagaagcctggcgagtatattcctgtaagggtccttctctcttttctcctttagatacttcatgcagctctcaacttcggacttaacattcaggtagaggtgttgggcgttctctttgtctcttagttccttttctctccctatgaaaacaagcaaaaatcaggtctcggaaaaacatcttcatcacttcatgtgttctagcctagtagcttatcttcagattgccaaaagaaagtaagcgtgtttaacttgtcatgagacagtgcgtgcgacaggtatattaattggagatttacttgcgtagttctttagagatgtacctcttgtttcaattggcttcccaaagatgaaataaaacctccctggtatctttggggcagccactactggatggattctttgatattttaattctccggtagaatcagtcctatgaaaccaagaggtaaactgagatcagatcattttttcttccaaagaattctggagacatcataaaaacaaacactataattaaattaaatccaaactcttttgacttttgtgtatgggcgtatgggcagcatatataccttagtttcacaccatcttcatttagcatcctgtcaaggatgtcatagaatggaatcttcataagatcgtcgtagtctaacaacatctgaggtggtacatctgtcattagacaatagaataaccagaaaacaaggcaaaaaggtgccaacttttttactctgagcacctataggaactaaattcccatggaagggaaaatttcctgccaaatcttgtcaatcctagtgattacagttagaatatatagtgtaaagcataattatctatccttagaccaaacatgtagacagcaaaggttcctcgcaaaaaaaaatgtagacagcaaaggagatttgcatctattaataattggtagttaatagtaagaatgcactcacatcacatatatcatcttctccaactactccaaatggtattattgttgctccaaaccttgatgccatcctcacaaattcagactgctctggccaaaacaacttatactcctctccctgaagaacagccaatcctctagtcagtagattgatttcatgatctcacaggttctatatgccaaattcagattgatttcatggtatcactgactctatgatctatctgccaaattcaaactgatttcatgataacactggctctatgatccatctgccaaaactgttgctacctttctatgaagcgcttctcgcgcgcctcccgggtacagcaacacgaagtgcttctccgcgagaagcttgtaaaaattgcctgcggtgacaggcacggcgcccatgatccgatgcatatcgtagtaggacggatccggcatgatcttctccttcttcttgtcaaacatgaagggatgagccaagcctctgatgtggatcccagagcttctcagcactccggtcaccagaggtccgagctcaaaccccaacagcatgtggtacccaacaatcactgcaggaccttgcttgggtaggcctgacaaacccctcacaatctttccatcaggcagtgttgatagcatcactgggtttgctatgtactgcaacatcctgaaagtttcagaaatccagtagaaaatgttcagtttcatgtgacaatttgttagttattactccaacagtaggaaatttgctccctgtaaaggggaattgcatggattctgaattgaccaagcttaagttgttttgagagatggtacctgatgtgatcagttgccttctgaaattcatcaggagtcagtggcagatagtccgaaacaaagtccgtctccaacgagcggcgatagtacccagctcctttgatggccgttgccagatcaaattcagcttcctatccaatattttaaggagttaacatggacatgccaaagatgaaaatagtgtcaaagtaggcttaagcttaacatggacatggcaaggatggacatagttatctaagcaatttggactacggatggaatttgctcgatgtgtaggacaagaacagacttgaaaattgaattgacaaataaaaaacactttttctcttccttggaccagtgagatcttaacatcaatacattttctaagacgcctggaatatgtaatgcagagaaacatgagctttcataccagcaatattttgtgaccgttgtctttgaaattacggattctgcatttctctagagcgtcacgtagcctttcagcttcttctcggcttggtagcagttcatcattccaactggaaaagaaaaggagaatagaatcttcagatccagtccgaaggaggaccataagtttcagtattacttaatatcatataatccatggaaagacagcatcaagagcaatgtgcacattgctaattgcaaggacatgataaaagttatcaggagctaaacatacctagcaagcaccaaagtctgcgctttaactgcatgcaaacgggaattgacaaatgatgacgctgttctcagcattttcaacttccaaacaatagattcctttggcagaacatcaagcaaagactgcataaacaagggcataaaattagtattatgatgattcagacatgaactgacaaagaaattggagcaatggttagattcgagtctcaccataagagaaggcaatagactagtggtgatctctgatagtgcttgaccagcttcttgaaatgaaaaaccacgcccaacaatagtcgacggtatcttcatgaagttgcctaaaaacattttttggtcactaataagcattacatcttataatcagctataggcgaagcgatgggtgagcttggcttcaaatgagtctactcattaatttcataaaggctcaaagtgcagaaaagtgagctaaacatgcaattatacttcttccccagttgagtaaaataaaatcatttatccatcaaacaagtcataaatattctcatagagaagttaaccgaacctgtcaggaaattcagcaactgcggtgtggttaaatggaacggttcagggaccaaatccaagaagactgagagagactgcagctgagacttatggaaagatgttcctgcaagaaaaccatacaacagaagataagtcagtaatcacttgtcactgaaagaagataaacagagaaagaacagaaaactatggctaatggcagcaagacctgggttgactaggatcaataccaaatcgatatctggatttcgcgccgccacggcaagagcaatgcatgctccaacggattctccgactagatagactggtctgtctcttgctctctggccctctgatttcactgcactctccacatactcaactagtcctgtattcattactacagtttcagagtttttacaaactatataagtttagtccaaaaaatgagctaaaaacatggtttcttatgcatcatattcttacaggaaattacgataagttcaagatcattaaggtttatatacttatacttcttaaactacaagcacatgagcatttctgtccattctttgaattataattaggagcatatgggaagtagacactacttcatttatgagaagtagacatcaagaaagtgtaccttcaaaggacgtacaatcttcaacaggtatatgtaagcaccacatatcaaacatcctgcaaagcagaattaattaccagcggtagtgaagataaaacagccatacattatacataaaattgtcattactttgctaatctctcatgatgccggatcagtcctaagccaactccatcaattcctgcaagaccaaagaccgaaaacggttacccatttttaatttttcttgtgtttctcaaatggttggaaccaaagtaatgaaaggtatgaacatatattctgacaatccaacccataatgcagtaggttgcatttccactgggataagactttcagtactataccttttttaaaacacaaattttcagtactatacttgaatactttaaaaaccaaatctctaacccaatgatcctaagcctgaatccagactttgcaagcatgtctgctgcatcaaacagtcagattaacagtgagtctctgattatctgtccatccatctaatccagccacttccaatggccatcaaccaccagtaaacaactgagctggtcaagaaagccagtccctttccccattctactaatattggcctactgggagttttcgtagtggcttgtcaaactgcttttattgtttatggtttcagcattgcagatcttcatgcgagcaattagaaaattttgtttggcatgatctgggtgagtcaccgaatcgccgacatgttgtctaaattagtgctgctgcactgatcttgatgagcttaaatattgccaattgccaaaggtggttggtcctgctttcaggcctaccctacaaccctctggtttcagactagaaaatcttgcatgattaaatggtgtcaaaattgaaataaaaattcagggaaaaaaaagggggtactgttcaaacaaattttcattttcaacacacccacttggtactattcaatatcatgctttgtcagagtttcacaagataaacagtattcaaacacatgttttacttatttatttgacaaaaaaaaaaggaatatgcagacacacatgattaaaaaaaggaaattatttttcttttttttttcagagagaggctcataccgggcaagtagagcatcgtgggcgcgccgggcagccgccctccgccgccgccgcactccagcggcgagaaccacctcgccgggccgccgtccggccgccgcaccatctcccgcgccgcctccacgtactccctcacccctctcctcgccgccttcgcggccacgccccgcgacgccgccgacgccgcggacgcgctccaccgcccccgcggcggcgccgtcccgcggcgtggcaggccgggcaggaggggccgcggcgctgccgccaccgtcgccggcatcggcatgggtggttgcgcggctggctcgacgtacggtgacggcggcgcctctggtcttctccttgatcactcgcgcgcgcgcgcactcgcttgcaacgtacgtgtcgtgtcgccgtgtggctggagaagaggaagaagattagagaaaagtaaaccggcctagtgcactgacagcactgtgctgtactagtactcccgccatactcgtaaatactcgtaatggaaatcatttagaacagcgacacggtattcaaaacacaactttgacttcttattcctataaaaatatttattaaaaagtaatatatgtatacttttatgaaagtatttttcaagacaaatctatacatataatttttacattttcaaacttaacaacttgagagttattcataatttatattcctaagatttaatttaaatattgtcctaaatgacttcctttattagtatggagggagtatatgccgtatatatataactaggtgaatatctcgtcacgttgctacgaaaaaattaagttacacggtatatacagataagacataatatgtttattgaaaccaaaaggatgcttcgtatgttttacataatttgtatatggttgcaaatatagtgcgagatgaatatattttatgtctaattaacacttatcaattttgatctaaaaataattaagaaagaagaaataagagacaatttaaagcataaatctattatcaaaaactataaataattgagatgatgtgaattaatgagagaagagataaatagtattatatatgaaactatatttagtgggataataactatatactaagtatatagaatatggacgcacgctagcaatgaagtcaaatgagagaacgatgaatcaatcaaacagttaagagtatatagaaatactgacttgaacatctcaactagaactagactgtattaggtgcaaaatgtctgcatatacagaaatgggggctgctaccccacggaataccgtggaaatagtgtactcacgggataattaaaaaagcaatgacagcataaaggagcaccccacagaacacgtgatttgtctcaatacctagccactgtctgctcggtatcgtcgccggagcagtggctaccttacctcgccggcgtcatcgccgaagtagcagctacctcaccgccaaatattctccttgttatcgcgcgctcgggtgatacctcgccggcgtcgtcgcccctgagcacccagagtagcagctacctcaccgccaaatcctcctggtaccttgagtaaggtaccgaggtggtacctggtacactggtattggctggtacctggtaccctgggtatcgagctggtacctagatatcagaccttggtacctgggtatcagcatgatacttcaagagggaggaggaggaggagtcgtggggtcgggaggtcctggtaccctggtatcgactgatacctggtaccctgggtatcgagctggtacctaggtatcagaccttggtatctgggtatcagcgtgataccctaagagagaggaggaggaggaggagggggaggagtcgcggggtcgaggaggtcgagcagcggggcggggcggcggcggaggaagaggaggcgacagatctggtgcctaccttgtaccatgcctccccagcctcctcagccggctgtggacgacgatgtgctcggcgcacccctgccgccggccatggaggtcttcatcaccaacgatgtagcagatccgcttgctgccggccatggaggatgccgccgcaaccgcaccccgttccggctccaccgcaccccgctcccactctccctcttgctcaccgcgctcgctgctgagctcctcgccgttgcggcctccctcgcggcggcggccgccggctctggtgagcagtgggcgacggcgacagggagggttgcagtgccgtctaatttaggggagaagagtgaagtaagaggaggcgacggggaggcctgcaacgccgtgtgatttgggagaggagagtgaggtaggaggagaggagtgaggtaggaagaggggatcccgtctccacaggatgccgtgttgtaggttttctgtacagaaattcattgaaaatcaaagggaaaaaaatatcaaataattgctcccaaaaaaattgtgaaagtgagcaagtacgtgcatcactgtttgcaggatgcacgcaagccacataaaccgatctctctctttctttttttggattttggtggcagagtcaacgtagagagatgggtaatcaagcagttgccgattgagtgaagtaatgaagttgagttaacctgacagatgaattggcatcttcttctcccaaaattgttttttatttttattttcaaacagaacaatattactattgatcaacacacatagtcgttttacagcaaaagcgtataacccatgaactgatcacaatcaacaaagctggagacgtcagaaacactttgtgattgcgatgggagtctgaaccaaactctgaagaagatgtcaccctctctgcaatttctatccgttcgatgagttggccgaacgacctgagccggatatcttgttgggcctgaacagtaacattacgtgcgtgaggcccattacgattgggccggaacgagattgccacgtacgttctagttgggtcggaacgtcgcaatttcttatttgggctggtacttgcctacaagcatagtccagctacgctcgcatctcaatcctgggccgatcagttggatccaacggtcagcagcatcgctgaagggcgttaggagcctaggacccacctgtcagaactcaaaacgacgaggggggttcaagtgcattacccgcgaacctacttataggtaaaaataagtaagttcataggttagttttgcttataagtggattttcacgggtagccgcttgcacacttagggaggcccatactacgggctgcttcgctttgtcgccaattctaactgacataaacaatttgtgagagaaaagttccgtaactaccaaatattaatacaattgtatttataagataatgtttagtttgctaccctactaaagtttagtggggttgaaagtggcaacaaaattacaaacaggtcctacataacttgccacattttcaggggctgcaaaaacttctgagtggaataataaccatacaacaatccctcaaaaagtcattcaaaaaaaacttgtcattaaaaaaaaacaatccctcaaaaaaaaaaatacaacaatacaagatcatggatgtgatatcgtatgtattctactactccaggaaacaagtttcagttcaggctattcacaaaaagtgttggtgatgcagcatctccattcccccagcaataatccccactgaactgacgttgttgaggatgtcgctggatttcagacatcgcaagcacattttcagccgccgtcgccgccaccgacgttgaagatgtcagtggccctgacgaagcgccctttcacccgcgtcctcgtgtcggctctcatcttcctcgactcgtaccggatgtgcttgtcatacctgcatcaacaaataaccaaattcaccacgaaacagtgagaaaggagatgatcaatggcaggttaagcagcttctgtccaaacatggtcagaaaaaaaggctagtgaaaaccatgcctgcgagtctttctcttttctctataccgttgcatcgcgttgtccctgttcatggcgatcgttttgctgtcgatcttcagggaattcctctgatcagctccagttacagtttgatcagtgatacagttctccccggcaagaactgctgcaacttcttcaggagaagagttcagagttctatcgacgtcaacgatcctcgaagatgatggcccgtcatttgtcaatccgtgttgctcgttcttgtgtcgcctgttgccggatgtggcagtgctcagctgaaaataggtgcaagaatagtgacttgagtaactcaattgccactgtcaacaacaggatcaatcgatgggtttctcaacggtgtaaacttttcacagattaagttggctgtcagtgtcacattgaagagcatgaggtttacattgctaaacggaccaagagcaaaggatatgatgagtatgtgcatgatggcccatagtggtgacagcatccagataatatcttagatcagatcggagcacatggtctactctgtcaatatcaatcctttagacgataaggttgattgataaaaaagtctgaaacatttatggactgtgccttaacatcaatgagcagctatatataatcagaccgcaaaggtgtatatatattattatatatctaagatcaagagcacgaacctctaaacatatgaacaagagcactgcacatgaatgggacagtgatacatccctatgcgcacagtacttcacttatatttcagtataattttagagttcgtaaatatcacacaagcatgaaaatatacagaaatttcatctgtgaatagcaaaaagattgaaatgtggattacctgttttggagtcaactggtagatattggccgacacaatatcttccgtggcaaaagagtatgtcgagtcataaatatattgaagatctttccttgagctagaggaaacttcctcaatcatgtcattataacttttgatcataaagcctccatcttttgggccgaaatgaagttcaagtgcagagtgctcatcatggtcccttgattttcctagattaaaatcccatatctgtcatgccaataacaaactctgatttcaagttgtctaactcctcttttttcccatgaaaataagcacatagtgattgacacaagaagaatctgctttctctggctgtctggtaattagacccatgactataacataatagtcatataaaataaaatttccaggctagaagtgatcttaccaaaaaaaaaaagaatctctcttaggtaatactaatgcagctaatatcaacaggcaacaggcacatttgggcttgagaaaatggtcggagcacaaactgtggatcagcatgaacacattattttgcttccatgccaagttttcagttcatcctctgatcacatatcccatttttattttgtgggttacaagtttactactactaatgctaacttattacagagaaaaatcagaaaacacagctttttgacaccataccacagaacaatcagagaaaaaaatttgatgataatcaaggaggaacttggttatcaaataattagaagaaattgtaagcatgttgagaatttgacaatcagagtatgagaatgagaccatgctatcacttgtaataaactgttgaaataatggaagcaaaaaaacacagtctctttgtcactacctggcatggcggatcggagggcgcggtgcgctgccacacgagttcgttgtcgtcggtgaactgctcgccgttgccgacatcgccgcagcccgccgcctccgtcaccggcgtggacttgtacggcaatgtggccctttgcgccgccgccgctgccgcagcctcatggcggattgcagcggcagagccccggcgagctgatggggagatcgatcccgagttcgcctgcgccggcgcggattccatctcacgccgcgccagctcggcgagctggtggcagagcgagtcccctttgagccgccgtccgcgtccgccggcggcgacctccggcggcgggtcgcagggcacgtacatgtcccgcagcacgcgatccgccgccagcattgggtaaccggcctcggggaagaacggatcctcctcgaattcatctcttccgccgccgccgccgaggtcgagcccccacgacgcggcgagctcggcggccccggggcatccggagaaccccaccacgggcaccctcgccgcctccgcaccgtcgtcgtcggcgcacccggcgcaaaggaacctggcttccccgccgccgccgcatcctccagctccagcgacggcggcgacacgcgccgccgcggggcgcgccttgcaccgggcgcagagcggcgcccgcacg

SEQ ID NO: 8799 - DNA, 129535 bp, Oryza sativa
  unsure (1)..(129535): unsure at all n locations
ggtttaccaagtttggcggggaagcaacgtaagcgctctctagctctctgtctctttctgtctagcttcatggagcaattcgattttgtttgcctgtgaacggtggatctggatctgggcgcgcgcgcgcgagattagctgcagcttttagggaggatttttagccgttttattatgtgactgggcgcaggcgtgggaggaaatgagatgttttcggtttcacgtgttcgcgatttgtgtgatgcttatgttcgaaatgcgagtttaggggcttggtgtgacagaaatttgagccgtatttgatgcttactgtagactgttcgtgttctagttgtttatggttgggaaatatagctctggatgggtggaaatcagttcatattcgaatcatgaaatgttgatacagctaggggaaagtgtgtgctttctattgttacgagaatacacagcagaaaatgttttatatttatgttcagtgcttcagtttatttatcaggttgggtggggactggggaatgctagttcattagtttgttggggaagctacttcaattttcagaatatgaacttttaatgactcttacatgattatgaggatcatggaatggggactgcagcttttggtagtacaatatgttgggaatgtttgatacagaaagtaaaatgttttatatctgttgtgcagtgattagttttggcgagaaacacattatatattggaccgtaaaatgctttggttggaaatgtgttatgctctatatttctcgtagaactgaaacataccgagacaatggtaattttggtctaattgtctaaatgatccttttgattcctttgatggggtacttggatgcatttttaagtagaagaatttattcaatgatagcttctttgatcctttttattcctttgatgggatacttggaggcatttttttaagtagaagaatttattccaggatagtgtcatgctttagctcatctacagagtggtctatgcacagcgacctttgtacatgattcaatcacattctggcaggtgtaccgtcaataaattagtgcacgcttcgtctgttgaacaagaggtgaatgaggcatttgtgtatggagattacctcatattaccatctcgttcctggcatctccgtttcactagattctccaattgggacagcgtgcaactagaacaaacaatccattcaaacatctgtcatctgcatagtagtgtgcttaaggttgtgattagccaacgatgtgggatgatgaataatcttgtggccttataaagaagcaaggattaggaaatctttctgggagtttggatgtactttatttttttggcaagagtgaggctgttttcttattaaaaaatttcttagcttgtggatataattgtccatccacctaattttaacaagctagagaagttcttgatatggtacacattccgtgcttgggagaaacagctaggaatgtttcatattacaaagccgctgagttacatttttagatatcatttcctgtttctgattatttggttgttttcatgagattttagttttcttttgcccttctcactattagtgttagcagcttttaaccttgctatattgagacatcactatttaatgccataaagtgccacttttttggctaatcgactctgttttaaaaaatagcatgctgaccgttttttttataaattcacttatatatttgcaattatttcttctagtttcacgcattggattcattgataacaattatggatctttttttcaggagtttttcttgcaaggccggttcatttttggaccagatgtgagatctttgtttctcactatattcctcattcttgcaccagtattagtcttctgtatatttgtggctagacatctgatcaatgacttccctgatcactggggagtttcagttatggtcgtagtggtcgtcttcacaatatatgtaagtattgctaatttgctgcttctcatttttttttcttgttccctctaaattgattgaaggctgtcttagttctgctactctgaatttggttcatatgacagttcaaccatgttctctttatctcctagcgcttgcatgatcagtaaaatttctggccatgaataaaactattatgccaagggtttttattttagttagatgattatcaaaatcggataaatctgtcaaaagtgatgcacattcatgtgtaaagagtaacatagtataatgtgtatgggaaacacataaaaatgtgattggctactcaaacattgttatccatatgaaagggagttatgtgccgagtgaataaattactttgacagtgtaatttattatgtttggttgtttgctgcatttatttcccgagtgaatatgcactgctgcagtgtgtgcaattaactgaagcttcatttaattttccaggatttgacattgctgcttcttacctctggtagagatcctggtatagtaccacgtaatactcacccacctgagcctgaatcgattgatggaggcagtgatatgggaaatggacagactccacaacaactacgtttaccacgcacgaaggatgttttcgttaatggagtaattgtgaaggtcaaatactgtgatacctgcatgctgtaccggccacctcgatgctctcactgttctatatgtaataactgtgtggagcgttttgatcatcactgcccttgggttgggcaatgcattggaagggtaagtatcttgatgtgttggaaggtttaagatatccttattgcaattagcttgaagatttgatatcatgtgcggtgttgtggtctgtatacctcttgttggattttctatattagatattagtagattgttagttactactttaaagttttaacaagtcagcgctaattatcaacttatctgctgcagcgaaattaccgattcttctacatgtttgtattctcaaccacattgctgtgcctctatgtctttggcttctgttgggtgtacattgttaaaataagagatgctgaaaattcaacgatatggaaagcaatgttaaagacaccggcatcaattgtcctgatcatctactgctttatttgcgtgtggttcgttggtggtctgtctgtctttcatttctacctgatgagcaccaatcaggttggtatcctttcggtttttttttaagtttttacaaataaatctttcaagcatagcttaatgacttgttaaccgtccttttctttacttgtgtgtatcagacaacctatgagaactttaggtatcggtacgatcggcgggctaacccatataacagaggtatggtgaacaactttctggagatcttctgcactgcaattcctccttccaagaacaattttcgagctagggtcccagtggatcaaggtttacaacaaacacgcacgcctgctaggggtttcatgagcccgaacatgggtaaaccagttggagatcttgaattgggtaggaaacccgtatcatgggatgagcctcggtcagcagcagatatcagagatttggaagttggccttgggggtcttttggatgagaaagagggtagaatagcccatgcatccccagatctttctcttccgggtgagcttgtggaaggtagggctggtatgcattcgagacgatcaagttggggtcacagaagcggaacctcagagtcgatggacagcatcgctgtgcaaatgggaaccgaagctaactggggttcaatcagcagcggccatggtaccaccagttcaactcactagcacacatcactgcatttctgacgctgcatctgcatctattggatccatctcatgaatgaagaaccatgtgtgtactctcttctcctgtgctgcttttcaccttaggatatatacacagtgctttcttcctcccgtcctctgttgttgttccatcctggaatgggcatctattgatgcacatcctgttctagtgtctttaagcaaaaataacagaagatctttaactcaatgcgtggcttggattatctatctgtatatatcgagtctgtaagcaaggttgtcgtgtttggtttggtttggttttcgacgttctgtaactgtaccatgctgctcgactcttactcaagaaatactactacccaaatcatcctctttttctaatgcaattctttttcttcaagtctctaattggattgttttttttttctttttgggacatggtataccatctgcttcgcattcttctgcatgctgagctgctccttatttgattcttgtgttatctgctcaaccttttgtattcctttgcatactgagctgctcattggtactatgaattcggtgtaaaaattaacttcaaattcaatttgctcgaaaactttcattagcatatactccatgtaatttatccagaaaaacaaaagcccagttgcaattgcaacgggggtgttctgctgggttattttaatacagatgccactgaagcgtgtgcagcatctggctcgcgccgaccaatcactcaacctgcaacagttgcaacagtgggcttgtgtgtttggcatgctttccaacgcaaaaagggcacatgctgagctgcactctcctgctctcgcagcaatgcaatgcagaagcagcgtcgcttttggtgctcccatgaaaattctgtggcatcgccagtgccaagcattcaagtatattttgtaccaccattttcttgctcataccagagaaaaatcatcataagaaactttgtattttgagtgttcttctgtgtgtcatgatcatatgttcagtgaggcatgttcttacatgtttcacagagcttcagttccgctaaaaaagagagcagagtgggctaaagtgatcttaaaaaattaaactagaagggtgaagcgagtctcgggccactccacagctacactttagactccgctcctaaagttaggtttataagttagagtcctataaaacaaactcgggtttatgacgattattcaaggacaaaaacaattaattatatattagaaagtcgaaaagttgttttataaaagttttctaagaaatgttgaagtttttttttggcaaaaaaaatgtaatatttaggaggctggaaagcgtgcccacgataatccataagccattgtgttaggtcaagttggatcgttgtgacacatcagtcaccaaatcaaaaccgttccaaccacagttaagtacagaaaatctgaatggattcatgtgagagtgaataaataatcatcactaagaatcaagcagaatcaagcaggaaaatgcatgtttgattcccctgccaggagttcctgatgcaagcagatgaagccagtaagtacgtagtagtagtggcctccagctcgagcagcagtgcagcactagaactgatccagaaacatcaaattttccaacaaatcaaagttcagaaactggcatgtcatacatggaaaattcatactcctaagtgcctgcacctgaagatcctgtggatacaagcaatggtgtatatttggcacacaatccaaataattaactagagcagattccattgagtggcaaaaggagatgatatgatcaggttagtggcttgtaggcaagtggagatcaatgaggaggtgaggaggagatgaatcgtatctttggtctcctcttatcttcttctttttgaatttaatcttcctttccaataattgaaatgttcataattcatcagaacattataaatgattaagagttaactatctagttcttcaattagctcaagggaagcttctgtcttctcattgatacacatggtaccggcagggtttcccaaaccaccggggccggggttaccacgccccggcggtaggtaaccgtgaaaaaccatgcaaaatttatcaaaaatttaaattattttttaaatttatttgaatttaaggaggttaccgtggtatttatattaccgtaccccgcggtaagtccggtaaccgcgcagttaccgacggtaagggaaaccctgggtaggtataggtaggtaaccatgtaccgaatagctggataagactgtgacaaactctgcattttgccctcctttttcttgtgctgatctgagaaaagaacacatttatgcatctgcttaactagacccaagaaacgtgcacgaatacacatcagctcagtactctccgcagaaaagattttctcaggcttgtcttcagccacagcaggaactccacttgatcagtaataatgcatgcatgcatgccaagcacttactagcaacactacttcttcttgttcatcttcttcgtcgccatctcgataaaacttgccgttcttggagaaagtaaaggcacagttgggcagctgcattattgaatggttcagctattcaccagcatgctgaaaattattcagctgttcagtagctagtagaagcagagaaggtgccagtgaaacaagcactgaaacatttccgtttcatcgcctcctcattgccgcgatgcagaaaaggcctcgtcgctgcatgcacataatgtattaccaccaagctttgatccgacaagtggcaggcaaatgtgatttgcagctgtaaagcaagtaaaaaaaaggtataattgtccatggtttgatggtgaaatgtaacttactgatcaaccagatgcaaagctagtttcagctggtaattaactttggccatctctgatagatgcaactagcttaattgtgttgtgtttctgtgactcttgtgtgtggtgcatcatgtatccacatacttacatttactctttgtgttcatgagaattggcatgcagctagctagcagcattgctgaacctgaatgctgatcagttcagaaaaaatcagatatgagcgccgatcaatggatggaaagagaaaaggcctaaccttgactgaaccggccacattgctatagtgctgtactgttgtctgcatgcatgcatctctcttgtcagtgctggtcatggatgtgtattaacagtagtagtacattatgtaatgcgtctttgcaattaaaatgcacagtatagtagtaacaaaaacatgcccttttcttcccatagttttggggtccatgcaggtaattcatgtgcagattctgatactgatgatctgacagactgacaacacatgaaacctcagatgcaactggagaagacataatttgattacactctacaatatctaaatatgtctctcctatgtactaactttttgaatacattcctgaatttagttaatggaaggattattatctgacaaatgttcaattattcagtaagacttcaggttatagcaaacagtaggagtataatatctctggaccacttaggcacttaggcaccatgtagatacgtacatatgtaacatatgagaagaagagaagctctactactatatatacaaggcttctacccccaatgccaagcacacaaacattgggtgcagtagtgaatcctcttcagaagttcagaaaactatagcttgcttttagcatatataaattaggtgtttttatcttcttttgagaaggagatcaagaacaggcagtaggaggcctcttcctcttctccatggatcacctttgggcctctgtctttgggattcttggtaagcatctcatgcatgctagttcaccatctatacatgcatccatatggtagcatatggcatggcatggtctcccaaatcatgattttgtttaattatatgtatgacctcaagatatattattcttactgacatgcatgaaaaatgcacttttcttctccacaggaaacatcgtctcattcctggttttcctcgcaccgatgtgagttttgctcatttacgccctgattttttcttttccaaatcattcattcacctaaacttaattacgcgttctgacaagtgcacaattaaattttattttttactaaaaaacttaactacgcgcacgtcctgactcctgacacgcgtgtagttaagctttgtcttgttcttaaaaaaaacaaaagaagaaaaaaatctcaataactacgcgttgtggggattgtgccagagttttgaatttcaaaacatgtctttttgccagtggggactgaaagaactgaaatcaccgaaattttggtaatttcggattttttttgaattttcaacatattttgattaaatctgaataaatttacaaatatttgacaaaaaccgaaaatttcggggagactttgtgcttgccggtggggcccgaaattttcgaaccgaaatttcaaaccaatggatggtgcaggccgacgttcctgagggtgtacaggaagaagtcgacggaggggttcagctcggtgccgtacgtggtggcgctcttcagctgcacgctgtggatactgtacgccatggtgaagaccaactccagccccctcctcaccatcaacgccttcggctgcgtcgtcgaggccgcctacatcgccgtctacctcgtctacgcccccaggccggccaggctcagggcgctcacctccttcctcctcctcaacgtcgccgccttctccctcgtcgtcgtcgtcaccgtcgccgccgtcgcccagccccaccgcgtcagggtgctcggctccatctgcctcgccttctccatggccgtcttcgtcgcccccatgagcgtcatcgtaagaagctctcacctcatcgatcagctcttttcttttaaagatatataatgaaagtttttattgaactcagccaattacatcatatgatattataactgtagtaagaacattccccaacttgaactcaactcatcagttttttttaatataatgaaagcttttattgaactcagccaatattacgtcagatgatacaaccgtgctaagaacactttcaacatgaactcatttcatcagtttttttttaagatgatggaagctttattgaactcagccgattacatcagatgatacgatcattagcttgaactcagctcattagctttatcttttttaagataatggaagttttattggactgagccgattacatcagatgatacgatcgtactactgagaacactttcaacatgaactcagatcatcagctagtgatgatcttgcatcgtacttgttgagacatgtttgctgatcaatcgatcgatggatggatggttttgcagatggtggtgatcaagacgaaaagcgcggagttcatgccgttctcgctctccttcttcctcacgctcagcgccgtcgcctggttcttctacggcctcttcaccaacgacctctacgtcacggtaattaaacatctcgatcgatatcacatcaaatcttgatcaattctctcgaccaattcatgaatttcaatcaaagtttgaattgtttaatttgcgtgtagcttccgaacgtgggaggcttcttcttcggctgcgtccagatggcgctctacttcaaataccggaagcccaatacggctgccggcggcgtgatgatcctgccgacgacggcggctgcggcggcggtcgacggcgccgtggctgagcctgcggcggcggcgcagcagctggcggaggagctggaaatggagctcgcggccgcaggcgcgcacgcggtggccgtgctgccggcgagcgcgctgcccgtgctggccgagctgcacaagatggagcaggagatcgggacgccgcgcaagggcgccaccaagaccgtctgacacgtggctcgcctccattggttgtcgagtgccatgtcatcatcgtgattattatatatatgggcaaaatgcatcatacccagtagtaaatttcttaatttcagctgtttgtttgcgttccatttgtgtgtttgaattgagtttgtattgtgcaattatcccaagaaaaaagaaatgtgcatgtattggttatgattaattaaattaattcgtatcctatcaagcatagttgcaagtcgagactatcttttttcttcctagccattgggtctccaatccaaaggtgagacagcccatctgaacttcgcggtccagtcagcccaagctcattaggcccagtatctctctgcaacatttttgcatttttttttctttctttgataaactcctctagtgaatatgtgcataactgaaatggacgctggcctgacaagatcaaattaaaaccaactcttatgtttgagccatagctcacaagtcacaaaacaacaagtgattcaaacaaatcagaaacaataagtactccagtgatcttgcagggggaggcagtattctatccaagcagactgtttgctaataatcttatgaccatgaggccccagaaaaaaaaaatcacatgcactattttagacttcccaatttatttctacacataaaattttaaaagggaaaaaaaaagagaaagaaagacgagaccacacagcagcagctagtgcttgaccagcctctctcccatgtctccactccagtccaagccgattcacatgcatttgttctgttgcatgtatgcttcctcttcctcctctcctctcctctcctctcctccccatttctcatcttctctctctttctctcttactccaatctgatctccattgctcaccttcctagtagcttagctgatctcaatggcgacaatggcgagctcaggagcagcagcagcagccatggccgtgttcttggcaatggcgctggtgttgagtggcactgaggccaggttcctgtccaacaacatcactgtggttggctctgtctactgtgatgcctgctccaacaacactttctccaagcacagcttcttcttgaagggtgagtagaaatggtagtatacctgttacacagtagctcagctgcattagagttagttttgatcaatgtgtcattctgcattgtggtcaatcaatggtttgttctgaaatatggtggataaacatggagtgtttttacagcaggttattctttgtttctgagatagatttacaagatgctgtaaatctcttgctcattgcacagtacaaccacatgtaggatgtcttagaagtattaggttttttttttctgttctaggaagatgtcactgaaaagtgaaaactaataggcaagcgtgacaagacttctttttgagtacattgattccctatgaatctaaaggagacagagaaaagttgacatatgcacaattgcacataaatgtgtctgtggcttgttctggatttataattggtctggtcaattttcttggtccaattgtaattgttgtttagttttagttaatgctaccatgaaagacaagatgcctcacacaatataactcaagtttcttaggcccacttaaagcttggcatacactaactgaagttgaaatacaactgacaattactacattgtgccttcaattgcataaatgcagtatcatccagcttctactacccatctgggctctggcattgcaaacagaagttttaactggctctgagatgtgcttgttacacagtttcaattcagagttttgatcttttttttaaatggaaaaaaaatgtttctgtcggttattttgagcgggatatacctctaaatctcataatgctatgcaaattacaatgctgcctcaagctagaaatttccatgtttttggctttgttctaaaaataacgatttcattatcctaatagaacatagtgtctatgagttgccaaagtatgacattgcactatattaccaatgcctcattctacattgccactaaaactaaagctaagatcattcacaagagcagctggtttcatagatttcatcattgcattcaatctgaaatctgaacaagtaaaaatcagtaacttaccagatatgaaattgtcttcatctttggcaagaactgagatgctgaagccacaccactaatggccaccatggtgatggatgctgtgcaggggccagggtgctgatccagtgcagcttcaaggtgaactccaccatggccgaggagctgtccctggaggcggagcgcaccacggaccagaacggcgtgtacaagctcgacgtgccggccgccggcggcttcgactgccgggagggccacgacctccggtcggcgtgccgcgccacgctcgtccggagctcctccgccgcctgcaacgtcccgggcctccggggatccacgcagcacatcgccctccgctcccgcgccaccaacgcctgcttcctcaacctcaacgcgctcaacttccgccccgccaagcgcgacgccgcgctctgccacggcggcgatggcgccggcgccggcggcggcgctgcgttcggctcgtcgctcttcttctggccgttcttgccgctcttctggccgccgtaccggctcccgggcggcggcggcgggacggtgtcgttcccgtggccgttccccgtgccggactggctggtgccattcctgcggccgccgttcttgccattcacgctgtaccagccggcgccggcgggctccgcgccgccgccgttctaccgcttcccgccttcccaagaagcatcaccatctcagccttagacctgaaaaagtacaaaaaaaaaacttgccaagattaatcctagattcttcatgtttagcagcaagagaggttgtgtgattgtgacattgttgtaggtgatgattctccctgcatcacacgtgtagctggagctagttcaggaattgccaccgtgttcatcgggctgatgaatatgtggaagtgataattataatgtagtgatggcaacttgttagtagtattcggtatattgtcttaaaatatttcctcgctgcagctaatttttcaatcatatttatatactgatgaatgatattgcagccgctaacactatcttggtactctttttttttacgaaccggcacttagaatgtgccaatttcattgaatagagggagaaatcctgataccgtttttctcacaatttaaacttcattcctaaaggaaataaactggacaactattttgaaaccgagagagtaattgacagatacaaaatagtaaaacttgtcagttgggtgaactcatgaaggtatatgcctgattcagtccagacatgaaccaaggaaaagtttcttcgtctgcgtgtaccagcagagtaactacccaatttgcatatggcacgaggaacaggtacacatatgtctctaaccgactgctgaaagtagagttcatcagaattgattgcttcgtcttgtctcgcggattttactggcatggaacatggtatgttttttgccaagcccaatggttttttgatttcttccagtggaactgacagtgcagtttgacaaggaaaaggggaagcagacacaagataggacacggtctgtttcatcatgtaaaaatgcatggttcagaagtaatttggctcctggaaacacttcgcagtgatgacatttcaaagttcagtttgattcaactattcagcaatcggttccaacatacacaaatctagctctgttaatctgaataaatattctcaaccaataacaaatggttaaacttatacggagtatattcttagacccaggagcagatgtgtcaaattgaggagagttgacaaggactaggcgaccaagactgaatccataacaaaacaaccgaccatttggagcgttgcattgggtgagaaaaagaacaaagaatcctgtttaggctaaacaacccttgtggctggggagttggacacctccattctaagtacaatcatgcacacaggtcaagaggtgtttatagctaaatctaatgcattattgacatgacgccactggcctctccaagtcggccatggcgtcactctttgcacacttgcaactcctgctccagttattaaccttccggtgctgccgtacctcatgtatactactaaatcactgcatccatggaccaagtacttaaatgctatatatgcaatcttcagttgtacttaaattctatatatatgcaatcttcaattgtacttcaattcaatatatctactctttaattgtaattaaattctatatatgaaatcattaattgtgcaagaaccatggatatctgcccccaatccaaaagatggcctttggaccaagaaccttgcttggtccatctatatatatcattcaccacctctcctttcaccttcccacatgttcttgcttaatcctttcactaaatgtgtaaacaagttgtcgatgtgccaccattagaaggagcatttgcaactttgtaatcactagctaactaaaaagaggaagctgttgtatacgtacgtgagcgtgggcatggccgagaagaagctggcaatggcggagagagggcggaggggcctgatcatgaagacgctggaccggtgccggccgccggcgtggaggaggccggcggaggggtgcctctcggtgtacgtcggcgcggcgcggcagcggttcgtcgtccggacggcgagcgtgaaccacccgctgttccggccgctgctggaggaggccgaggaggcgttcgggtacgcggcggcggggccgctgcagctgccgtgcgacgccgccgtgttcgccagggtgctggagcagatcgaggaggaggaggaggagacggcggccgccggcgacgtggcggcgaggaggtgcggcctcgccgccagagggcactccgcctaccggctgctcgtccccggcggccggcctgccctcgccggccggtcgtaggacggtgcagacatgcagtggagtgtttcttgtccatcgacttatcttgagcttgtggctctgatgataaatccacctaaatcaattaatgtatctgcaaatcatgaatattgcaacaagaggttagtgcttagtactagtagttgatcagatcttgggcttgagtttttcttttgttgagctcatattcacagaagatatgtgtatctcttaggtcgcagtaactgttgatcagttgatgcaaatgttatatattcaaattccctagctttggatatttatgatacagatttcccaagctttgaatgtttatgatacaaatctccctaacttggaatgttttatggtggaatgatgcttagaattataaataggttgcatatttgaatgcatctcacattgataagtttgtagtttttggcctcctgcagttcacttgtcaattgtcatgcatgtattcattatttttttataccaagcttctttaagtctactattcaatacatataatattaaaaagactcaatgcttcaaaaaccaaataataagtcaagatagcaattagcaagcaacacagcagaaacacggtgacgagtggaaaaatgggtcaacaatggacaaagaaccagtactaaccagcatgtacagaagattgaattcaaaaaaaggaaaaaaaatctagtgaatcactgcacatacctcctggtgctttgcttggcttgctagaaggttgaatcaacataagggactacaagtattcagcaattaacatctactgaggcagcacctatgctgttattttcagcagcacttgagggacattttgtcaaaaaatccaaatctgaaaatttcaatgtaatatgatatgcagttaatgattaacttttcttttttgctgggtcggccgaaaatcaaccaaccgaattgtattaagaagaaaagagagagttcaggttacaaaacgacattaaactgttgaaaagggcaaacagccaaccacgaaagcagcaaactgatgtccctaaaaggaaaaaagcctgggcacaactaatgtttcagtgttaacttggataacgaaaacaacagcatagaatttaaaatggctaggttccctgtacttttgacatctgtagagtcaaatgacaggggccacattgtttcgctagccctagtatcatccgaaaagctacaactcagtctaagactcggtaaataaaatcaagcagcaagaagaaaatgtcttgttacatgaaacgggctgacctttcaaagaacaagtgttggaggcgagaagtttttttcttatactcgattggaggcgaaaatggttgtgaaaattatacaatctggcataacaaaatctggcaaatcaaacaggctgctggttgtgtcatgtatgtgatcttaagcaaggtgtgggtaaaatattcactctttagatgagttttttggatctttacctcaaattcatagagtcctggttttcaatacttgcctcaccactagaatgtcttcagaatatggattctgaagccgtcaatttgtaaccaaattacaagaagaatgcagttacatggtcgcatacttttaaagcatgtgcagtaattcagattaggcataccaagactgcggttgcgtggtttctgctctacaaagatatcgcaattacagaagttctggtgaagaaacacaaagtacacacccttgcaactcctgaaactgagttcacttattcaatactcattgagaaacagtgactctcaacctccttcaggcggcctcctctgttgcctctgaccactgtgctctccttcttcattcctgcgttgactcgccaagggcgcagcgctttcgctttgaggccttttggcctaagtttgagggattcctccaagttgtgcaggacgcctggcaacctcctgctaaccttccccccctccccgcgcttgcctggtgtttctctaacacggctaagcgccttcagagctggagtgatcgtcacgtcggtagcgtccgcctccagctgcagatggcgaaggagctcatcttccgtctcgatgtcgcgcaggagaaccggtctctctcccccctggagacctggttgcaacgagacctaaagttgaagtcccttgggcttgcctctcttgagcgcaccatcgcccgtcagcgttcgcgtctgctttggctcaaggagggtgacgccaacaccaagtttttccaccttcacgccagagcccgaagacggaagaacttcatctcacgtcttagagacggggactagcttgccgtcacccatgatgagcttcaagagctcgcctcttctcactttggcgccatcatggggacgtgcgttgagcgcgagctcgctcttgatctccactccctcggcctctgtccggcgcagcttggggagctggacggccccttcaggaggtgtgggcggtggttaagtctttgccttctgacaaggcgcttggtcccgatgggttcacgggtcggttctacaagacttgctagccagtgatcaagtcagtggttttggcggctctcaactccctcttcttggcttacggccagggtttctcctccctcaatgatgccctcatctctctccttcctaagaaagatgaggccgttgacgttcaagatttccgtccgattagcctcattcacagctttgggaagttgttctctaagattttggcctcccgtctttctcctctcctcgacgggcttgtggaggccaatcagagtgccttcgtcaaaggccgatctcttcatgacaactttcgctatgtccagctcgcggcaagggctctccatgccagacgcactccccgccttcttctcaaggtggacattgcgaaggcttttgacacggtcagctggccgttcttgcttgaggtgcttgcccatctagggttcagtcaatgctggcgtgattggatctccctcattattagcgcctcctcttcccgggtgctgatcaatggggtgccgggtccgcgcttccttcaccggaggggtcttcggcaaggagaccctctttctcctatgcttttcattctagtcatggaagtgctcaatgcgatgcttcgtaaagcctctgattcgggcgggttccttccgcttaatgatcgcgctttgcgacaccgcgcctccctctacgctgatgacttggtcctcttcctctccccggttcggcaggatctcgagttcatccagggcattctctcggtctttggtgcggcatccgggttgcgcaccaattttgccaaatgctcgattactccgatccgctcctcggatgaggacctggagctggttcactcttgcttcccctgctcgatttctgattttccttgcacctacctcggcattccgctgtccgttcgcaagttgccgaaggcggctcttcagccactggtggacagggtcgctcatcgcctaccaccttggaaggggcgtctcactactcttgctggtcgctccatgttggtccagtctgttctctcctccattccagtccatgtgtctatggcaatcggccttcctgcctgggttgttaaggccattgacaagaagcgacgcgccttcttgtggacaggtacagattcggttcatgggggatagtgccgggtgtcctggacgaatgtctgtcgtcctaaggccttcggtgggttaggaattcctaacctcaggttggcagggttcgccttgcgcgttcgctggctttggcttcagcgttccgggcatccctattgggatggcttgaaggccccggtcgagcagtctgtctccgacatgttcgaggcgtccaccttcttcgtgccggaggatggtgaatctatgctcttctggactgaccattggattgatggaggccactcagtggcctccttggctcctgacctcctcttcgctgtgccacagcgcctccgttcgcgcacggttgcttctggtctggcgaacaactcctgggtttcggacatccgcggggccctcactgtccctgtcatctcccagtttcttcttatctgggatgctgcgctccgaattcagctcttgccgggtgtcagagaccgtcttgtttggcgttggacgagcgaccagcgctactctgcgcgttcagcgtaccaggccttcttttttggccagcactcctttgcctgtgccgatcttctctggcacgcgaagggccctgctaaatgcaagttcttcctctggtttgcattttagcggcgctgctggatggccgacctcctcctaaagcgcagcttggatagtcattcggcctgccccttctgcggtcaagagcttgagacagcgaaccacatcctcctcgattgcgtgttcgctctgcaagtttggctccgtgtgctgtcgcctcttggttggactgcctctctgctctctggggtagctgtctccaagattggtggccttcttctagggtttgcttgccggggcatctccgggccagtttcgattctatggtcctcctagtctcttggcaactgtggaaagagcggaactccagagttttcgactctgcattgtcatcggtctcggaggtccttgagtccatcctctctgagggccacctttggtctttagctggtatcgctaattttggggttctcctgggaaggtagtggctctgccccctccaagctatttggagttgtgtgtagccgtcacagtagtcttttgtctcttctttattttagtcttttttctcccctttcttggtataagtcggtctgactgattgcgtcatgtaacaaacattctattcttctgatatattgacgtgcaattcttttgcgcgttcgagaaaaaagaaacagtgactcagtgaggcccataggaagatatttgatcaagctctaaattcaatagtccctgacaggttcccaggcatagaactttattcagaattttggacgattgcctcaacaaactttgaaaataggtaaaaataccaatatttactggaacctccattcccaaagtcccaatctacaacttgcaataaaaaccaggcgattacagtttctccccgaaaccaagtaatcctactgaccaccaggggagatgcaatgcatcgcaagacataactgtcggaatccccaagcaaaccgcacaaaaatcgcatcgcatgaatactagcgcgctatgatcctaccagtacacagagcacgagtatggaaggctagttgttgatgacttgagatctgcgaagagaacgaacagagcgagggagattcacctgggaatccccgcgcggtggaagactgcgaatcgctctccccggcggctcgccgtcgccgcctcgctccgccgccgtcgccattgggtttaccggaagggcaaacacgcaatatcaaagtacacgaggggtctacgtggaaaagtaccaaacaaatgggctggactcacaatcaattacggcccggcccagtagataccaccacctcacactccattcgcgaggcccacggcccaagtgacgcctcctaaaccctaatcctggcaacggacggcggatacagcccacctcctccccccacgccgcatccgacgctcacgaagcgtccacgtctccccgacgattgctttataaaaccaccacctcctcctcgcaccaccagtcgccgccttcttcctcctcctcctccgccgcccgcctcgccgcctcccgagagctccaccctcgcctccggcgaaatggtaagctcccgtctccggtgccagttgccccccgcggttctcttcccgtggatcttgcgatccgccggcttagattttttttttcttcagttgcagcgtcgatttgtagctttgtattttgtgtgtgaatattgggatgctctaagtaagattttggatggcgaatcttgcaggcaccgaagcgaggcggcagggcgccggtgccggcgaagaagaagacggtaatgctcgccgtctctctgctcgaaatctacgttgtttcgttgttggggggcttgtgatttacttggatgttttgcttggtggttcttgcaggagaaggtgaccaacccgctgttcgagaagaggccgaagcagttcggcatcggcggcgcgctgccacccaagaaggatctgcacaggttcgtgaagtggcccaaggtggtgcgcatccagcgccagcgccgcatcctcaagcagcgcctcaaggttcccccggcgctcaaccagttcacccgcaccctcgacaagaacctcggtatatatctacatctcagttcgttcatcatgtcggattgcacctggaacgctaattggccgaactggttaggtgttacaaatgtcatttccttgttaggtttgtaattgtagtgactagctgatgaatgtgtcttcagtttatgatgaccttttgggtgttctagtcgaacatagttatctcaaattaatgctggctgtgtcggtattcttgttggcatggtagctctctgtccaaattttattctaggatagaatgttaaccctgtgtcaaaagtggtgcttttaagaatggaaaattgctaaagcagactattgaagttttgctgcagtatatggtggttgtcagtttttatcatgtttctgtttgtttatcactatgattagactcaacgctgtctcttcaacaccattgttatgtaggatcgtgttatcaatttcttagttgttaccatttcaaaaatgaagcaaggaaactcatctgttaaattgttaatttgtgttgaggaattaatggcataaaaaatatctgatgtaaatctttatttgcagcaaccaacctgtttaagatgcttctcaagtaccgccctgaggacaaggctgccaagaaggagaggcttttgaagagggcccaggctgaggctgaagggaaaaccgttgaggccaagaagccaattgttgtgaagtatggtcttaaccacgtgacttacctcattgagcaggtacaggagcttgttaatgtgttcatttctttgttagtcactcatcaaggagacttattcatgggaacatataatcaagcactttactgataatttgaatgcttctcgcgcagagcaaggcccagctggttgtcatcgctcatgatgttgatccaattgagctggttgtgtggcttccagccctgtgtaggaagatggaggtcccttactgcatcgttaagggcaaagctcgccttggatcggtatatttcctgactctccatactcaaattgaatgtacttattgaaagtatagatgctagtagaaagcggagctcaaccttcgcaaatgatcatatgcagattgttcacaagaagactgcatctgttctgtgcttgaccactgtcaagaacgaggacaagcttgagttcagcaagatcttggaggccatcaaggtaagaaaccacggcatcccttgttctctcattcatgatcatcatgttatccagtgctctgctctttagcctcattgctaactcggtgaaccataactttgtaggcgaacttcaacgacaagttcgacgaggtcaggaagaagtggggaggcggcgtcatgggctccaagtcgcaggcgaagaccaaggccagggaaaagcttctcgctaaggaggccgcccagcggatgacctaaattatattcgccccccgccgttgagctcgccctgtagtttcatttttcagtgtaatgattttgacgaggaactcagttagcaccatgcgacagtgctgtggttttctgaagtctagtttcatatattttctgttcaccggaccatgttgggaaactatgcaagatatcagagctttacaatgtttggtttctacgcagtttatgctgtgtgttttgctactcgtttgtttgccttggctgaacctgaacatagggcttgatcactttgatgccattttcagccttatcaaattttggtaaagttacctaaaaaaaagtggatatatttagtttgctgcctaattttggtaatgttaaattttggtaaggttttttttcatcaaagtaaatagccccataaagttcatttcacagccttacagccatttaatttaagcaaaattatgaaagctaacatgttatttttttaattttttgtaatgtcgaaagttcttggtagttttgcattagttgaaagtcaaagtcatacgaaaaatgtcaattttgatggatatacataaatctaagatgcgagctcgcaaaaaattccgaaaccgtaagtttatattgggctagtagtaactctagattaggcctagcccaatttggacagttggcccaagattttacttggagctcaattatggaataagttcaccggagatccctcaacttaacagcgagattttttgagatctcttaaccacaaaaccagaaatcttcacctctaaactatacaaaaccgttcactcaaggtccctaggcagtatatatgagtggtttcgctgacgtggcatcctagttagccaaaaaaatttttttcttctcttttcttctccttctcttttctctcttctctatttctcttctttagtgagagaggccagcggcaggcgcgcttctccttctcttctcttttctctcttctctatttctcttcttcagtgagggaggccggtggcaggcggagcaacgcacgcagatgcgggtggcgcagcagagggcaagcgccagcggagcggcggcgggcgcaagcgcggcaggccgagcagtggagcgcgagcacgaccgcgggcagagaagcggagggcgagcgcggcggcgggtggagcggtggagggcgagcatggcagcggagcggaggtgggcgagcacggaggcgcatccagcccaccccaaccgaccaaagcacaccctttgccctcggccataagccccgccgccaagtcgccgtcgccgtcctcctcgtcgtcgtcgagcggcagcgatgacttcgcggtgctcctcgacgcggagctcaagctcacctccgccgctgactcgacctccgccggagacacctccgccgcaaacgacgacttcgaggaagacccctcccagccttccctccttcctcctcgagctccctcacgccggcgcccacgctgcagggatgggaagctaacagtgctggtcgtcgtggtcagctcgcttgccgcggcaacgctggtcccggcgctaaccggctgatgcgtctgcggatcgatgccctggctcatgagcttgcgcttgatgtgcgtgttccacctgcagaaccaatcaatcagcaccaagaacacaagaagagctaaccggagcagatgacaacacattgaaatttgttttgcttacttgttgccgagaagggcatggagcttgatggtgagctcgtagtcgtcgtcgatgaaagttgctgcacttgaggtcggggctaaggtagttcatccagtggaggnnnnnnnnnnnnnnnnnnnnnagcagcaccatcgccttggggagggagagagggtcgacagggagagcgcgccgctcgtcgggcggcggcggggcccgtggtcgagcacccagcacattcgaacatctccgccgccgagctcaccgttgcgccgaccgccatctctcttccgctcccgccgccgccatcgcatcgaccacctctctcttcctctccgccgccgccgtccccgctccccgccgaccacctctctccccccggtcgccgcgcttgctcgagactcgagagaactcggagagaagagaagagaaaaagaaaaaaatacaaagaaatgtgagacccacaccattgtctcacttacatgtgggccacacatattaattttaatttttttttgctggctaggatgccacgtcagtaaaaccacccgtatatactgcctagggaccttgagtgaacggttttgtatagtttaggggtggagatttctggttttgtggttaagggactttaaaaaatctcggtgtaaagttgagggacggccgatgaacttattccctcaattatttcccggcccattatacgcatcagcttgtcaccggcaggtgggcctgggtcccgtgtccccacgtgctcctcactcgcttctcgccacaaagtccaaaaagcccacgagatcaagccgttaatccaacgtaaagacaagttcccgtgctctctaatttcctcttcttctgatctcgcaaacaagaaatccccgggaaaagagaagcggcgggacaagatcgccagagattccacggacggacccaaggtgagcaagctcgatccatccccatcaatgcctgctcggttcgatctcgctacttctggattgcgccgggcgcgtgtcgctggtcgaatcagccggttttttgggtggaaagattacgacttactagtttggtttcttgtttaagatttgtgttcttgggaggaggcggagctactcaggcttgctgggagattgctcgttgtttgtttctgttactgcggttcgatgcgccgtttgtgattcgcgtgttcgttactggattttgcttccgtggatggcggacaaagggcatatcgcgccgattcttggagagttctctagatctggcgggaatgctcggctccttgatttgccactgctcttatgccccaattagatgggaggttttagctcttaccctaggaggatttgtgcatctgttgcctgctacagttaggtcatgggaagtgcgtacttcttcagtgatgtgggaattttacttgtgcgtctaatagtgagaatgagacaaataatttgtgtgtatgtgctaattcacgtgatttttagtaattctacctttgtattttgtctctgcattgtcgtagggagtgagtcagtgagctatttcttgaataccgcactatctacctgctgcttgaatttgaaccctttaataactactccctctatcccataatataaggcgcatacacatttcaagattcaacatttaaaacatttaaccaacacttagtataatattaaatgaattttatttgttaaaaaatatatcattagattgaaatttaaattactttcatatggttataattttgttgctacacttagtataatattaaatgaattttatttgttaaaaaatatatcattagattgagatttaaattactttcatatggttataattttgttgctacaaaccttctaggatatgagaaattataagttaactttgaccatgccttatattatgggatagagggagtatatagtatgtgaatttgggagactgcagttgtgtgttcttatttctcttaagctaataacctcactcgtctttttttgggtagaatgttacagctatttgatagtagttctgtaatcctatgttgatactgtctaaattctatggctttgtgtttcttgcagtaggacaatggaggggagtttgagattggggtttctgttggttctatgtatcttggccttcttgcgccctgctgcagctattcgcttcgtgatcgatagggaagagtgcttctctcataatgttgattatgaaggagatacagttcatgtatcctttgttgtgatcaaggcagagacgccatggcattataccgaggatggcgtggatcttgtggtatgatcttgtttttctttttcttacgtccaatcttcatccatgtaaatactccacaattgtagagtgtggtgagattcttgctttcattttttaataaggaacaatagctggctagatatttccgttcttgtagtctgataatgggcatggaggattgcatatggactccatgttttgtttgatgcttgcatgagcccttgagaactttccagttatgccgcatccaaaactgattcaactttgatatatggcaggttagagatcccaatggtaatcaaatccatgattcccgtgacaagatcagcgataagtttgaattcatagttcataggagaggcgttcaccgcttctgcttcaccaataaatccccataccatgaaactgtagattttgatgtacttgttagtcacttttcgtattatgaccagcatgccaaagatggtaagcatttttctggttttgttaaatttgtctagcaaggagcatgtggttgattcctttactctggaaatatgtagaacatttcagcgccttgtttgagcaaattgcaaagttggatgaagccctctacaacattcagtttgaacagcactggttggaggcccaaacagaccggcaagcaatatgtatgttcctcgtgtcttactctctcctttaaatactagtactttttcgaaattgtaatatgtgaagatctcttgttttcttttatcttgtaataaatagaacttatgagttgtagcaaatgctcaacttttctgtttctgtactaccgacaaactgtcctgccttaggagctccagccttttatgtcaacctttggaccagaccgccacacatgccacattaccaaacatcttgaaattgataaatatttgttacattgatgaacaacatgagaacacacaccatcttcttttctttttcttttttttccctttttttttgtaaatatcatgttctgtcaaaagcaaaatttacagtatctcataaacgtgttttgatgctaaaactgtaatactatatttgtctatctgatgcagtaaacgagaacatgagtaggagggcagttcacaaggcattctttgaatcagctgctctcattgcagccagtgttgtgcaggtctacctactgcatcgcctctttgagcgaaagctgggaacatcgagggtctaattctctgatagtaggtctccttagactcaccaacccaactgtatttcaatgctgcaaaatgtgtttacaatatctgttacatcctgctcagatatttagcatttttgttcagaattttgtaattcagttatttacagtactgtgctgcagtaacttgccgcctcatcagattcatttcagcgcattatatctatcgtcacatgtatattaggtcctaagtatttccacggtacgcactgctttaaaaccttttttgcgatcaaggtacaggagtgctagtattgagaaagaaaatgaagaaagaattccttttctgacaaagactcctaaacttcagctcatcagcattctactttagtttcacaatttcagaatccatatttcgatgataaccatttagtatgaagtattcaacgtttattgagcctgtattatttctgtatttagctgtctggaggtagaaaagctcagacgataccaaatccaaggagatgacaccaaattggtttcttgctaacatcacaccatctgattaggatacagttggaagccatgtgcagtctggttggtcctaaattcttttgctgactggattttttcgtgttatggataatgatttcacaaataatgattggcactactgcttgagccgataagcataacaactctggtattcgcatttcaatgtccagtttggttggtacatggagtcactgacaatcgagtttggaatctctgaccaaacataacagccgcccgtgacacgtatcaacatcaaggatgataaccaataatcttgaatttttcagtaaattctgcctgaagcactgtactttgtaaagttgcatttcagatatcagcacttgttctctgaatcagttgtaactttgtcagtaatttagtagcctgaagccctgtactttgtaaagttgcatttcagatacacgaaatcaggcatcagcatttgttctttgaatcagttctaaacctgtgaaaccttttcatgagtgtgtgagctccaccagaacactacctcactgttcatccacagttcatgctgctgttattaagctcaacaaaaaccttgatgcagtgatgattgcatagtttcaagggacaaggccatcagtctctggatgaatctgaggctgaaaaccgggtcaagttttgtcatggttcaagagaaacgaatgccattgtttgttcagtttaaatcttagcttttacagaacaaatcctaccaaaatgtacacaaattcataaatattacaaacttgttattagattttataaacttattctgatataaaattgatggttggaattataaatatttcgattgaatcatatcctaaacaatcatatcataaacatcaaatatttaggcctgtttagattctaatttttttcttcaaacttttaacttttctgtcacatcgaactttattacgcacacaaacttttaacttttccatcacatcgttctaatttcttcaaacttccaattttaacgtggaactaaacacagccttatatcggaggaagtagttagctaacaccaccttgcaatttaattaatactatacaattatcatcaacaaaaagctcttccacctttcactcttccccactgcccaccactgtactgtacccccaccattcctgtctcttctcttcttcactccactccactccactccactcctctcccccatttggccactagcttaatccctcctcccccattggaaggaaggacaagctcgaggagctcctcctccatggagcgacgtggtagcctgtacggcgtcgcggcggcggcggcggtggtggtggtggtggcaatggcggcggcggccggcggcgaggcggcgaggctgtcgccggagcactaccggtcgacgtgccccggcgtggagtccgtcgtgcggtcggtggtggcgaggaaggtgaaggagaccttcgtcaccgtcccggccacgctccgcctcttcttccacgactgcttcgtcgaggtgagcagcggcggctggcactgacccaaccaaccctcgtgttcttgattcagatttcaaaccggaattggaggcgtcagagtttcagagtcgcacttgcaccctcagattttctggttctaggtttcttgatttctttcgtaattgatagcctcggtttgatttcggcgagtagttagctttgcatttggcatttgaaaatccttgcaaaattttcgcagcttttgcagcttcagagctgcttgtgatgcactgaatttttcagcattactctgcattaggcatttgcatacttgcaaagcttacaaacttttcagctgctttcctgatgcattcaggattcagcttagcagcatgagcagcatgagggtctctgaattttcagcattaatctacatttaattgcatcagagatcatgtcaaaatttggtttgttagtctcagggaaaggagagaaaagctacttcctccgtttcacaatataagtcattttaactttcctcatattcatattcatgttaatgaatctagataaatatatatatgtctagattcattaatatcaatataaatgtaggaaatgatagaatgacttgcattatgaaacggagggagtagtagtacgagataatgagagattaacagtagattaatggtacgaaatggcaactggattagctccaaatcacgcactcgtcgcttctgccatgtgactgcacgacccttttctgtcaactgggctgcgtaatcaaatgctcacgacagatgcttctctgaatccctgctggaataccaggcgccacgttgtcgtatccgatgtggcggacacggaattccgtgccgtccacgtcatcattcctcccatttcatgatgatttcatactccgggttatttagatcgatgtcatttcaaaccatatttttttataaagttgttaaatatatacttccatttatttctttatcaaactccagtaaatacataagaaatcatacaaaaatttgataatattgttaaaatttggtaaggtttattttggcttcagtttaaacagacctttaaatttttgataggtgtgcaaatgctttgatcactttgaaaattgaagttacgtacgttttcaattggcactgaaattattttgggggaattttaaccttttctgacaggggtgtgacgcgtcggtcatgatcgcgtcgcggggcaacgacgccgagaaggactcgccggacaacctgtcgctcgccggcgacggcttcgacacggtggtgcgcgccaaggcggcggtcgagaagaagtgccccggcgtggtctcctgcgccgacatcctcgccatcgccgccagggacgtcgtcgccatggtaaaccatcccatcaatcctcctcctcctgccatggcgaaagctttgctgcctctaacaaggtcgatcaatcaatcaatcaatggcgttgcagtcgtccggcccacgctggaccgtcgagcttggccggctagacggcctcgtctccaagtccggcggcgtcgccggcaagctgccaggcccggacatgcgcgtcaaggacctcgccgccatattcgccaagaacaacctcaccgtgctcgacatggtggcgctctccggcgcgcacaccgtcggcttcgcgcactgcacgcgcttcgccggccggctgtacggccgcgtcggcggcggcgtggacccgtcctacgacccggcgtacgcgcggcagctgatggcggcgtgcccgcgcgacgtcgcgccgaccatcgccgtcaacatggaccccatcaccccggccgccttcgacaacgcctactacgccaacctcgccggcggcctcggcctgttcacctccgaccaggagctctacaccgacgccgcgtcgcggccggcggtgaccggcttcgccaagaaccagacgctcttcttcgaggcgttcaaggaggccatggtcaagcttggcagggtcggagtcaagtccgggaagcatggagagatcagaagagactgcacagctttcaactgaacatagttgcatagctgcactgcgacatttgtaagttgtagcaattggggatttgatcgtatattaaaaatgaaatcatttcaaggtaagaatttcatactttctgttttcggtccagaagtcatggctgagtgatgaaagcgacaaaatgcctcttaagttaactctacaattaaattaaaattcaaaatagccacagctgaaaacaaccgaaaataatttttgatcgtttaagccacggatgataagctactcttgttgtttcaaattatttgtcgttttaggtttgttctaaaccaaacatatctatatttgactacaaatttttagaaaaccgtataagttaacaatacatgaattatatattatgaaaatatttctcatggtgaatctaaaaatataaatattgagatgttaaactatacgagtttatagaaattaatgattaaatataaaaattcttgacttagaacaaaccaagcaatttaaaacggatggtaaaaacaatttatggataaaaccttttattaccattcttaatagtttgaaaagccaatacccaaagataaacttcgatgcaaatatctgaatcaacactaaaatattttagttttaaaatttaaatgttagctacggttaataagttaacaacagtctctctctctctctttctgtctgcgcaacggcatgcgcaaatctgacgttcgcagccgcttgcctgacgttgatacgtgtagcttcagaaaacaaaactggcagagctttcttgtggtggtagggcaatggccactgcttgcttcctggggttgctctcctcttgctttcaagacccatacttttgacctaatcacccaaacctttccttgctgttgtctgaacacgggccatcttgggacctactcaacgcttccagcatgcatggacagttgccagtagcaatcagatgctactaaccattttcaggttcagatatcagaagatatacagagctttcagatcttgctgtcttaacaaggatccaggtgttaggtcatgtccagaatgcctgaattcataccgaaatactatcccgttctaaaatataagagatcttgaaagtgcaaatacattgccaaaatccctttatattaccgaatagttcaattatggcatgaatcaagaaaaatcctggttcccaaaacagagcccttgagacagagtaaccatcctaaccaaaacagaggcaacagagcagctccataagattggagacaatcagtctgacagtgccagttgagcaaaaacaagatacaaaccttgaaggaaaagaactctccaattctgaaacaattataggatagatgtaataaataataaaaccaaaccgttctttttccatatgtacaaagttttctgttaaagcttgccatcctaattataatatataaaaccatctaagcttgttgcggcgttacatggtaaaaatgttgtccgggaaggaaaagataggatggcaacaacgtaatgccgcccaaactcttctgcttgtatacacctccatgagaacctacttctcattcaacttcacatgtaggacatgaatggaggcttggaaaatatataccctgccagaagatacaatccaaagctcttgttatacgataacgttggaaataggtatgaatgcaataaagacaacaactcttaaaagcatgatagtgatgataatagtgatataggcatgatactgtttacagtcagtaggaccaagaaaggaattgcactgatatcatatttgaacttatttgggttgtaatagctgatcttgatggtgaacttaatacatccgcattaatttaccacagaaaattgatgtagaatactgttcgtttgtgaggaacaagcacatcaaggttggcagggaaattgaggttcagcttcacctgtattacacccatataaagtattttctaatttcaacaattaactagctatatcaatttttctagatgcattgacagtgaaatcttgaaaggtgaaaggaatacactaggtcaagcttaactaggctattctattcttcctgggaatctaagaaagctcttcttctcgattgtcactagttgcatttagttcctctcaagctcctttgttcctaagaaactcagcttgtatcccgtcgaaacgaacaaagttataaacttaagctttctggtctcctacttagcaagcacgaaagcgctcaggcatccatttcattgttatatggccctttttgactctatatgtttacagctcctttccccctttcagttcatatggtcggtgctcaccgacgcaatttagtcccttacgccctttcaatatcgaatttcatcaacctgaagctatagccagcctctctacatcaaattagagatccaaaacatttgagaatcatctggattgcatcgacaaccaccaattctgaccctttccacttcttaccatcgcgtcaattttattttaactacgacaacaagctgctcacattatttggaatgatgtcctcccgaactaaatcaacgcaacaatcctaataaaaccacaatttaaatacagaagctacacatatctcaattttcagagaagcacccaaagtatgacagatgcttcacaattgggcataatttaagcaaaggcgctcaatttagcgcattttgaactctgataaagccaagaaacaccaccaatcatcatatttaccccccaaattacgcatgaatccacagtgaattccccaatcctgactaacccaaacatgtaaaaagaggagcctcttcccttttgtccccaaacatgtaggagccctactcctaaacggccaagatcacgtacatgtggaggccaccttgggcgaggaggagcacgaggcgggccagaggatggccctccagatcacggacaggttggtgacgaacccgacgaggaggaagacgcaggcgaggccgatgacccagggcatgaggaagaaccccagcatgaaggtcaccgacccgcacagcatcagcgccaccgacgcccccagcagcatcgacgccacccccgccgccgtcacctgccgcggccacgccgccgccccccgcccgcccccttcctccggccacgcccggagcaccgtcagcagcagcgcgcacagctcgtacatcgccctcgactggtcagcctccgccgcctccgccgccgccgtcgccgacgacctcataccacccccaagaattcttcaagaatcgaattcaagaaatcaagaaccgatcgcctcctcggcggtggcgcaagaatcttggaggaggcgaattgggtcggagaaattggttgtcgggtcgggtttgcttctcgatcgctctctctctcgcgttggtggaattgaaatggcgagatgggggaggagagacatggggggagatgttgaaatagaggggggaatgggaaattgggaatgggcggagacgtctacgctacgagaggataatggtaggctggatttgtttattcggcagttatttccggtgttggcgtggataactgtgcaactgattggttgcgttggcggtcaaatttgcactagcacttgttgaatcacaacgtttcaagtttatggaaaacacctcaaaatttgtactccatgctcgtaaaggaagtcgtttagaacagcaatacggtcttcaaaacacaactttaactttttgtttctataaaaatatttattcaaaaagtgatatatttatacttttataaaagtatttttcaagaaaaatctatacatataatttttacattttcaaattcaacaacttgagagttattcatgatttatatttctaaggtttgatttaaacattgtcctaaacgacttcctttatgagtacggagggagtacttctttctctgtcccaaaactacttcaaagtttattgtaatattttaagacaaatgaagtatactatcttcgattataaatattttatgtttggagtaagacacggtcggacttttgataaaacgttgacgatcattagtttctaaatcactattttttaaaaaaaatgatatgaaccgatttggcatgaaaaatattattatagtactatgggtttattggatctgcgagtttattataacatgaattgaatgtcgaggtttcagaaatttaaccacctctcttctcttatggtactccctttggtttaaaatttatggatgttttggacagaatatcacgtactactccctcctgtgccaaatgagttgacgttttgaggcttaaaaatattataatagtactatagatttattgaacatgtgaataccactctcctatatatagtgctccctccgattttaaaattattgatgttttgggacagaaatctcacatatcaaggaatgattaattgtgacgcttctctccggtgtcaaattagttaacgtttggacttgggaggcttgaaatatattataatagtactatagatttattgaacctgtgaataccactctcctatatatggtgtccccctccgattttaaaattattgatgttctgggacaaaaatctcacgtattaagaaatgattaattgtgacgctactccctccggtgtcaaattagttaaaggcttgaaatatatttcaatagtactatatatatttattggacatccaaatttattataatgaaattgaatctcaaggttcataaatctaaccacctctcttatatatggtactccctaattattgatgttttggataaaatctcacaatgccaaggaatgattaattgtgatcctactcactcggtgtcaaattagttgaagtttggaggcttgaaaaatattataatagtattgtggatttattggacctgcgaataccactctcctatatatggtgctcacctccagttttaaaattattgagatttttggacaaaaatctcacgtatcaagaaatgattaattgtgacgctactccctccggtgccaaattagttgatgtttggaggcttgaaatatattataatagtactatagatttattggacatgcgaatttattataatatgaaattgaatgtcaaggtttcataaatttaatcacctctcttatatatgtactccctccagtttcaaaactatttgatattttggacagaatctcatataccaaggaatgattaattgtaatgctacacctccgatgtcaatttagttgaagttggaggcttgaaaaaaacattctaatagtactatagatttattggacttgcgaatttattaaaatatgaaattgaatgtcagaaattcaaccacctctcttatggtactccctccggttttaaagttattgatgttttcgacagaatctcacgtaccaaggaatgatttgtgatatgctactctctccggtgtcaaattaattgatattttgaggcttgcaagatattacagcagtataatatagatttatttggacctgcaaaattattatgatatgaaattgaatgtcaaggcatcataaatttaaccacctctcttatgtatggtactacctcctgtttaaaattattgatttttttttgacataatctcactatcaaggatattatatttgttttttatgggacggaagaagtagatcgcggtttacaaggaaaatgctggcacaggtcttaattaattagtggtatctcctgttctctgcaccctttggtaattttgacgacgcagtgttatgcacaaaacacgtggtgatatggtgcatgtgcattattatcaatcgtctctattcttcatttcagagatggcttgctcattcgtgtttcggacagtacgcaactccctccaattttttttttaaatctagcattataacggatgaagtaacaggaattataagctaatacacagcaaagatctgccgaagtgcattgtttttttttacaaaaaatacttatatattctaagagttaagtgtacgaacgggctataaacttgtgtgcagatatattatctagatctctaaattcttaaaatatattttcaaattatcaaacttgttttggatataatatatgatcaaatgagctttatcctactccatacggtgatgtagcatgtcatggtgacttttacagatcattagtattttttaaaaaaaaaacatgtttttctccttttaggtagagaggacaaaagataaaataaaaaaatattgaaaaaaattaaggtggagaggagaaagctaaggcgagaaaagataaaattaagaaaatactattaacgcatagctaggcatcactttgatatgtcacgtttagtatatcacgtcagctcatgaagtagagtgggttggaattcgtttgaatctatatcgacgtcgcaccgaagacaagttcagaaactcggaaatgtattctgaaggtttaagcatctagctagatgatatacttagggaccgtccttgtctaatataatctaattaatatatgatctaaacgtgcaacgcgagggttggagttgttaccatctcgatctatggtagtgttacagaatgcaagctggagcactgattgcgatcgaggtacgttgtttataatataatgtaccccgatctagcttgattctcttgtccttgttgcaacgtgttacacgcgaggaagtcccattcggtttgagacaacgatgatgagaggagacagtagcagcaggtacgcgaggaaatcgtgggcgacgacgtacgtacgggtgccgccgtgcattaatggctgcgacatattgtactacctccgtcaaaaaaaaaaaaaccgggtttccgtgtccaacgtttcaccgtctgtttaattttaaaaaattatgaaaaaaaaataaaaagacaaatcacgcataaagtattaatcatgttttatcatctaacaacaataaaaatactaattataaaaaaaatttcatataagacggacaatcaaacattggacaccgaaacctaaggtttgtctttttttggacagagggagtagtagtagtatcgttctagatagtgctatatattgagcaagtttaatagtatagccaactattagctctagttcatctatagccaatttaatagcttatttatacaatagttatatactacactattaatatatggtcccacatctcatacacacacaatgtattagagtctgtgctgcagctggctacaaatctgaagctcgctttccttctttctctactgcacatgtgcttacaggtgacttgtagcttgctactgtactcgctcttaggttgtacaaatagtcaccacaggattagtttccgggcaatccggggcaacgcaaactgtgaaccgcgctggatgtgtacgtcgttgttgcttgcacatggtgataacatgggcatactttgaactcgggttgcacgtactgagagcatataagtgggtcgatccgtgaatctacttatagcctcaacgtaccgatttggtacaactcgtcaggaacgctacgttcacgccaaccccgcatttcgatcagcttgtagccttgtatcctcgacgtaccgatttggtacaactcgtcaggaacgctactttcatgccaaccctgcatttcgatcagcttgtagccttgtagcctcaacgtaccgatttggtacaactcatcaggaacactacgttcgcggcaaccctgcattttgatcagcttggtgacgaaagcgtgcgtttacgacggttgtgttcggtagtttgagttgggaactaattaattcctctcacatgtaaaagggaataactcattagtttatgattaattaagtattagataattgtttttaaacatagattaatataattttttaaaacatatttttaaaaaaaatacaaggttggcaatttgaaaagcgtgtgtgcataaacgagagaatagagttgagaacttagtgcctcttagatttgcatgaataatgtaggatttttggaaaattctaatcctatggaaaaaaattcttatgaaaggcatttaaataaaggattgtatcctatcatatcatttaaaattccttttgagtctttgtctcttattcaattcctataattttttatgtagttcaatcaaacggttattcttattttttttataatactctattttacaattacatttctactagaatcatattcttttattcctattttttttataattcttatgattcaaggggactttagggggtgtttgggaactagggactaaatttagtctctcgacttatatttttgtgagagggactaaagtttagtcccaatttagcccctccaaccaaacaccaccttagactcccagacacagccgaacttgccaatttgggaaggctgccgtctgtaggaattaactgccgtccaaaaccgcagatcgatgtcagtgtttggtgatggtctcgttgtctgaactctgaactctgaagccgcggccgccggtctcggtctccagacatgtgggttcccgccggagaaagtgcaaactgattctagtgcttgtcgcgaagcgtgccatggcgagcgagctcgtcggagacgacgaggcagccgtcgtcgtcgtcggccgccgcacgcacgcaatcccgttccggcccaactaatgattagccggctgccggcccaatcgacatgggccgtatggcccgagttactgtttgctccatcggcccggcccaagctagcaatcccatatgggcccgagttgcgtccgatctatatatcgtgcggcgaagatcaaagggggttaactgcaaaaatacgcacgggctggccctacgttttgatggcagttttagtgcagatgaagtggatgattcttggattcagatttgtttcatcgagccacctgaagcgatgcacaatccagcttggagatgaagtctatctgttggagttttgcctcgaaatcgcacggggagtaacatcctgattgcactctgttttcaccataaacattggggaaatttgaagcagtgtcttatattttcgaaagatcaatgagaatgcttacggttttaattttttcgcttatgcttatacttatcagtcatgattttttttggcaagaatattaaacaaacggaagatcccttattcttagggcataatatgtagtgtttggttcgaccagtccgatcaaccagccaaacaaaacttcagtttagtaactgcagtattacaatcgatttgtgggaccagcaaaaaagaatcggccaatcactagtctgtccttcatgcatgcatacacaacaaataattttttactcgttccattcgattctaattcgaagttcaatttgtcctctgataaatacgattcgacagctacaaatatacattgttcaatatacattaaaattgatttaatgttcacactgaagatgctcttattcaatattaaaacaattgaccaatgtggtcactatgtttacaaaattaatgaaaacaaacttcccaaatcccaacccttatagtaatgttttgacacatgatgactaagctgttggacgttcgtcaccatgaagtataagaacaacaagtttttagtagttttttttttttggataacacaagtttttagtagtgatggcccttggtgcggccgcaccccatgatggacgccggcagccgcggcagcacgtcgacgccctcctcgaacaccacgcccatgcccatgtacacgtgggcctccaggtggcagtggaacagccacacgcccgggttgctcgccctgaacctcaccgccgtccaccccatcgggtgcagcgccaccgtgttcttcatcacggcgccgcccctcgcgctcgccgcgttcagacccggcccgtccacctccggcacgaacttgccctcgccgtagccgagcacccagaagtcgtgcccgtggaggtgccacgggtgcgtctcgctccgcccgttcggcggcgggatcgccgtgttctgcagcaccacgtcgaccaccgagcccagggcgaggcggtacgcggcgtggcgcacggcgaggctcgccggcggggaggagaggttgaggctcccgtggtcgtagctgtccggcggcggccgctggtcgaactcgccgcggaggccgtgcttcatggcgacgaggtacggcgtcgccgggaagctgagggagacgccgttgatggcccacttggtgtggttgtcgatcttgctctgcgtgttgaggaggaggagaacgcggtcgggcctcgccggcggcggctcgacgtgccccggcagcgcgcgaacgacctgctctgcgccaccctgctcgccgtgtcgttccaccgtggcccggtcggcggcggcgtgcgcgggtgatccacggcgcggaggcgtacctgacgacggccctgcccggcgccgtcttggtggggtcgcggctgacgacgtgcgacgccgcccagtagctccgggacgggtcctggtcggcggtgacgagcacggagtaggtctcgccggagtagatgaagaggttcttgaccaccaccggcgtgacgtagtacccgtcggcctccaccaccgtcatcgtgtgcccctcgatctcgaagctcagcgacgccagcgacgtcaggctgccgatgcggaggcggtacgtcttccccggcgaggcggtgaacagcgtcggccacccgcactcgccgccaaacgcattgcacgccgcgccaccgccattgctggccgccggcggcgagcagttgaacacgcctctgccgttgatcagaagcgactggggctcgccgacgaacaccatggggacggaggcgaggccgacggcttgctcgtacacgctctggtgccaccagtccatgaggaggacggtgtgctcgccgtcgtaggcgaagggctcggcgacgccgtcgggcaccgacacgacgagcatgccgtccagccccgccacgcgctgcatgccgtagtgcgcgtggtacatgtacgttccaggctgaaaccatcacaaaaacacccagaaaatcaatcaaaatttgctcatccaaccatccaagcaaagaactaagcatcgatcgatcattgcacgtactccctccgttttagattataagacgtttgaccaagtttattaaaaaaatagtaataattttaaaccaagataaatttattataaaatataattaattattaatttcataaaactaatttggtaatgtaaatattactatatttacttataaaattagttaaatttgaagcagttaaaacatcttgtaatctgaaactgagggagtagctgcttaccctgtcaacgacgaatctgtaggtgaaggtctcgccggggaggatggggcactgcgtgacgccggcggtgccgtcagcccacgggctgccaatctgcgacgacacattgccgttagaacaatacccacacggacgaacacatgatcgccggcgagccggcgacggcgagggggatggaacgaagatgaagaatgacctggcggatgccgtgccagtggatggcggtgttctcggtgtcgagcatgttgtggacggtgacgacgagggtgtcgccctgggcggcgcggatggtcggcccgggggactcgccgttgatggtcacggcgagcttcctgaagcagtccggcgacttgtactggtacgtgatgttccacgtgtggtggtgcgtcttcgcctccgccggcgccgccgccgcggcggcgcacaggcacgccagcacggcgagccgccacgtcctcatcaccgcgcacaaagctgacgatcgagctcaaggattgggattttgcgacggatcagaggcttggaaatgatcggtttcgtgagcaatcggcgaggtgtgtgtgtgtgcgcgctttgtgctttgcactgctctgcctcgaggcatcgagtggatttatatagtttacgcgcgtcaaagtgggtgtgattttgcgcgcgcgttcataactgggggctggggctttactaccaggtcaagcatgaagcagctacagagctcaggttgaagcgttcgacggtgggccgggccgtggctcgtgtgcgcgtgtgggggcatggtacttcgtcagatcataagcgtgtgcgtggctgtgttcgctagtttcgtttcagttgggaacatctcccatgaaaacggagcggtacataagcgcgtgactaattaagtattggtaatttttttaaaaaaatggattaatttgtttttaaaaataactttcatatataatttttttaaaagaaaaacacactatttagcattttgaaaagcgtgcgcgcgaaaaacgggagagggggagttgggaacatgagggaaagaacacagtcaagtgggagtatctgatatttagcataagattttatcaagatcttgaaacattgactatcaatagtttgtcaattaatagtttgtcaataaacgttggcatacgtttaaaattaaacagaatattaagtactagtagttttataaactttaggctccacttgaatcactggaatgaaaaaaacggagaaataaaaaaaacacatgtttctaataagaatataagtgcaaaacaaaggactaccgaacgtagaaaaaacacagaaataaccatttgattagaccgcaggaaatacaagaatcgaatgagagagatataatcgaagaaagttttcaagaggttggagctcttgctaaatttcctccaaaatcattatttactccataggatttttgaaggataggatataattcaatcatttgtttcaaagaaattttcctacaagattaattttttaaaaaatttctctgttttatatctaaattaaatgggcccttattctattagacagatgaagttagagtgagtatatcgtgtcctaatgaacattaattagtagtaatcctatatatttctttatacttatatacgttgctcacttagtgcaattcataaatactatttctcttttttcttataaagccacattactttaatactagtttctaatacttatatgattaattaatgatcttaattgtgttcctctttttacaaaagatacatcgtctcaattatttgtagacttagcatggtcaacctatggatcatattgtctcttgtctcttataaacaacatcatctggatcaactattctaccgttcttaataatagatcaaagatgcatattccgtaacaacgcgtagtatctagcatttccatatactaattcgcggtgatgatttccatgacaaaatatcatgtttatttcgaggagtgtggtcaacgaagcgtagctctactagggtttcataaatgctacttcccctccgtcaaaatatattaactttacaatttatcttaaatagagcgtttacctactcacttatctcaatcaaatatagccatttctcatttaaatctacgtatagaagctcaaaagtgctttatattttttggacaggaagaaaagatagtactacttagggcacccacaatggttatctataaactctctacaagagatccatgtcagcatattttcctacttggaagagatgaaaaaagagagcaaagctatctactaatgtgaagatagtctatagagaaaaacgaggcaatatattagagagctatagatacccaagtagacatactattaaggtggtttactattaatctagtctattgctgagatgtacatgttttacagagagcaccttactttactattgcgggtgctcttatgttttatattataaatcgttttgacttttttcctagtcaaactttttttttacgtttgactagatttgtagaaaaatataatagtatttttaccacaaaacaaacatattatcaaaatatattcaaatgctagatttaatgaaactaatttgacgtttaaaatgttacttttcttctataaaacctagtcaaatttaacaatgtttgacttagaaaaagtcgaagcgaattataatatgaaatgaagggactagtactttgtatgttttaaattacttgtcgttctaccatttaaaagttatgccaaaacacttgtcattctcatattccaaatcactttttaaatgcttttttcttcttacctttctctaacacaaccatgctagtagtagtctcttataaggaattctaattcttactttgaaaacatgattaatatgtaattaagaagaattgcaatgtaatttgctatgacttcgtacgattttctggaacgacaagtccaaattaaaacataaaacggaggaagtataaatatatatacacgcttcgttatgcaaactagtactaataagcaaactaccattaatgcatttggcgtttgaattaatactacgagttgtacccgttgtctatcagtggagattgtctacagtagcagccactgacatgtaggatcgggttcacctatcagccactgctactgcaaatgtagtactgcgaagatccatgtccgttgtctatgcgtgtcgtgcctgctctgctctttaattggtaaaaagtattggttagggctgaatgcaaaatgcatgtactcctggtcctggacgcatgcttaacgaagacgagatccagtcgaagccatctttaaaaaaaatgaaccatatatatgaataaaaagcaaatcactcaagttgaaatgcctgcatctacattttcgctcgtacgttcgcaatcacagtttcgggtcaactaactatctgcgactcggacaagtacgactgcttgacagcccaactacctgggctacttgcatgtttcttttccttaattttcatgcagaccagcatgctcaatttatgtacaacgacagctatttttttagacaatgatgtacaacaactaatcagttaacctaatactcctatatataaagaacctagaatgcacatgagcatggtaattaaacctcgacattttattatatttgacacactggatatatagtcaataaactttaccgcaaattatgaaatgtacaggcactgcactgtaccatacgtagtttttgtgcagcatataaccataggctgtcacgtacggccttttataccacatactagtccttgaacgcttaataataattaaaagtgcgtgcatcacatcagaaaagtttcaacacgctagcacacaaacacggaattactagtctcactcttgtaggagaagatcaatctaatggtgcgacttgatctgtgtcgtcacatccgtttttattggttgtcgcatcggccttcaggagttcagggtagccatgtcggcatgaaggcagtcacgcatgagttgttcatctgctctggagtaaacctacgaagagaatcaaattgtgttaagggtgtgtttagttcacgccaaaattagaagtttggttgaaattggaacgatgtgacagaaaagttgaaagtttatatgtgtagaaaagttttaatgtgatagaaaagttgaaagtttgaagaaaaattttggaactaaactcggcccaagttcatgtgtagagagcattccatacctttttttagcacagaataaaatagatacgcacgattgagtggacctccttagtaatctagtaaggctagaaaaacaccattcatatctcttaagcatgtgttaaaaaagcttactcacggatgtatgcgtgagtgggtgtacgcgcgtgtgtagtggtatatatgtgtacgtgcaagcttttcccgtaataatgaaaaaattaaactggatacacaattggtttcaagaactaatgagatcagagaaacgatcatgaagctgaaatgagtaacatgcattttatacccgatctgcaaggtgggctcggcggcagcttccagggaatggaagaatccgttgccaccgtgcggtggcacctgctggacggcatgaggcgactgccgctcgtagccgagtagggtggcgccgtgctcccacacttgtccatgcaactggttgctctcctccagcttttcctcgcaaacgaatcaaacattagtagtgctcgttattcttttctcacttgtgtttttttttttcatttcacagcatcattttggttatttcacagagctacgtaagcaggcgttagccaggagatatatatatatccgaggaagagatgccaggaaaacggacctaaatgcctaaatcgcaaccgaaaacagtgtgacctcgtcttgatcaattgttaatatgcattgcttacgtgtgagagatccttatgttaattaatatgcgcagttgaagtaatatgctgtctacgaagcttcatgtacgtattcgttatgtagaaataaccaataccaaatgttcttttgtaatatatacaattcatcctacaaactaatatgcatcaacgtacacaaacttgtccagtttctgttatacgcccttacaaaccatattttatatgttcacatgtttgtaagtttatgtggaaggaatatataaagtgctaactaaacactgatgttaacatctacacattgaattcctgatcagattaaatttagtactacatggatgcggggctttgattttgaacaagcacacataaaagtgaagtgtataaattacttttaaaaccacatacttagttcatgcagaatcttaagatcaagtaaatgcatgaaacttaaacgggacaaggaattaaacttacttttcttctgaggcacttatttgcttcacacaacatttgttcctgaaaatgatttaggtatataaagttagttttggaaataataaattttcttgcctgaaatacatagttggtaagttttatgtcaagcttgtaccctcctctggagatcagtgagctgatcaagcatatgctgtgtctgcaacaagattagagttaaatttttttcaacatttctgaaacatatgtgagaaacagttaacaaattacccttgtggatctaatgtgcctcaaggatgaatcaagttgtttctcaagctgctctagctcttttatgccaagtgtcccaagatcttcaccaagaagattcctgtaattgtcaacagaaagatctactaagttaggctgtatttagttccacactaaaattgaaagtttgaagaaattggaacgatgtgaacaaaaaagttggaagtttgtgtgtgtaggaaaattcgatgtgacgaaaaagttaaaagtttgaaaaaaaagttggaatctaaacggggccttagttctgtatattttacactgtgattgatgcatgcatctaattctctaagcaacttcagtatatactactgcacgcatctaattctctaagctagttctccctgagattactgttttaccacttgtaaaccctatataatagagacggcggtaggaccttcattggttcacatatattacttcactcttgttaacactagtcatatgtgttttttccatgcaatatagttttttttttcacccaaatggccaaaaagtatctagtgtacacataattgttcttgccccaatacacaataatttatctactttgcatatatatgaatgaaaccaattaactgtgctccatttcgtctttgataaaattgaactcataagtggaagcctgatattacctttgggtcctctgtaaattttccacccgtgccttcagtttgaggtactcattgcggctgctttgcactaactgaaaaataaatttaacttcagtacaaagaaataggaaacaatttagagattctatgtgaaaacaaaataatataatttcacatgcaaaattaggcttatgaatgaacaatttattagaaaacagtgatattaattcatgaatccatctatcatatcatggtcaataaccagtgactaggagcttttctgttttatattcagatctacatactagacatttcagctagcacaaattagagttgtaaatcagtgttattacatgtggaaacacaacaacaatactcattctagttatagcactctttcatatgcaaccttttgcagtgctctcatttttcattaaattttgagtcttgtagcaacatcacatacattaagaagcacagcgaatatattaaattaagacttcatttttaattgtactattcaacacgtgtatatagttggtaattaatgataatactaaaagcagcatatctaggatcaatcaattaaactgcatgaatcgaattgttgaagtattatccagtgagacacagatcgattaatcagaacacaaagctagtctatgcatcaacttaaatccataaaagcttgtcataactcactaaaaattaaaatatattaatagaatctagtaacctcattttccttgttctgtattgcagtatctggcccaccataactgaatttttggtatctttccaaagttctggtcatgctgcaagtttcaaaaacacaaatggctatgtttatggaaaaacgaaataaaggaacatatatagttcgcccataactaaatactaacaatctagggcacattcttttccggggaccacatcgattaattagtagatgaaaaatcttgtttctcacaaaacatgaacattagctccatgacacggatgaaggtgcttgcataattggagacaatttctaagaaacaataacgttttatcttaattcttgcatcggtagtttcaagttgatttataattttatatatgtccatgatatcaacctagaggccactttttgtaaagaaaatggagtacactctttaaagagagatatcaagttcagacgacacacaatgaaatggcataacttcacgcagactactactacagctataatgctcacccccccccctctaccgcgtcaatttagtgaccttttggctgtgtttagttcaacgcaaagtttagattttggttgaaattggagatgatatgactaaaatgttgtgtgtatatgacaggttgatgtaatggaaaaggactgaagtttggatccaaacacagcctttgtttaaacaagtcgtgaattcagatttctgaaaaggatctacagtacacgttgagtatcaatttgtcggcataaaatactccactgaactagctctagctagaactagaagagacatctgatgaagaccaatcttctgtactgacagctcagctacgagagctgaggagaccaatcgaatgacaatcgaaagctgtcactaactgtaccctgcagatactcaagtgagtcctaggaatattgtgtactcccttgcaggatttcttccgaggagcagaggagggatgtttcactcaccccatatccaaattgaattccctggtcaatgaaatcatgtactcttatttgtgaatatatttaatgttagaattttataggcgtattaattttaatttagtaacttaggtataatggaaaccatttaaacataactataaaaattggcaagcatgtactccctccataaaaaaagaaaaagaatgctaaagtccccatatacttacggctgattataagccataacggcttattagcaaccaaaatataatttgtgagtaaaattgtatatgtgtctttagcgaattaaaagttaatgctgaaaaacaatctacattgacaaaacattaaaaatcaacttctaaatcaagtttcgaaattcaaaatttgatattggcttataattcatagggtaaaagatgaggccctaacttctagctataaatctggacatagcctatatatgtccaggtttggcaaaaaagttggttttttctgcaacggagcatataataatgtaatcattatctaaaatatataatgatgtaatattcactatagaagatattattaaaatgatcagtgcaatacaatgagcaagaaaatttaaccttctaaagtttggaaaatgtatgattcaaatatgaaatgaagctcatgaatgcctgacttatctaccctaactaattgtttatctctaaacacaataccaaatgttttcttccccccgaaaaaaaatgttttctaattcaaaatcaattcaactagcttatatgcggcttgtgaattatgcctagccaatcagacgctctgtgtttctgaaagacaattatatatatagtagtatatgatttttcatatacttatctcaggagaaacagactttatatttattgatgttgcctttaatgatgcaaccataactcacttgaaaaacaatactcccccgcggccatcccttaaaaaaacaaagagacaaaatcttaagtgaaacccccaaatcttgtaaggtatgctgcctccaaaccgtggaattcatgcagtgaacgtttgtttagacacacatccggtacatggctaatgatatgcatgatcccttcacacaccccccccccccaaaaaaaaaaaatcatatataccctaaaaaaaattgcccctcaaaaaactaaaaattgaggaaaaaaacagatcccaagggaattcgaaactcgcataccctccattaggagatcgataaaattaagattcgaagcttccaacgattaattttctccgtaaaaatcgacttgctgatccaggcttaaatcctgaatgtcccatcccatgcatgcacataaattaatcgcaattaaaccaaactcaaaaccattaagcgcgccatctcaaaaccactactaccacgggatcagaaaccctcagatctacgtatttcaccactccctattacgctagctagcacccgatcgaacgaacaaaaaccctaattattcccacagaattccaccaacttccttctcccaaaccctcccaaaactcaccaaaacacgagcacactcgcagatccaccatgtgcagccccagatccccgcaaaatcgccaccaagaagttcacaaaaccatcgtgcgctccagatctggaggcgcaggcgcgcgcaagaaaccctagctagctacgttgcaagcagctaccgatctagctatagcagatcgaggcgcgcgcccagtgcgtccatgtatatatacctttggccgctgcagaactcgtagagcttgccgcggttggagaagatgatgagggcgacctcggcgtcgcagagcacggagagctcgtacgccttcttgagcagcccattcctccgcttcgcgaacgtcacctgcctgttgatcttgttctcgatcctcttcagctccaccctccctctccccatcccgatctcctcctcctcctcctcctccacctcacctcaccgccgctcgagctcgatcaatcgcgagatgaatcaaccaatctcgcgaagcgaaagagaggggaaagctaaggcgaggaggaggaggaggagggggaaggggatgaggggtttaaaaagggaagggggagagggtgggcagcggcggtgggggctacccggcattgccatttccggcaaggtggtggaacgacgcggaaccctaggcggcctcgatcgatccatcgtacgcaaaggcaaagctatctaggttaatttcgcactaatctccgacccaattcaatgcgtctctcactgattgctttggattttctctctctctctctctctctctctctctcctcgtcgacgcagcggtggcgactgaggattcgacaggtcgagaaattaagcgcggaaaagctggggaaaagtgagtagagttgggcgcttttgcacttgaaacctcggagttttcgggtttcgggaaaaatacccttcttgtgtccactaggagccggtgggtgatctgttgggagagcttaaggctttgtttagtttccaaaataaacaattttcacccatcacatcgaatatttaaatacatgcatggagtattaaatgtggaaaaaaaaccagttacacaatttgcgtgtaaattacgagacgaatcttttaagtctaattgcgcctgatttgacaatgtggtgctgcagtaaacatttgctaatgacggattaattgagctcaataaatttgtcttgcagttttttgacggaatctgtaatttgttttgttattgtaccacatttaatactaatgtgtgtccgtatatccaatgtgacaaacaaacccaaaaattttccccaactaaataaggcctaagattttgggaaatagctagttagtatcaagcttctgagaatatggagaatgtggatttctcagcttctgttttctagttaattttttagattctataattagagcttttgagaatttggatgaaaaactagactatgtagagaggattaatatgattttgagagaagatacagcggtcagaaaatccccatacagacccttacaacttttctcttgggttgcagttgcaaatcaaagcagcaaaatgaaccaaggtagcatagtatatatctagctagctagcgatgtggttgccaagttgccatagttcgtgtagacaaaatggagctgtttgggtttggatagagagaggcttcttcgatcggtatatctctttgcctgcagagaactttgccgttgcagtgcttgcagtagtagatatatatgtgtgtgtaaggtttgaagtcttggctaggcaggagtgtatgttctttcattttacctaattggtcgtgattctgaagagatcgatatatattctacctgggatatataggaactgatcaaaggattaatcattaatgtgtatgtaactttggtgtggtaacgtatcacagatgttaagtgcaaactagctagctagagatggacaaattaggctgcaggctaactaattttggttaagttaattagtatccatgcatgctgggaactcaaattagcaagagggggagatatatgaaaagcaaaataactagtatatgttataaaattaatgatgtattcatgttgtggttaatttaattaggggttgactgttggcacggggtgtccagtttataaaaagaaaagttaacatatgaatttgacatgtgctatgtatatgtgaaatgtcaatgaattaaaccgtccctgtaaactttttaaattgtggcttattcagcattataattttttttacctttttttctagtccaacatttcaaaggctgaccaagtttataaaaaaaacatactaacatttttaagataaaacaaacgtagtatctaaatatattcaatgttagattaaatgaaactaatttgatattttagatgttgctaattttttttataaacttgaaaaaaaaagtcaaatcaacttataatatgaaatgtagggagtagcgtgcaaagattacattaattttgaagtgcattgcaaattttgtgcttgtggatatatccggttcaatttatcaatacaataaagttgaatgttcaatatgtagtatcatttgcactttaaagcttagattaataagtatataatggtgcatgctaggtatatctatattatacatgcatgtttttcctcttaattacaactaatccgtacgtatacgcatgcagaaataaccccaacaaaattatgtacgatacagtagccaacccaatgtgttatataccacaattaacacggttcgtttgaaaactacaagctcaggtcagcttaggcatgccaggatttggcatttcgcaaaaaatggttggtcatcggtttgtgaaaaccgatcaatattagttggttttcgtacggtgttaaccaaaattcatcagtatttaacggttctcaatggatcggtttgcagtaaacgagtggaaggtggttctttatttcaaaaaaaaaaaggtaattaaacatgggtatgcaagactatcacatacggaataatagctcagcaaattgagccgttcttttcttcaaattcctcaatttcattagcacttttttcaaactatttaatggtgtgtttttttttaaaaaaaataaaaattctatatagatgttgtttgaaaaatcatttttaagtttataattattaatattaattaattatatgctaatgaaatttctcgtttcaagtgagcagaaaatttctctccaacttgaggatataagggcatccgcaatggttatctataggctctatacaagagatccatgtcatcatatttttctaattggaagaggttaaatgaagagaaagagagagagtaaagctttctactaacatggagatagtctatagagaaaaacgatgtaatggatgagagatctatagatacccatgtagacataatattgaggtggtttactattaatctagtctattactgagatgtacatgttttgttttatagaaagcaacttactttaccattgcgggtgttaaaaagctacaccacccacacccatcccccgcacgcaacaacatggttggtgcgcttgactagaccctgaagcccccgtcatcgcgtcgtcggcaggcacacctgcgagcccaacggtccggaccgggtgctcacgagatatctgcaggcaattttaatctgggctatatatatatatatatcgtcccatctcgcgcgcgacttgatcgatcggtgatcgcgaccggccggcgtgacggagtacgtacgacggacggacacgtaccgggtcgatcgatcggatgccatcatgccgcgatcgtcgatacgtaccgggcccatggtattcgtccgttcgatgtatcgtcgtacccaatgccatggacgcgcgacgaacgatcccggccgccggctgatccatggatggatcgatcgacgtgaggacgcggacccagagcagggagagagccgtgtgtgcgtgaaaaaatcccggtagattttggacggcaaaagccacgaaatggcttggctagcttgctagtactactccctccgtctcataatgatttatcctagaattacgaatctggacatatatagttcccatatagtccatatattaggttacaacgttatggaacggagggagtagtaggcagcttgaatgcttgatctatcggcgcgtcccgtccggcccggtgcctgcccacaaactactcgcgcttgcttgttgctgccttgcaatcaatccatcaatcaaacgtctcaacgatcaatcagttcaatcagtattatgtgtgtgtatgcgacgcagcgaccgtgtcgtgttgtgcttgtgcagttgtgcgccatttccattggcgtcatgtgactcatgtcacatgggcccaagacgacgacctaacgtgggctgcagatgggccgagttaattaccactggccgagaaaaagcccagacggaacagagctcctcctcctgctgcagtgctgccagtgaagtttctgtacaggaatttccatggaattctctgccgctatactcttttaatgaattaaatttgaaaatatagtgttcattcaattattttttgttagaaatatttaggatacagcacaaatataccatcggtctcgtacaaccattgtgcgaaaatgacgcataaatgatttcacgaccggtatcgtgcagtgaaagtgcgagaccgtgcggtctcgctcaagcaaacaacgataccgctcaaacaatcaacgctatcgctcaagcaaagagagatatcgtgccttgcctatttaattagcggttaattatactgattattaattaatcactaatcatgataattaatcactaattattattagttaattgttaattaagtacttgatcactaatcaaatggatcccattggacaatgtcacagatggcttctgcagtctcactcttccattccgcgagagaccgtgcggtctcgcgctttcgccgcgcgataccatccgtgatgttattcccgcgtcattttcgcgcaacggaagtgcgacaccgatgatatatttctgcataattttttgcatcccaaatattccttagaaaaaattgaatgaacggtacattttcaaatttaatttctcttttaatcaccggtgaatgtccacccgtttattgcatgtcatctaaattattattatttttttaaaaaataattgacaagatatgtaatatatcactacacaaacatgtaaattaaaatttaatttctacaaattgtaacataaacaacaaataaaactcaaagtagtgtatatatatttgcagttaaatttctcaattttgttacagcttgtaaaagttaaatttaatattacatgtttgtatagtgatatattacatattaatctatctagttaattttttaaaaataaatttataactatttagttgatatagttgatatgcaactaatggatggacgttcacccgatgattagaatcaatctccattctctgccaatttctgtgaaactttgctgctgctcagagaggtaaggtaactaaaacggaagcaccacaagaagagatcgaataacactgcacatcacaggtagtagtagtagttactaattacgggaggaacagctactgatactcttaactcttaatgataattactggggaaggctactaattaagctactgccacgagaatgggagcgacggcgacgtgccgtcggaggagccctcgccgccgacgtgaaacatgccgtggtagttcatctcgttctcgttggagcccggcaccagcacggcgttcagctgctgctgctgctgctgctcgctgtccatgctcgggcaggcgaacccgccgccggcgacggccgcggcggcgggcgagctggcgaaccacggcgagctgccgccgaactgctgctgcaggttggggaccaacggctgcgccatggggatttggtggtggtggtggtgctcggctcccgccgccgccgccggtgacggctggaccatccggctgacgtcgacgctggaggagttggccggggatgacagaagagagagagcacaatcggagtcgagcacttggtggtggtggtggtggtggtgggcggtggtcgtcgtcgtcgtcgccgtcgtcagcccgtcggaggagaacatcttgttgctgctgctgctctccggtggcggcggcgcgacgacggtggtctggcacaccgagatctccagcgtcgccgccgccgccgcgccaccgccgccgccgaagcttatctgatcgccctcatggaggaacgggaaccgccggccttccttgggggagaacgccgccgtcgtcgccgacgacggcgagccgacgaaatgcggctgccggctggtcatcaccggatgagggtggtgatgatggctgtaatatggggtctcctcggatttgatgatcccaggccagcttggctctggtcttggaggagtgaaggacgcgaaccttgtccctacatttgaatacagaactaaaatggccgtcattaaaacaaatccgacgaaatgaaatctccattatgtaaaataaataaatgaatgaatgaaacaagccctagaacagctactaaattgttcggtgtggaagaagaaattcagtccgttgatttaactttaaagctccagttaatgtgggtatctggaatttcatctcagattccaattcttgaattaagtttgagtgattaactcaccatgcccactaaacacaataacccattcatatatgataataataataataaatctgacaatagtatcagaaaggtaaatatcaattgaaacataatactatgcacaacaagatataattttttttgctgttttaactgaaacataagggttgcattgtgctctctaagctccatgtaatatataggcaaacctatcatcgatttacacaggaggaaactagtagaacttgcggaatacgtaagtatcaggtagattactgaacctcggttctacatgctacattttatgagcaattggggtataatttgcagtggcatattggtggagtctagatatacattactttttgtttgctttacagctcagatttctggtttaagcaagagaggacattacataatttattttcaactatgtcattagcattcaacatactcttcaaaacaacagtttttaaacaagaataccttgttgacttgtcataaagctgccagaactcatgctatctgcctgtggcttcctgcggcgtcgattgtgcccatccaagcgttttctacaactacgcttagcctcatcaaactccccaagcaagtgaaacctacagaaatgaaaagctatgatgagaattccaaacatcaaaatccttttttagtacttaataaatctttataaaacaaagcttgattgttatactaggaagtgaaagggaaaataaaatagagctgctttaatgctgaaaaggtagtgtgagttctaattgaagcaaaaacatattcagatgtacttgttttatctcagagataaataatacagtacatacgaatacttcaaaattaatggggctcagatgctatttaaaagaagaggaatgatacgtgtatttatttgctgaatattcaataatagcacccagcttcaattaaataaaatggtacacggctggaccaatcgtatttcaatgtgtcagctaataatttcaatgcatggggattcagttatataaaagttttgtactggcctgtcaagcacaagagaaaaaaaaacagtacaactttggcctctgggacatttggaccacggtataatggttccagcaggtatatggcagtatgcatcccaccagcctgttgcttcatgaggatcaccttttttttttgcaatgagcactgaggaatacttgataaagactggcaagcaatatggcattttaattttgctccactgggcatctgggagagggcaattaatcgttgcaaaggagtccccacaggatataaatttttcaggaggtggcgaatgattggctgataatatttgtactgtgttaaaggtaacatgatgcagaggtaatttgctcattatagctcaacaacgtaaaaggacatcacaaaaagtccacaactgaactagagatgaacctaatacaagatctcggcttgcgtagtatttttataaaataaaaaattgacaaattggaggcgcgcattagctccagagagtaggattcatatcggcagaaagtggaccacattatactcagttggtaagagtaagcattatgcttggaactaatttagaaaagcagctacagtagttgttatgtcctgaaggaaaaggattttcttttttttttttgtttgtggaagcaaatgattcagctggaaaaggacgaccatgctttaacaactgttttatttcagttcagtagtcaaataacaaggatgatgttcatattcctggaacaagatatactcttgaaaattaaatatagcttttactgtacagccaaatcggtcaaaatttcactgatatcttacccaaaaaatactgatcgaatttgaaaaggtgcacacaaaccaaccccaaaacacacaaaaaggggtaaggcaacctattgggtgtatttatctgatttgtaattagttaaccattgagtagacattggtatttgtaagggttatctggttgaatgcactatacagactgtagttagctttcaaacagcaaccttgttggtcccaacaacttaaataaagagcatagctaataacctgaagcaaagcaagccataatataaagcaggttgcatgttcaatatcatctttacaaatcaacagtccctcataataaatactgttgcacaaggatccacggaaaaaagtgaaataacttgtatggatctggtcactgattcagaaaggaaagatctaagcagaaaagggagctaggcaaacatgtcagaaatggggcctaatcaaccagggtattacttaactaagagacattctgattcttaaactcctcaaagcaaaaaaaaaaaaaaagaaatcacatagatcctaaactacctacctaatgtgttggaactccatttttactcttaaattttgcagctgaccacaaaagaattgctacctgatgtcaatgacactacccgtgaaacataataaatttcttcggcgatacaacgtaaaattcacgaatttccagttcattcatcactttcaaacaaaaaccatgaagaaagtggccccagggataatgtgcacatgtagcaggtatcataacaaaagacccaactccatctgatctttggcacatgaaatgcatcagtggctttttagggataataattaccactgatgggtcagaaagttactagtgcagaaataggaaaagaggaggttataattcaggtataccggttgccaaggtaaagtgcaacaggggaaaaacttgtggtacatcttatgaaaaggctgaaaagttggcgccggaaaaggtaaagctgtgcatccttggaacaagacagccagaaaaatgttcatctcatctcatctcatctaatctctagtgataaattttcttggaacaattgtgccagggaaagggaaagccgaggccaaagaaagaactgatttggcctattcactttgaataaagggaataatcagcagtgaaaagaaaaggatgtagaagagataaactgaaccccaatcagtcagtgtgtgttcttggttgcggccaatttttattatttttttccatcgcacaattcaggcaatgatcttttgcaaatcacaatccgacgtgacacgattgcgggcagtcatcgattcgggaatttaatcaatgtgctgaatttagcatggctagaattggatatgaactgaaaatttgccaaattttacccgattttcttgtgcttttttttctttttttggttcgtcagattggtttacctgctgcactgctggcagaagcgcatctcgcggccggagacgacgacgacgggagtcttggagtgcggctcgcacaccttgtgccgccggtggtagtcgcggtgcttgctcaggtcggccttgcagccgtccacggcgcacgacgggcactgcccgccgccgccgccgcccccgccgcgcggccgcttcagcgtgctcgtggacggcggcaccttcgccaccgaggcggcggcggcggcgctcgacaccggcgccttcgccgcggcggcgggctccttgagcgcgtccgcggcgccgaactcgccgagcccgccgagcttgaggtcgacagagcactccggccggcccggcgccccgcgcgacgccgccaccgcggcaatgcccggctccgccgcgctcgccgccgccgccatgttcggcacggcgttgtgctccagctcggccaggtcccaagaaacaggcatcttgagatcccaatccatggcacgacacggctccactccacgccacttgttggcaacttggacacctcgtcgtctacctctcgctttcacggtgaggccaccaccaccaccggaggaggaggacgaggaatggccggtttgtcgccaccgcccgtcgctctcatcccacggacatgccgcggcgaaggtggcaactagcggcgaacgaacgaaccaacgaattattgatcgcaaacaccgagataccaacaaatcgagcgccaagaacagggcaaatgcaacagatcagcagcagaagcagaagcttatcctgatagggatgagagacacactgaaacacacacacaaaaacacactctcttcacacagcagaggagaagagagatgaccagcagctgcagctgcagctgatgctgatgctgatgctgctgctgctgctgctgaatgagcaagtgaaattgatggtggttgtgcttggctttgctacttgtagctgctgctgctacacaacacagcacactgcacagatgcagcacaagtgcacaacacaacaagaatactctaccaccaaggaggagactagtagtggtaggcagtgagtcagtactactcctacttggtttttgcagaggaggcaagtgcagactgcagagttgtgtagtgttgtataggcagtgagtgagtgatcttcatcagtgatgaggggaggaagaggaggaggagaggtggtcatatatatatatatatatatatatatatatatatatatatatgtgtgtgtgtgtgtgtgtgtgtgtgtgtgtgtgtgtgtgtgtgtgtgtgtgtgtgtgtgtgtgtgtgtggcattataatactccttctgtttacagataaccatcggttttgactttgagctgttttgcttccatcaatagtggctttagaaataattttggctattaccatcaaacctgtatcattcaattgaggagtcaaatgtattttttaggaattacttacattcaaatctatctgcttgtacatcgcttaaatcgtacattaaaaaaatatcatgctgatgtgtttaatgaggctagtcctaatattacgactgtcatttaaacagtagcaaataaatgtggtttttggtgtattgccagggcctttcagctcgatgacgaattccttagaaagtcgtttacctcaattgaataaggtctggtcgaatgagttgtgtttatacaacagacgggtaattgtttgtggtgagggtgttttaccctctccactgtggtttcctacttcttaataaagtgataggcatactcatgtatattaaacaaaaataacagccagagtttatctacctctaatcaaaacaaacatatatttgtgaccgaaaggagtataacatacattattttacatggaaaaaattcttatattttgggtagaggtattagtaatatacttgtagtaatatgttttctagcttggcttgttttttgtttgctgcatggatggtctgatgcagtgtttgcattgcattgcagccattcatctcatcaaatccctgacagggattctaaagggagcaaacaatgaatgggggtgggatgggggcccccaagcaccacagggccatgttcatcctttaacaccagcatggagccattgtgccgcaataattggggaggggttggtttggttgaggggaggccctggcctcttggaggccaagtgcaattacttttcttggcttcttgttagcagaggtttggtggtgtgtgttgggatttattatttaggtgccacaaattaaaacaaatcaaatggctttactgtcctgctacagtagcaggggttgtgatgtgtgcagctcagtgttgctatcttctgtcttggggtcattgtttgatagtttgctctctaccttactgaaattcgagaaatggggtatataggtatatttggttcggtaggagaattgtatttacgtgagatcaaattatgatttttttataataaattgaaaacgtagaatattttttattgtgactctttcaccgaattgtatacggaactttcgctgttataaatagtgcgtgtgatttagatagttgaaggttacagttaagaaaaaagtttctttcatggaagaaaagtcaaatattcatagaaaactctaactggtctatgttttctgatttcataagtacattatatatatattatggttctttatatgctatatgctgttggttcttgtgtgttcctagctagctactgtgtgttgaaatctgattctttcttttcttgaaaatatgcaagctgatttctcactgggattgtagtaacaaatggcgcaaatgtcacccaaacttcgtatacatctcattgtcaaaaacaaataagcttcacaattaacacatgtcaacttttagcccggtgattcaagctagcgtgaaaattatcacgcgccacgtcactgttgtttaatgtatggttgttgggttgaactcttaacaaacattcatgctaatcattttgtgtcaaaaactccatcttatagaaaataataaatttaataattaactagctctacatgaaggatgttttaaattgtcttgacacttatccccttgacagagaaaaggacatcaaccttaaaactaagagcctatttgcagctgctttgtaaggtgagtaggagcaatttttaattccagaagtgtgtagaccacacattctgactccaaaaaaaatctatctgagcaaacttgcacttgcacacattagtttaaccctaaaattcaagatgttccaactgcacctctcctgcaggtcactggtccatttgatctaaaaaaaacagtatatcatggtccatttctccatcacaagtacatattattaattttatatatcactagtttatatcttgtcgccacatgtagcaccagaccaattcagaatttggtgttttttatatacacagaaaatacttttaaaatgctttgggggttcttgtttgggagggagcctgtcctttgcctattgccaaggacatggggctgatttgtttgtttgttacttttgggtgtccttgacttcttgtgtataagggataaagggcttctaggtaaaaaagaaaagaataaattggatgataggtgaaggattgctctatcatgataggccactctctctcacaccatgtagcctttattttgcaaaaattgtggaggagatagaatgattggttacataatgtttctcctttgtaccttgtgcttcttcttctattttttaccgcgtttccatctgccagttaatatggcaaaattttccccaatatatacactccttacataacgatgtatttccattgcgccttataaatcttctgacaaatattaaataaacaatggaatctcagaaataagtaagtagccattacttgggttgttgataaccatgggaattatttccccacaaacaatagtttgctatacatgttttgcacaatttttttacccacaagcaacatcacttccaaatagcagtatcctcaatatgcacctttttttccctttaggaatacgcaaaaggcattcatataattgcattatgggaattatttcccaccaacaataatttgctatgcatgtttgtacaattctttttactcgcaagcaatgtcacttacgaaggagcagtattctcggcatgcatatcttttttcatgaatacgcgaaaggcgcacatatctcattacattaagagttttgatgtgtacatttaacttccagaatttttacacgatttgaatttttggggtgtggattgatttgccgaatgatatttctccttttgtacatgttcttttttaaaattttactgtatttgcctccttccaacttgtataagaaattaagaataacaatagcttgtgccacataacctactgactaataatagtataaaatacaaatgggattttagtaacaaagtacgtatagtcagtattatgataattgataaccatgataattactatcatttccctagcaagaaaaatacacttgatatgcatactttaatttgcataattctttatacacacaaatagcgtcgcttccaaatgaacagtatcctcgacatgaacattttcgcattacgaatctcgactctcgacgtgtacctttagcctttaatttggattgtttttccacatttttttgcacgcgttcgctaaattttacttctaacaattaattaaattggcatccttgtgtccaaaacaaacaggtagcagtaatagtaaaaacaaaactactccgtgtgtcgtaacaaaatttaaatttccccataattaaatgttggtcgctcgattggcagattggcaagatgggatgcatgtgtccggggagcaaatgcgtttgcagaaacggccaagctgcgtacgagtgaagttgacgccaattgtcaaggcatgaatgtcactgtaagctccaggggtatccaacgaactttgtctttctttctccctctcttttcttttgggttagttgatgtataacaaacttgcatctcaaaagtcagaactactataatggcatccaagaagccaaaaaaaaaggaaaaaagtcggattaaatgactcaaaaaaaagtactattccctccatcccctaatataagatattttgacatttttgcttatgttgtttgaccattcgacttatttaaaaaaatttaaaattattatttattttatttgtgacttattttattatccaaaatattttaagcaaaactttttgttttttatatttacatataaactttttaaataagacgagtggtcaaaccgtaaaagtaaaatattaaaatccctactactacggcgcattctgtcaacatgtggcttcagaacttatagctagtactggtcctagatgtagtcatgtagttgtccaaaacatctagtagtacctaatttgggttagtgactaatcaggaaataatcgctaggattatgcccttgccaaactagggatgggttacggtgataatgtactggatgttcttaattaacagcatatcgattaatccttaattaacagcacattaattcatgtagatgatgattaattgtaggacagacgcatgcatatgatggcacaatgaaaccaaacttgtttttcttgaccaaaattgcacgaaatgggaaaaatctagtacttcatggtgggtgcctaaagtcctaaaccgtgggtattatgctgcaagttatcaagctgtaccggcaaagtacctcttccactgagctagctttttcttgtttggtgggctcgtaaactagatcaactctcgtaatcatacgctctctacggtcacgaaaacatatcgttttgaacattgacacacacaacatgtacaactaatttctgttgcccgaattatttgaaaactagataaaagtaataattataagtttttttgggagacaaacttatacctatacattcatctaactattctatatgttttttttctagataataactattctatatgttattggcttcttcaataattttataatatatcacatccatgttcgacattttcaaaacatgacttgaaaatggagggagtaattgtcaagctacgtacgggaattcataagaccaaagcttggatagagtacaaaagagaagaaaaaaatctcgtttttcacgtgcgtgtttcccaaactgataaatagtgtgcacttttacgaaaagtttctatagaaaaattatttcaaaaaatcatattaatctatttttcaaatataaattaatactcaattaatcatacactaataactcattttgttttacgtattttctcaaccttcactcttcctctcctctcaaacatagccgataaggagacgtgagttggcttctagtaatagctggttgcggtgcagctgcaaccaatgcttctgaatatgcctttagagatcatatagttgtcaaccgcttcatcgtgtgtttccaccagatttaaccgttacgattatcacggagcgacctacctaaaaaagaacacgcaattatgatagtaaatatttccccctttgaagtttttactacccaaagcgacaagtttttacccccgtaacaaattaaaaataaatgagaccacatgcagccagtagcatggcgtgcaagtgggatattgagggaactcatcaatggacagttggattggttttcccactgtttgggaggcaggcggtggttccctctctctttaatgtgcccatcgctgatgccagggctttctcttccttccttggaggacaggaccacccaaaataaaactcctctgcctctgccttggctagtgaattcatacagccaggttcataatccccatgacagataaaaaaccgcttgaatgatatatttggatttcacgaaaatcgttgataaaaaccgacaaaaaagggtagaatacaaacaagtattgttaaaaaaaattatttaatttttttaagttgaaggaaaaacgagtggtttgtggtccagaaattcatatagaatcgtaaacgtgagaagttcttttaacaacacatagacagtgtgatgtttcgtatcgatatagcggtaaaaatattataagtctacaaaaggctttagtcatgaaaacggaaaaaaaaacacaccacgcgtatactactagaagccactactgaagagcaaaactcttcagcaaaacacaacaccctaaaaaatatatttcaaacgatacctcgaacgaggatatgataccaatagcgtaaaaataaattattcaaaaaaactaatgtaacacgctatgattgtatcttgaattttcataactacatattgaataaactaagcggctaatatctctttgtttgtaaaagtttttgtaagaatttattttaccatgtatagcatcgctcttctttttcccttgcctctgttaccctctttttaactcttctagaagtaaattcatatgccatgttaaagaaaaaagagagggagaggaggcaaattcatgtgccactcgtgatagtgatgcaggtgcttcgtagtccacacaagcgtgcgtccctaagatactgatctgcacgtcacaaaaacaagccccctttttccaataccgcctagctcgaaaaccatcaaatgatagtatactcccaaccatgacagtctaagtcgaccaaatccacacaatctaagagcaagtttaatagtataaccagctattgtacctgctctgagacacatacaaactccagcaaacctctaccgaaagatcctcatgatgttagagacacattgatagctttctataaacaccagtacacatacccatcaggatgtccacgtatcagtgactcatcaacatcgctagtgtttgataaattaacaccattacatacacccttctgacgtgagatgttcacatatcactatattagtgactcattgacgttgttagtgtttgataaacaccactacatgctcccatctgatgcccacatatcagggactcacagttggtgtctgccaattggcatcccacttgttagcgagacgtggatgttatttgcctttttgttttggtttattggcttagacttttaagtcagtttaaattcatttttcatccatcccacacatatcaatacaaaactaaaaaaactggaacacccccaattctagtgtaactattttccatcttatctactcccaatacaaatattccctactttcacaaactccaatgcagtgactacctttaaagtaaacttattttgaaacaaataaaagagattaaaaatgaacctaagcctcaataaagaggcccttaaacgttttgactcataaattcgcttataattctaaaacaaagggcatcatcttttctcttatacttatacttatcagtcaaatttaaatttttaaccttaaatttggagttgattttggggttttttcattgaagtttatttttcagcctttgcttttagatcgctaaaaacacatatatatatgaaagttttattcacaaattatttttcatttacaaatacgccgttttgcttattctccgaataagcgaaacgatggggtccgaaagatggctccaataatttttgttcaagccaagaatgcatatatatagccggaagcccggaaatatatatggatgcgtcccattcggacgtagcgatctcgcgtcgcgtcgccgtcgggcgaggggcgagacgcaacgcaacacaagcaagcggaggcgaggcgagcgtgcgtgcgttcgtgcgggcggtcgctgggcgcgcgggcgggggggagcagtggcggcgacggcgacgggtcgggtcggtcgctttcggggcacatgcgcggggggcaggggagaaacgacggggtttaatgccgcttttgggcgatttggaaatttaagttggatcacctactggtggttgctcttttatttcttcacgggttctttcacacctttgctctgcggctgccctgccctgccctcggtgacgagctcgggtttaaagcttaaaagtttcttttaaaactcgagaagaaaataaaaagattatgttggcagaattcgaaatggatgtttgtaataatgttgcaggtgcttgtcggatgcgatttttctttttctttttctcttttttttttggggggggggggtagctgatctgtttctggaggtgtgaattgtaacaagaccaaaatgggaggatcttgggaccagaaattggcacatttaatcagcccccttaagacagcactgtgcgccagcgattgtaggttgaaacttgagagagagagaacagcacacacaaaaagacagaccagtgaattactagtactacctttgccttgtcaacaaccaacttctgtggctgttactcctactatactgtacttctgagtgcatccttccattggatggagttacaatttaaagcaaatattatgccagttttgtgctaaaagtcatctgattgggaaaaatccagtgacatggacaccctacaggcataacaattctccaattagcccaggggaatcagaaatcaatcaatctaatcagctcgatagctagttgctacgaaggagtattctcctacaggtagatctctgtttcaggctttctatgttatccgatcaggaggagcaaatgcacggacatgtaatcggatcaggtgcaaaacgcaaggacatcaagttgcagcgacaaggcacggatctccacacagttgagcgcaccaaccaacattccggactccagaggacagctctcttcttggaaagaaatgctcccttcttttattacacttgcatatggcattccacttccacaccaaatatcatccttttcaggcatgtggcaataacatcgactctttcagcaaccgcaacgcaattcaaagttttggacccccaaaaaagacaagcggctgcgtcctagcagaactacagaaaaccgtgaccacaatctgcgaacaccaaacagtggacgaaagtcaggaatagttgaagaaaaataggcaggtccgtctagtaccctatattagtacttggagaaaataaaagcagtcccttctaagtacccaatataagattgattgtaaaacattgggtgccatgagcctgtaacatgtcagttattagaaagtatcaaccataaatgtcttgctgtagatagagtgcgtctattaatggcataaaacaattctactaggagtagtttgtaaaaacagtccagtgacttttagtaaaatatacgtataattttcaattcttggatatttaacttaaatgctttcaattatccttattaaccttgattgtttaaaaggattcgtaccacaaatcatctggcaaccatgtagatctgttcactgctctacatcaatgtctgactgttcacctttattggaacctacgcgctgcaagaggaaagaaaagcaggcgtatgagagaaatatatacatactccctccgtcccaaaaaaggcaaaccatgggttttcgtgccaacgtttgactgtccgtcttatacgaattttttttataattagtattttcattgttgttagatgataaaacatgattaatactttatgtgtgacttatctttttaatttttttcataattttttcaaataagacagacggtcaaacgttggacacggaaaccagggtttgtctttttttggacggagggagtactccagatacaaagaacagagaagcaaatagtcatagcacaaatatgatcaagccatactctcccaaatactgaaattaatagcaaagcaaagagattttcctatttccagctgtcaacataacacttacagacagtgagacaaattattttgctaacagcatataacaatttaagtgagaaggttatcatgtaaaagagcagatgtgatttaccatccgtttgcttatatatggtttcatctcaagggacaacttgttgctcttctcttcgtgaggcttatggtttttctcaaactctttccttgattcctttcttgtaccagattgccagacaccaccaaagttagggagccaactagaatcagatgtttctggaacaagttcacctcgtttttccatctccatttctgctcttctcctctctgcccatgcagctcctacacgctttgggttaagctttccagattttcctttccgagaggatggacgagcataaccactaagtgactcattctcctgatcacgctcgctagcttctaaccagggaggaggagcacccatgtgcacatttgctttcaagccttcataacataacgatattatgttaaatttcacacaacaataaggaactaaaaatagatatctttcatttgctagagctgcagcctctttctgcatccaaattagtgacatgcttcaacagaaatcgttacaaatatatatatatatatattagaaaaactgtaaaagtgtgtagtaccctgactggaatttccaccagagtttctctgttggacctgaaaaaaattaaccaaataggaagaaagcagtcatatcttaatcatgcctgacatcaatgatgtatacatgaataataatgcaacaaagtacgagacaatatcaacgcttgcaactttgcatcagaagagttgtgggtaattatgcttcttttaaggaaattggaacctgcaagctaacagagaaggcttttttttgggggggtaaaagagatactgttagcactaagatttgaaactaaaaaaaatacgtttagcatccccacaactaagatacaagatacccaaaagataaaattgacatgctcctgctttgaacgacatcgactaaatcaattttttttccttgttcgaaactctgaatagaaaacactcgcttagttgttagctttgcctcaaatttcacagcaatgaaacacaataatggataacatccaaaggaccatttgcaatacctttttatggaatatacgcatgtgcacgtgttgcttacttacatgaacagaacaagaaaccgatgaatttggtccatttccgaggatagtaagttgaccacctgtggagaaaaggataattagcaaaatactactaatcaaatggtaaaataatacagtaaggagcattttaaaactcaggttcacctttcatttttgtgcctgcactttgaaacaagtctgtacccagcataacctgttgttcatgtaatgcaaccgatccacaaggtatgatgggcactccgaaagtctcaaatggagcagaatacggaatacttccaaaggaggaagatccctggcatgctgtactattggggtagtatgccccattagtaggactttgtaaaggcataacaacattagatgcagtattactagaagacgggatgtaagtttctgcaaaattatccaaatgtttagaggtagatttatttcggatatctttcagtggccccagagatggtccaatcaacccttcggtcgacgtctcttgttctgtactcgaagactcgcagcacttctcccactgaaatatcagaaacaccacatattaatacaccctccgcggctctgccacacctgccacacctagagtgatgaaacaatgtacttggtagcataaaacagacagcagtgcaccttagcaagctcatcctccgaaatcctaaacgaatccacctgatccatcccaccaccatgcttttgcaggaaagccttcacgccatttaggtgatcctggcttgcgagatgataaatagcattgctactgcaatagaataaaattgggctcagatcaatatagtaatatgtaagcattgaaacttctttctaatttaccctcaacgctaatgtaatgttgctccaatagcgccctagccctaatgcacgggaatccgacgctactgttcaatttgagaactcctaagggcaatccgaactgaaactagaaccaacttatccagatcgaggaaaccctaggagcaaggggacgagttgagtaccaagcgaagcggctgtcgaggtcgacgagtcggcggagcagaaggggcaccagaggcgggagcgggccgcggaggacgggtggcggagcgcgcggcgcaagtcgaggagcttggagcggaagcgggagagcgcggcggcgagggcggcgcggtgggcggggaaatagcggtggcggcggccctggtcgtggttgcggcggcacagctcgcaagtactcgaagccgccgcgggcgcggcgccccgcttcggcggcatcggcggaactcgccggcggtctcgtcggctcgccgcctccgccgccgcggcttccgcgcttgtgtttggtgctcgttcagaattcagagttcaggaggttggggatgggggctattggaatttcaattttggaaaatttcgtgccgtttggaacaaaagaaaattttccgttcaaaagaaactctttttcacattattcttttatataggagtttacataacaccggcccatatgtatttttttttcaatttgatatcgtataaatcgcgatttgttattttttattttttgctgaatcacagctgcttgacatcccagttctctaacgagtgatttccccactttgcacttgttgatcttgcatcaatttatcactctttctctataaacaactctacacatttcacacttgtatattggggtaagtacctcctgctgagctgcacatgctcccgctactccctgggttataaatgtactccgttttaacttctactagcgtttgaaatttattcagaatataatatgatttattgttttctatttagcctatcatagccacatttaaaattttaaatattaattttagagttgatttttttttaaaaaatatgttctagcattggtttttagccataaaaaacatatatagacaaaaaatatctataaattattattttagtggctaatatgtgttacgacttataaccagctataagcagaatgctcaaactctcgtctcaaccaatctcaggtttcacagccatattgtatttaattaatctactacttactcatctcaatcgatcataattatctcccattaaatttcacttacttttatctccatacaaaattatagacactcttgcaatttgagacagaggaagtttctctattgcttgtcgagagcatcaaatattttgcaaatgaactgtaagctcctatttggagtgtttaagattttaagaagcggcttgttcatagctctaaaaatgttgggtttctaagagtttattttctgaattttacagttaagtattcctggaatgtgggtatttcaatgtttagggtagttgaagatccttgaaaaaaagtgggacgtaaatcctggtttaaaatgcaagaggccggttctcgtcttccttatggatgccttgattgtacatgtgtagaaacacagcacactacaccgaccaaacgaaacgaattgaccgatattaattcgtgaaaagatggacgctcttgtagtcgtagacaactctccagagcatactattccggtcccgtacgtaagaaacgccaacgaacatccattgccgtgacacgcgcgaggcggcaggtgtcccgtacatgctcctgtgaccggcctggtaaaaaaaaaccacagtgcaacgcaaagtacacatcttactcccatatactgatgcggcggcgatgtccatccaatccaccacaaatctaccagacgtttctgtacactgtgcactgttgaggggcaccatcaatgatgcataaacaaccggcaccacattactcccaggaggcgtgaccaccgcgacaatgaatataacttgccaacttgggatggcaaccacaggacgcgatcgatgccctccggctcccccccataactcgagtggttagcgcaggtgtaccgcaaagaggacggcagaatcgaaaaccaaacgcaggaggagcagccgcgatccaggagaaactgtgccggccaacactgttcaggcggagaggagccgcggtcccctcgggaggcttccgccatacggcacggcagccaagccgcccctgtacgcagagaagggcacagtagctgatgtactacctggttcaatcaaagaaggctcacctgctgtctccttcactgttgcgtcgagagacacggggctcagctggctgcagtgacgagctgcagtggagtgatttgaaacataatcgaagacgcaacaaacgtgagatgcgttttgaatgcttaatttgagtgtgtgttagcacatagtagcgtctatctccatttgccatttgggacagcggcatggacagatatctacgtgtgcgtgagtgctctctgactatctgcacaaacttgagcaccggaactaggaataggatggatatatctacttgtggtcttctgcacctgaactacgatgttagttgctcctgacgcttgcgacacgaaccctcactgaacttgaacttgaacttgggacttctggcgcttgacgtactggaggatcggctccttcacctgcggtcattttcacgggatcaattaaactcaacttgattacagcgccaaatgccaaatactagtacatgccaaatgccagatgtttcagttcagagttgggacatggagagtttaccgtgctggccttcctgaatcgcttgtcctgcgagcactgcgtcccgccagcaccagccaaagactttctgaccttctgcccgagaaccccactctccagggaacaaacggacgcctgctgcaaaggtatcacacagttcatcaccttcagctctacgtttgtctgtgatttaatttacctggattctgagtcgcatatggctcagaatcgtctgtggttagtaggggatcaggtttcggttatacctcgcgcacgcttgtaggagtcctgcttggatccttatccaccgtggaagcttcctgcccgctctgcatggacacgttctgctgcggctccggaagctcccgggtgcgggtgaggtcagatccgacggactggaggcaacccatcgtcgatccatctctcatttcatggcctataaagagaaacatattggacaatgtcatgttagtactatatacgcaaagacagatgccaagtccatggagatgcggattgttgttgccattaccactcaggtggtctttgcgctcaggctcaccaggttctgcattggtatcaatggcctgcatgatgaagcagagtttcagattaaccatgaataaaatgaatgttgtggaatgcaaagaattactagataaaaacttggtgctgttagatatgattatggtaccatttgttcggctatatcgacttccagaatcttttttatctcaaggagctttctgttggtgacttcagaatgaatgacagctttgcctgtaaaatagagtgacataggccataagatggtatggtgcacagtagtagtgaatcagtcatttgctcaaagattagtactagttctattagtacaatgcatggcggcaatggtcaatctgaaaagataagagtgatgtatctgaagttcctaaaatcattagttttcatctaaagcagcaacagcttcagtacatgtatattcttcacaagtattacagttagacaatgtttttcatgaggcatccaaaatccttcttcaagagaagttgttgacagttcttcatataataagtgaacatgacaaaaggtaatcacttgaagttgcacaatctatgtagaaaatgacactcagttggcatgttgattcagttattctcctttcacagttgtaacagaattgagcaaacaatacataacttgctcctggctgacagactaaaccagaaaagtaaataatgtaccatagaatagaagcatttgagattttgcaagagattagttcaaggtgttacctagtcttcggttggctgaattcttgacatatccgtcttgcaccattttttcaatcaacttacgaaccatgttctggctggcctccccatctagcttgccatgaagtttgcctactgacacataatccattggaagtgcatggtacagtgcctgtagcaacgatatatatcagcagaaatgacatgatgacctccaaatacaagccaagggtaagcgacagagatacaccttcatatacatcagatcaccattgctatttttagttccttcagtaggtgagacattttgcatgatgacctctttctttatgtgtggtgttgtaggatcagcaatctgaagccactctatgatgctagtgatggacagtacaatatgccacagggtaaaactaaaatatagcacatgaagaaaatgtttggttgaccttattaacagaataactatccttttttgctctggatagtaaaccatctttaagtagcctctccataatatctgaaaagtgagtcattagtcaagtatttcaaggctttagtgagagtgaagaaagaatgcctggtaagcacacataagtttttcacaccactaccttcaaccatttcctgcaaagcattcaacaagatattgttaatagccagccatacagctcatacagtatatcaagatattgtttgatttataaacactgatgacataaaagcgggtaaaagtttgtgacctacttgtaagtctagcacaaaacagtaaatactctaaatagctattttattatataaatgaaataccagtaggcattaccattgatatgtcggggaaattaacaaggacatctgaaacctcaagactttcagtgtctcttgagcatatccactctcttacttgagctgttagctcttcctcgtgaacaggatcttgagtatcatctgcaaacatacaaagtcagagaaacgtatgaaattttcaggtactacagagtcagagaatgttgaacatgtattgcacacttcatgaaaaattaaatgagcatccaaacatttgaataataacttaatagttgacataaaattcatttgtatggaaaaggatgcacagatgaagctctcagatcaaattaactgaccttctgagattgtaccattttgacctttgcaagtcccatctattttgataagtatgttagcaccaaaaacagaaagtacaacaagaatacaaacaaagaaactttaccatttggagcaacaatgtaacgctctgcttcagatgggcgaacctaatagaattagcgattcagtctatactacaggtaaaaggaagacaaaaatatgcgtatacatcgaaaggtggcatcacagcacactaaggagaaaattaagagaatctcactaataaagatgctcaattatatgttctcttaggtctttacctcagtgtcagaaaaatcattatcttggtcagattcattatccaagctcatattatcatcttcactgttgacattgttatcatcacaagggtcaaggacactcttgacctgcataaagaataaaaacatatgtagcaatgagtttaattgagaaaacagaggtttcctggtccaaacgactgctatctccataatccactaccttcaaagctaacacgagatgcttgctattgacatttccaacttccatcttcaaggggttcttgttccatatatttatggcctcgttgtcagcgcaacacttaaaaaagggtggctcgtaatcttcaggctgcaaatagcataataaattaactgttttcgattccacgaacaaagttctatagaacagaaaaggttgaatccttcatttgttcagagcaaaaataattatctattatggcggcttcaagtttcagtaaatagcaagaacaaattgctgcactcactgtgacatcatcgtagtatagcagcttcattagaatggtcctctgaggacaaatacaggatagcattaggtaagttcaatccattgtaacaaatctgtgaagtgcaaaaattacctcctctggcatttggtccaaggtcctcataagtgaaaccagtgttcttatcatcttacaagcagagctcctgattgggaaccatatgatcatgtcaggatatcagcagtgactagttaaagcttacaataattactttgcaattgccatacacatataaaaaccaataaacaaccattaatgagcttatctaaaggactaaattgaaaccataccttcagaactagaattctgcaagttgtggaagaatatttaagaacaactcgcagaaaagttggactcaaaattataagcccaactatgtttttaaaaaggatttacatcatttattgccacctcacagtcctatgtacctaaatttacaaagttactggaatctatgtacctcactttttcaccacattccttacatagaaaaagaaaatctgaactccttttagtcatcaatttgctcctacttctttgaaatcataaaattttaaactattgttatgttgggactgcaacttcattaaacaaacactctccaaaatgtataatgctaagcaatatgaaaaattaaccattaaatcgtagcatttagctaagcagcatggataactaactagaagtctagaatgaatcatagcctttaaaagggatatgtatgagagaacctcatctgatcaggagtgacttctgctgcatttgatttaaatgtagcactgtttttcttgctccctgtgcggctcaagttcattgcaacttcatcaccgctcgtgttggggtagctaaatgagactgcaggggagtttgacacagaataagaaaatgtttgacatatgacccacaatcactgatgtaaaaccaactttgtatgctagaagttagccatatttcacatggtaatactcacatgcatactcctcaatcattgggccttcctccttctcacagatgcagaagagaagggtcttgagatatttcttctgtagtgcatcatagacacctaaaatttatcacaaaaatggattaaatgaacaaattggaaaattaaaaagatttaacacgtaaaacaggacatattttcacctttttccatccaatcaatcaacctcctcgactcagtatccatgggcattagcttcttaatcttcatctctgcaataaataaaagggtgttccagctaataatatcatatcatctgaggaatttggtgtataaaagggttagggactataggtaatgtgacctagtgccggaaccgacttatcattgaagtacttctcagggaatagacctctgatgtagctgatgttgtatatagcaatgcggagcaaattccttgtctgtttggtcaaaatatcaccacgttatcacaatagcgttctaccatacataattcaaagagagttcagtattcaatgtaatagaaatagaagggcaataaaatcatcacaaattggattactgattaacaagtttaggccttattggatcctggtccacccccagggatggactgaaattgtagttcagtttcctagcccatcctggagcatggcccagggttttgggcttgccaaacaaggtgaggcacaaaagttcaccaaacaacaaatgtgtcatgcttttcaatactttagcacatgttgaatcaaatagggtaccagtcccattcaaacacacacctgcaataaatttcttaacaaatgcataaatgaacatggaccatacgatatatttcacctactatgcacttgcagtcatgggatcctaagcacttctaggcaaagtgcagctgaccatgtgagcaaacaagtactagaaaagacaaagaaaaacattatttgattggatataaaccaactggttttttgaaagtacaagaggtaccaaagtttggtgatcaaccagtaatcctaaaactcatgtggcaaagccaatgtccacttattaaaccgagtatctaacaaagatgttaaaataggagtgagagtgggggctagtctaaaaatcatgccagcagaggtttaataagctggcatataattcctaaaggcataacataaattccaaattcaaatgatagcgcaacaaaataaccgattataaacagaagtgcagcttttcttatcacaaactaatgcaggattaagcaaatgtctgttcaaacccaaagtagtgtatcggaaatattttaaaaaacagaagaagaattaggtcatagaactatcagaacaggaaatctgggaataaccaaaccaatacgtgtggtactgtggtgtctcaattccacgtccaagcaacaagtttgaaaagagaaactaaaattactcatggaatctgctgctgccaaaaaaactctgaagtctaaagagataccaaaagcaagcacagcaagaattcaacgaactgaataaattttagatgcttctaacaatatgattcaaaacgattggaagtagaaactcttcacaaggctatggaagcaaggaaaaaacctttttaggccctgccaatttgatcgattcagtgaaccgtggggggtatgcacccatgattccagcatataatcatctacgcacaaatcatcaggccaatgctcgtgggtttcacaacgaaacaaaaacgaaacgggattatcaaaccagcgaatgtctcctagaattccaaccaaggtaggcaacgtttgttcaaaacccaaacaactaacaagcctactggaaacatttgaaaaaatcgactcatacgactgtcagaaatggaaatcctgaacaaccaggcccaggccaatacgagtcgtgtctcgattccatgttcaagcaagcatttcggaagcaaaatgaagttactcactgtaactgctgctcccaaaacacttcagaagagattccaaacgcaaagcacatgagaagttcaacgaactgaacaattccttagatgcttctggcgaaacagttcgaaacaacacgacttgaattcgaaattcttcgcaaggatatctaagccagggaaaaaaactttcaaccctaccaatttgatcaactacgcagactgcagagactatgcgcctatgtttccagcacgatggtctacgcacaaacaatcaggcaaatgcctgtgggtatcacaacgaaaccaaatcgaaacgcgattatcaaaccagtgaatgtctccttgaaatcccaaccgaatcaccacgcgagtagcaaaacaaagtgatgtgatccgttcaacaaaattctaatgctgagagaatcgcacaaaccagtagaaattctgctcaaaatttctgcgaaatttagcaaaccaaccagagatttttcacgagaacattatgtcaaaaaattttcacgagaacagattcggtgcctcaaaccagagaaacaaaactcacatcgatcaagcagcagggagaaaaaccaccgaatcatcattcagtgcgataccgaaacgatccatcagttacgcattcgagagatagtgctacacggagaaaccagaaaccaactccaatctgagatacccagaagcttttgaacgggcggagagcaccagaggaagtgaaacaaaaatcccaggactcatgctccaaacacgcctaaatccgcacgagaaatcggttaaaatctgcaaagcaccaatgaaatccacccaaaaacactagcaaagtgagatgctactgatgcttcgcactggccgcccaactagcaccatttggtagtcagcggacggagactaccagagaaagcgagaaacccaaaaccccacgacgatctccaaacacatccaaaatccgcacgagaaatcggttaaaatcagcaaagcaacagttaattccacccaaaagcactcgcaaagtgggggggggggggaaatccgacacgcgtgaccaccaacactcgaatcaaacccaaatcgaacgccagctactgcaaaccccagtacaccacacgagcgatcaaatccacagcgaaaaacctcccaaaaacctcggcagaaaaccctcgatcgggtgaaccgatccgatgtccggcaccgaaccaccgaaatcgaaagtcgcacgggaatcgaacaggagatgggcgaggagagaaaaaaaaactcaccagaagcagcgaatcctgctccgtgatctccgcctccttcgtcttctgagccatcacctgcatcgcaatcacccactccgatcagcacgcacacaccagcaagcgcaacgcgaaatcgaagcgagaacccaccatttcgtctctacggcggcgcgccgcgcgcgagatgagagaagggagaggggagaggagtgggagagagagagagagagagagcgagagaatttgcggggctttggagagctagttttctcttcttcttttttaagtactactgtatatattgaagatttaaagtgttatgaatttttacccgggtgcttttctttcgaggaaattaccgtacccgagcgccttttcttttgaggaaattaattaacttgtaaaacaagtactagtagtagccgtaaatttaattacgtgtctgccacgtcgacaggacgggcacgatgcgtttccggtttcctgcttccgagatttggaggacccgcctacgctgcgccagcctggcagcctgcctccagctataaaagtactccccctcgccgtgattcgccctcgtctcccaccccgctccaccgccaccgtcctccttgctcgcgtcacgccgccgtcgccgtgctcgcgtagtcgcgttcgcgtcccacccctcatccggcgcggcgcggccgcgcggcgcgccccctccgctacgccatggctcttccgacggcgaccgttgccagcctcccggagctgcgcgccctcgtccgggaggtggtcggggagtgccgcgtccaggtacgctccgtcgcggcgctgcgggacgcccccgagatgtaccttgccctctccgccctctccgtcgactaccagtggcaggtcgaggacggcgacctcgagcgcctcgccgacgtcgccgagctcgcccgcgtcctcgacctcatgctcaaggtccacatcccgcagctcaagctccagctcgtcgacgtcgacctgcggcgcgggctcctcaacgacctcgtcggcttccgcgtgaggggttctctcgccatccacgcgctcacccaggacatggcggacgatgtccttgctgccagccccatgcccaccgccggctccggtgccctgcttcttcagacgcactcccgtctcacggagctcctgctggaccgcctcctcctccactccatgcaggcgcgggctctcgcactcaggattggtcatccgatctcgacgagtgtgcaggcgctcgacgagcttctgcacaacgacatcgccaacggcgtgcgagcggaccgtctccctgaggcgactccaggtcaactcgatcgcgctctccatcgcattaccaacatgttgggatcgcctgtttgatttacctccctgtttgatttacgaacagaattttggatgtgtagtagtaagagattgtattgcttagtccccctgttttgatttagggatttgagagttgatctacgaacagaaatttggatgtgtagtagtaagagattgtatcgcttagtccccctgtcactttaaaaaacgggaatacgcaaggagcgcatctttgtattaagaggagtaaaagtctgtacaggtgaaagagaaaacacagcaggacacgggattacaggaagtcacccaagagcattaaaccctaatctcgcgatacaatgttgcgacctgagcgctctaaaggcgtggccggtatggcagtattggcgagccgccacagcgctgcctcttccgccattgcccttgccacttctgtccagcttctgtgcttctggttgaacaccctgttatttcgctccttctagatagtccatgctgcgagagtagcaatggtatcaaaacctcgccgttgagagctcggtaaggtttccctcttgtcacacaaccaggagtggaatgaggtttcattgacaggcaagcattccgagcgaccgattgccgagagcagtagccaccagagctgtcttgattctgggcatgcgaccaaaatgtggttgatgctttcctcgtgctgatcgcataggacacacatgctaaggtggggcaagcccctgatgcttaacctgtccgccgtccagcagcggttgagtgcgaccagccagctgaagtaacggcagcgcggcggcgccagcgatttctagatcggcgtggattggaacgggattcgaccgaggaacaatgcttggtaggcggagcgggaggagtacatgcctgaactttcccatttccaaataaattggtcctggtgatccgagagctctatctcccgcaaaaacgaccagagattgagatactccacgatggcctgcaatccgagggctcctcgtatatcgctttagggatttgagagttggatgtgtagtagtaagagattgtatcgcttagtcccctgtcactttagggatttgagagttgttatggttgatttaccaattgttacgatttgttgcatttaccaattgggatagaaatgaatgatgaccttcatgtatcagcaaaatctaccaactgggatagaaatgaaatgattctacgctcttgatgaccttcatgtatcagcaaattaaatccagtggctgccagatttttcttttcgttggcttgttacctgacttcttgaatgtgcaactaaccatggttgagtgttgaaatttgttttaggaattgaggtcaagctgtagatatcttgtcagcccaatgcaaccaaaaatatgttgatagtatagctggtagagcatctgtaattgaaattcaaatgcagaaacctcttattaacctgtttatcacttggtgtcaaacaaaaggtagatgttccagttaatgtcactagcaaaatttagagatgaaagacgaaaatgattcagttgtgtcctgggttaatgaagagaaacgcaagcatgtaaagttacaaaacttattggacagtattataataatgtagtaaatgaagagagaaattacataaccatctacgctggataaatgctgagaaaaacacaactaagatttaacatgacaacggctgcaaggcttcgtaacagctaatttaactgtcgagggaacttttcgctcgatgaatgtttcaattgccaataccgctctgttggcttcagtgagcatcttgcctataggaaaacatttcttgtgttcgcctgtagaacagctagaaacaccacgggttgtatctagtgttaggcacttgagtgaggttgtattgtcaagaatataacatgttagctcgatcaagctctttgcagagcagaaaccagtgatcttcacgctctggaggttgccatgacgatggtgttcaggcatctgcctcaattgcaaggaatctccaaaaattgagacatgccccatgcgttcttgtgatacctgaagatgaaaagccaatgtgcttcaattgatggttaccactgtaaatggccaatacataagtttaaagaatgaaaattaacttacatccagaaagaaagtctccaaggaaggagaagcatcaagaaaagaaaccagagaaaaataatcataggctggggaaaaagtgaccattccaacaagagaaatagtcaagcacttgaggtggaggaatttgctaggcaacattggtgtgtcgaccatctgcggaaagataatcagactgatgatattcttctaaagtactgttgtaaggatatagcaagtccataatcatttaaagtttttgggtgtacctcatgaggagagccaatggttagagtttcaagatttggcacattggatggaagctctgcacaagcataatagacagcaccaggatagcacatggataggctcttcatttgcaacgattcgccaagcaagagttgcacatgattaattccaaagtgaaaactaccaagatttggagcactattctctatgacttgcagcattctacattcaaacacttccaggtggctaaggcgttgcaacaggcaaggtatcttcacacaaattattccatagcaatagttaagttccaaccgctccaaagcataagaattagagagaacgcaccctaactcattgcctgtaatatgtacaaaggccagatgcagcctcgtcaagtttcttaattcaaggttgattgtgggatggaaagaacacctgctaagataaagatgccgcattgagcttcctctcccatcagataaaagtgagcacgggaagttgtactcatcatcatattttgaatcaaagtaatttgtgttgtacgataatatcccaagagtgagttcttcaatcaatggtgtaacagcaatctgaagccaactgtcgagataataactggtgctggcattgtaaaatataccagattcaaaccttaatgatttgatgccaatgcctgagtggtttttcagaatgcaatcaactttcttgatgaaattcaagtccggtgtttctatacgaaatataagattaggatgatatcgccagaaactacgaaaagcacgagacacgcacgcagcacgagcagcatcccgtaatggcattagggagtgtatatgactccagatgtcctgcatgtataatcaggaaaatattgtgaatgtaaactattgcctcagttggaagggaaaacagtactagcatatagggtatatccgtatagcgcattggaatttgtggtaggcaaattgaactgcatttttattttgctccttttctctttcaaagttttagtagagtctgtcctgaaaaggataccgtatgtagaccgtcgtcagtgactagtaatgataaactaatatgaaacttatgcttagttaggcaaggactagccaataatatattatatctgagcatatgtgggtaaactaagatgtatgaaatgatgtgttttttgtacaatagcatcctacaaattataaaagatagaaaataaatagaaaaaaatacacatatattctttataaggtacaattctcaacagatttggcagaaagccgatgtaagaaaccaatagctttggcagctacaccgtgagagataatagattgaacagaccaggaaaacaaaagaacgccatcctacaagaatattcacttctcccaccatttatactgaaattagagcgaacagtagtgaaaccacttcacatgaactgtgaagccagcaaaatgggcatggtttacttcaaagctttctcactctcctagtctagacatgttagttgtcaacaatcctgcaacagacatattgcccagcatctcaatgcccactgaagaagattttgagagcagaatgggatattgacaaacatttgtgccacatataactctggttaccagcagtgaccaaactcagatgtccatgggcagttctcatcacttccaagttgccggtattaacttctttatgaaagttagttttcaactgaactaggaaggcatacgcttgatggatgatgaggaagatactaaagacaaattgcaggccaacggttctgtaaacatacattaggaaactgcatctaaaccacagtaatagcagaaaaagaagtacatgaacccggtcactgataaggggagggggggggggggggaagaatctctaaaaaaccaactgcggatctaagacccatcaccaacagttttcagcgggaggggtaaaggtatacggaaaaactgatccgcgatcgatcgcaagggcgatctggtagcgatcagttgccccccctcctccctccacctgatttctttttttggcaccgcattactttcctattttagtaaatttatgcacctaaagtttatacacctcaagtttacacatctaaagtttagagaccaaaagtttatatatccgattcaaatttgaatttgaattcaaatattttttatatatagtatttctatacatctaaagtttatagacctaaagtttttagatctaaagtttatagaactaaagtttataagtcaaaagttttatatacatgtttcaaatttgaatttgaattatatctgatttaatttttaatttaaattcaaatattttctatatatagtatttctatacatctaaaatttatacacctaaagtttatagatccaaagtttataagccaaaagtttacatacccgattcaaatttaaatttgaattcaaatattttctatatatagtatttctatacatctaaagtttatacacctaaagtttatagatccaaagtttataagtcaaaagtttacatacaaattcaaatttaaattcaaattttttatatataatatttatttacataaatttttccaatttttgttttttttaaaaaattttgttgtgtactgtaacagggaagagaagaagaggaggaggaagggagagaagagagacgtacacggggaggggggtgcaggtatcacccgcgcattagcagtccccaaaggtataacagctagaacggagaaaaggtactcatgcagaacttttaggaggttgcagaaccagcactaaagatttgttcaaaaagttttactataggtgccgaggggtgcatttagaggctacttacagcagtgataaactcatagtaatgcttttcctctaatagaagtcttacattatcatcatttggtgtcatacctctggaaggttcaaccctgaatatcccattattttgccgccttcagaatttgcaagttgtagacagactgagccctttcttttagccactgaagcaataaaaaaaatctgcagcacatcacatgtgtacagacattaacaacggaaacaaaaaaatcatggtacaaataaatcagtttggttcccttgtccaacttttgtgaaagaacattcatggctataaatccaatttgtttccattagggaaaaaaaacagttcagtttagcattggtactttttgttgaaataaagaactctctcttttattctacacttctttagagcacatacataacatagtggctcgtcataggttctgcccaagcccaataggcattacagtgaaacttgtcatccagtggtatacatatttctccccaaaacttctcccaaatcttcttgtaagcaagatgcagattcttgtgaaatttcggtgtacagactgtgtagccagtttactagtttagctcaaaagagtcagtttgttctcctcacaaaaaaaaaagttaatttttttcctaagaaggaaccgtgaaacacaaatacacaatacctaaaggtttccgaataatttgctcaagaaacatatgcattaaattctgaacaagatgagagttgagagacactaaagagaggcagaaggaggtaggcttactacgggcttggatatgccgccgctcctgttgcacggacatgagccgcttgaggaccagcaaccccattgacaacacctcagctctgctagaaatcgatggcgccaacctctgatttccccctcctctcggtacccaaaacaagaaaaatcaatagtactatatcgctatttgcagaggcgaggtgagggattctcgccggcgccgacgcggactcccgcagcggaggtggaagggccaacaagccccttgtctgggtgttgttcttgccttctcggcctatgatgggctcagtcaatataataggggcaataatatggtccgtcagtggaggcccgatcacccacgagaaaaaaaaaacgattagtattggtaaaaatttgtcgacaaattttttttccgttaagatttgtcgaattttcagccgttaatctaaccttgacatccatgtactatttgtctcaacgctccatcgacacgcttaactcgctagtgctcgactaccttgtgcatccaatcgtgtagtgtacagtttcctatcaacttttcactctgccaaaaacgtataggggatgaaagtctagtaatgaagagagagagagaggaggtaagttgagaaaaaaatatagtgtaaatatagtacttttagagtgtaatttgtagtaattactttgtaactcatagtaaattacaatgttataatttctattagatttgtatgcaatttatttttttctatttttcactaaatataagttactctttatttttaactaaggttatctttaataatgagttttgtgttatgctaggtatgataaattatacatgctatttttatatgtgtattatgtaagtattaaaaaccctagtgattttggtttaaaaatccgaggtgatctataggtacttaaaatttaccccctcacataaacataaattgtttttcgtcaatatgacgctgacgtgacagtttagtcaatcaaaacaattaaagaaaataagtcgtggactcgtgggtatcactgttagtgctcctaggcccctagctctctctaaccacgcgagaaggccatgacgcatgacgagcaaaacggtggtggaagctggtcgtgccgagcccaaagctctgtgtccttttgttatggcaggtcgtgtcggtaacaccacccccgagcttcgtgtccggctatcagttgctacttgctagtcgtgtcgtgccgcccctctagatgaccaaatgggccgttcggtccggcctgggcccgagaccagctgggtcggtacggcccgacctacacgtcgggtcaagccatatccacccacgggctaataagactcttgactgtgtcaggctggtccaaaagtacaaaaacccatcgtgctcctctttgaaataagtctatttacatatgtcacctctttgggttgtgtcttatatggcttgaataaatctattttgcatccctcatctctttgggccgtggttatatggttagaataagtttatttacccccctcatctatttttacctctctgatcattggactatgtcgtgtcaggtcggcccatcgtgccgaggcagaggcccaggcaccgcccaacggtcggggtaggctagcatgggcttgactccagtcggtgcatgtcgtgcctgggccgagccaaaaccccatgccgtggggagggccctaggccttttggccatctatagccgcccctagtcaaatatgggtgatgagcaaggcaatgacaacaacgacagctgagctagcttgtcgaggatgaacatctctttgcctccttcctcctccctctctctcatccctatctctctcttagcatagatgacgaaggaggcggctctcaatgtggagaagcggcaacacagttgtggtctgaggaggcgacaggtctgcaagtcgatgacactcgggaaggcagcaacgagggaggtagaggaacgatggcgggagtggagcttgatgaggcaacgatgcaagctaagcaccagctctatgaggaagcggcgactaagctcagggaggtaggtcttggcaagacgggaccatggagctcaagcggcggagatcgatagagtggaggtgtatttggcctatagatggccaccctcccgtcacttgctcgagttcgaagcgctaacgtcgccatcacacaaggctctcccgttaaagtacaacctgctatctcctcgtcgatctagaggccgtgtagctagaagaatgggaggtagagaggagtacataacggggagggatagaaagaaatcacgagtagagaatggcaagcttgcaggtggtgggtagtggtccagtggtcctaataggagggtagcagtggcttgctaggtggagaaagtggaggagagggctagagagggtgaggaagaacgtacgcatgtatggccccccaatttgtatagttggcgctcgatatgacgtgatagtgggcctgtatagttggcgctgccgcagctgtacatataaagtactgttggtatagcctgcaacacagtgcaaataagggcagccaaacaggtccagtgtatgaaaactggtagaaaccaactgaagggtctttgaaagttagaagggtcggttatctttttttttttgagttgaggggtttgttcaaaacaatgtgaagagtcgagagggggaagtgtttgtaaaatggacttgcaagaaaaatgagtgaaatacatgtccgatctttaaagtagcatgataagatcgtttagatccttgatactgtaaaatacatatttagatccataatctctgttttatagagatggtagaaattctaaacttcctttaaccgtgtgtaattaccggcatatttttttgcactctatcctaacacacattttttttattccgactcctcccaaacacatactccctccgtattatattttaatgtataacaccattgactttttaaccaacgtttgactattcgttttattcaaaaattttgtgcaaatataaaaatatttatatcatgcttaaagaatatttggtgataaatcaaggcacaataaaataaatgataattacataaatttttttgaataaggcgaatggtcaaacattggaaaaaaaatcaacggcgtcatatattaaaatatggagggagtacacaccacggcaaagaaggccaagattccaccgtcgctcgccatcgcagaggcgtgttggggtttttccgatttgcccccaaattttggggccaatttggattgctaccaaaaacatgccctaacaatattttggtaatttaaatagtacttgtgtttgatttggattgaagcccattcattggtaatagctaatctagtttggcattatctagaacattctttactataatttaacattttgactttatgttggtagcaaaccaaatatgataaaaacaatcttaccttatcaaatatttggtagtaccaaaacttatctagattttgatactaccaaaaagggtaacaatacaaataggcccttggatatcacgcgccccctctcctcacggctgcggctataaattggagcccccttcccattccccgcaatccccccactgagtccagtccagaatcttcccacccaaatttactcctctcgttccctcccccaccaacggccgcgccgcgggtgtcacgatggcattggtggtgctcgcgatcaccagcctcgccgaggcggaggcggtggcgagggagctcggcgggccgcacagcccccacgtcgacgtccgcgtcgagtccgtcgtcctgagcgaggcacccgccatggcggcgatcatgtacgcgctcttcgacgactacggctggctcgtcggcaacctcgacaggctcctcgacctcgccggcgtcgacgagcacctctccatcgtcgccgacgtcaatctccccaggctcgcgcgggacgtgcacgaccccaacgccctcgcgcggctacgcgacagcgccgccaccatcatccgcctcgccaggagggtcggcgggccatccaccgccgcctacaccaacttcggcaaccgcatcaccaagctcgcccaccacatccaggaccccaaccgctcggtgctggagctccgtggccgcctcggcgaggccgccacccgcgtcaacttactcaggtccagccacttcgatttctgagccagacctgaatatcttcaaccgcatctcgctttttgccgtgaggattcgcacgtttcatgtgagagaacagagttcgtcccctagatttgttacgactacctgaacatgtttcaaaatgtcacaaaaaaagtgaaaataatttctgggtggtgttggtatttccctgttcgatttggtataatttgtccccccccctttttttcctttcgaatgaatgagagtatgattggttcatctttacattttctcccatcgtggatcatcctattgcttgctgtctctcagttaatggtttggaattttggatgcactaggatatgcatgatttctccagttttctattgatcccactcctttcggcacttgatgcgattagcgtgtgctacaagaatttggtggaataccgacccggcgaaaattagtttggtcgaatactatcatgtgctttgatcctgctgcattttaaaaaaaaagtaaatggcgtttacagtatacacttgcggggctctggtctctagagagtgttttttttaaaaaaaatcttttacccgagtaattttcctttcgaggaaattataaagtggaatgttcttttaggaaattaatggcgtttacagtatatacttgcggggctctagtctccagagagtgtttttttttaaaaaaaaatcttttacccgagtaattttcctttcgaggaaattataaagtggaatgttcttttgggaaattaatggcgtttacagtatacacttgcggggctctggtctccagagagtgtattttttttaaaaaaaatcttttacccgagtaattttcttttcgaggaaattataaagtggaatgttattttggaaaattaacttgtaaaacaagtagtagtagtagtaagtttaactagaaacaaaggcgcggcattgccacgcccagctgaaattcagcgagctaatttgtccaaagtaacagtaactattacttcatattaagaaggatccatcatatgcccttccaaagatctccatgcggcatatgcaccgtacgtccttagcaacttgtgattttgctaggaaccagcactactttccttgtgtaaattgattaagtccaggaataacatatacaaatactatcacaacctgacagacaagatgaggtactaagactgcatatttatctttcctaaacattatgaattactaatataacaaactcatttgccaatcaatcacctcttctgaatgtatactcaatttgtgccaaacatagatttgttgtagaatcttttcagtgtattcagtacaggctgaaatttttagagaaaccttcgacactacaattcaaagccaaatcatacaatattttaggacctgtaaactggggcctgcctacccaatcagggagcaaaaccgtagctcagcaatcaccatgaagtagttggcagcctctgattggcctgatccttgcttacctgtctcttgttttttttttttgggaacaatcaccggaggggagaggttccccacctgtattccattgcaaaagcactgaggttaagagtacaaattatctcttgttgacccagcttatacttttgtgagagggactaaagtttagtccctacttccgaaacaccaccttactatatggctgaagatagaccaccacaggtaccacttgctgctgatgttgctgtgctctagaactctttggccatggcaagtcctggagacctggagtggtggccattgtttccactttccacagcatgagcacttattgatgatggaagatggaaccaatgacacaacaataagcaaagatagacttcttctccgtgtccctgtggctagaaaattagtctccccatctcacaaaaaactcaacctaggagggtcacattcccttctaaattgagttttttttttgacagagaggatgtcacaccccagtctggcaccgccgtacaacggcacatgataggagcgtgtcatagaaaaaacggcgcgaaccgcttcctacgaaaccgcgatctcagtaccagtcccaggacatagtgctggtacccacggtgacaaatatgattcattgcaaatccttaaaataaatagatgacttatttaccttaatttaggttgcagcttagaacagcctgagaaatgcaaccgacgacgcaaacgaggaaacaccaacaacagcagcagcagcggaaccaacggactaacacccaacaccacaggcgacggctgggaaccaggacgaaaccctaatcttcactttacttcatcttcaacttcagggtggaggaactatatatatttatatagagcaagggtgagtactttcgtactcagcaagtcacgggaatttagatgtttgatgcaagcttggaagagaggcaaggttgttttgcaaatcttttgtttgaaatcattttgaaatcactaagtgaattatttctttttaggtttgggtcgaaaagagacttgcgtctcgattcggcttaagagatgcttttcaacaacttaattggtaatgtaccgacctcccgggtcagatcattacttctcggctcccagagccatttcacttgattaatcggctcccagagcctttttcattttctcgaactcccaaagtccagctgcccagcagcacaacattccgcttccactcgggaagcctagtctatgatgcccgtagacatcccgaatcacacagattcgtttctgaccactcaggtcatccatctgccacataggttgattctggttacgattcccacaccacaacaacttttcacaaagcacatgcaaataaatctacgcaacaggaaacatctcacatccgcccatgaccgtgggcacggttgttcggacagttagttaacctctgcagagggggtacactttacccacacgacattactaacccggatgtagcgcccgttccgtcgtggcgcctagcgggaaaaactatctcttaaaaaccctatttgcgaaatcagtttccttgcttgttgtctagtgtccgtgccatctcagatctcaaatccccgatctatcgtcaagttcaatcccgaatccaagtccttcccaaatcaaatccctccgcaaaagtctattttgcctccctcgggttcgatgggccgaatccctctcggcccatctccccctccctctctctctctctctctctctctctccctctctctctctctccctctccctctctctctctccccgctctgcccgtgaaccgcgtcgagctctccctctccactctcgcggctgttcccgccgatgccacccaaatcgccgcgccgcccgcgcgtgcgcgcgcgccgtggtggccgaccggccagtcgccgccgccgtcagcgcctgccgcgcctgccccgcgtctgccgcccgtgtctccgctccactccaaaccgccccgccgtcatcgccgtcgtcatcgactcggccccgcctctccccgcgcgtgcctccaagggacgggggcagagctcctcctccctctgccgcgtcgccctctctccctcctccttttccccaaagcggcaaggaggcaagccctctttctttccccctttttcccttttccctcccgccggcgtcatcctccccccctcctgtcgccgttttggccgcgagcgccgagcgccagctcgctcccttgaccgcccaaggtcggtttccaaaccgacatcgccgccctataaacccaagcgcctccctcttttccctcccaatcttccccgtttctcgcccgcgccattgctgtctctcccgccagccgccgccgtcgcgtgtgccggaggagccggtgcgcgttaggacgcggaaggggactccgggcgctcgccttcttcctcttccccgacccgacgccggagagatcactcccgtgccgtcggcctctcgtcacaacgccccgcctcatctcggtagtgcatttccccgttctccctcctcgatccatctcctccccttagttttcggtagtagcatgtgtagccttcccgtagctagctagcgccgccccaaccgttgtcgccgctcgctgtgtgctcgccgccgtcgccgccagtgctccgtagcgcccgctcgtcgccggccttgctcagcgtagctccacccaatccgacgctagcaacggattcccgtagccgcgtagatgctctcaccgccaggaatcgacccctcatgacctcatcgccgtttcccccttccctcgccgccggttgccgccgccgtcgagctccctccggcgaatccgagccgtcggctcgtctcccctcatcctgtgcaacatcccggtgtgctcgccttcgcctgtatcgccctggttcgctccgccgctcgccgccgtcgtccgccatccgttccgaccggcgtcgtcttctacctcccgccggcccgcgtggcagccacgtaggcgccacctcggcgccacctcggccgcgaccggatcggctgacctggccagccgctccctccgtttccccccccccccacgtgcgcgtggtccacggtgagccgtgaggctacgcgtgcgcccgccgcaccgcgtcctccgcgaaccgcgcgcatgcgccgcgtctccctccccaaaccctagcacgccccgcgtgcacctcgctcacgatgagccgagtcgccgacaagcgggtcccacccaggaccacgcgggatggacccggcccaccggctctctctctcccctcctcgcccgtgcgcgcgccttgggccgccttcttgggccggccggcccattaagctcggccgagccgccccattctctcgggccgcgccctagccgcccgagggaagtctaatttccctccctcctccttttcctttcttttctttttcaaaaaggatttaaataaatccttttcctttagaccaaaaatccaataatctgagaaattcaatatcttcccaaccgtaagtccgtttgactccgttcaacttccaaaattcctcaaatctcgagatctatctaatggcacgcttagaggtcattaatagggctttatttttgccgtttgttgagttgtcccgtttcgcgtgtagtttcggagcccgaagacccgtagtgcgaggatttcgaggatcaagctcaagatctcgagcaaggcaagccacccttgaacatcttgagcctatatttgaacttaattatgttgcttgaaaaatattatgcattgataggatcgcacttaatccgcttgtcccgtctgcaaggcagattggcggacctacctaatttgttgcatttgacccttccattgtaattgttataccatgttcccttgtacccacctagttgcgcctcggtaatcgtgcactctgcacgggtatcgacggtcgccttcaaacttaaaatctgagaaacatcttgggtaaaacttgggttttacaaaagatttggaaaacccgacacctgggccggtgcttgcgaactaaatgaatttccaaaaccgcggaccgggaaacgtaccgggtgtacggtttcccgctcttgcacttaaggaccgtttccttggaatttcatccgaacataagacaagtgcgaccacatgggtgaaatgggacacccctgactgagtaactagcttatcgggggagccatgatgctaagagacatgtggattcgccggggtggtgtcggggaggacccctgggcttcctggcatagtatggtctgagacctaatctggtgttggtctgggacccctctcgttggcatatggtgaacctgtgtcggctttcgaaatgccttgtcatgaaatccttaaggtctctagtcgtggccgttctgcacgggctggatgattcgggttagtaatgtcgtgtgggtaaagtgtaccccctctgcagaggttattaaaactgttcgaacagccgcgcccacggtcatgggcagatgtgaggtgattcctagcgtagttttgtttgactactgctttgtgaaatttgctgaagtggtttgggattgatgtttggaaaatctgcggctgatgggatcagccaggcctgggtggccgtttgaaagctgttggccgggtgccaatcttgatcaattcaaaagactgatacattgcatatactccgaccggacgagacgcactgtctcatccgtgtcgtttgagaagcactcacttagttgtttcagaaaagagttcaaataaaatcaattgcaaaaacaacagcccttccttgaagcctgcattaaacacttatttcccatggcttgctgagtactcccgtactcacccttgctctatataaataaccccccagttgctgaagaagatgaagcggatcccgctgacgaggagttcttctaggagcaagccggttacgatgagttttagggtttcggcctagttctcaagtcgcgcctgagatgtgtggtccaagtcttggcttccgcttcccttttgtaatgcagttgtgagctcgggatctgtccgcagcccaacatgactgtactcctactctataataaagagacctctgttgctgtgatattctgtcttcctgtgataccagcactgtttcctgggactggtatcgattaacaggttaatttgaagcgtcacgggctagttccgctcgggactagttcggggcgtgacaccggatcacccagctcgtgagatcagccacgtcgggagaccttaaggctttcatgacaaggcatttcgaaagccaacacaggattgccatatgccaacgagaggggtcccagaccgacaacaggttaggtcccagaccatactgtgccaggaagcccaagggttctacccgacaccaccctgttgaatccacatgtctcttggcatcaaggcttccctggtttgctatttactcagccaggggcgtcccattgcacccgtgtggtcgcacttgttatatgctcggatgaatttcccacaggaatcggtccttatatgcgaatacgggacagtgccacacaggcacaacccccgcatcgcgagttttcacaatttattttattttcaaacacgccgacaccacatgtcgggttttcaaggcttctcaaacccatttcccaagttttcgacaatcaacggtgtatgtgggatatttggtatacgcactcagagagcacgaataccgaggtaccacaagagtggagcgacaaggaatcagggtagtacagcctataggaatttgtgcgactactaggtaggtccgtcggtttagcacgcaaaccgaggccaagcaagttaagtgtgtgattctactaatgcaagttgcaacaaaataataatgattttccaattataggagcaattggtcaaagggtgacttgccttgctcaaggtcttcacgaagctggacgagggatgtatattagactttttcgggcggcaagggcgcggcccgagggttgaaggaggctcggccgagccatttgggccggcgcgggcgcggggaaggtggcccattagggcgcgcggaagagagagggagcggtccggtggaccgagtgcacctcgcgggttccaggtggggcccgcttgtcggtgacacggcccacggtgggatgggcgcccgcgagggcggcgctagggttcggtggggatggcgcacgggcggtgcgccggatggaccgagacgcgtcgggcccacgcgcagcctcacggctcgcggtggaccgcgcgcgcgagcgggagacggagggagcggctgaccggggtcagcttgacctggtccggccgagctggcgccgacgtggcgccttcgtggcagccacgtgggccggcgggaggaggaagaaggggaggccgagatggacggcggacggcggcacgcatcggcagaacggcggcgaggcgcggcgagaggaagggggaccacaggagcgatgagcggagcgaggaggagcgagccaacgggacagattagaagaggaagggccgacgacgacgaatcgtggcagaggtcaccgctggtgagaggaagagggaaactcgccgggggggagagggatcgattcacggtgggggaagcacctccggcattcaaggaatgtgtttccggcgccggatgggacggaggtgcaccgaggagggccggcgacgagcggcggcctccgggagcggacgacaatggcggcgaggccatgccgggcggcagcggggctcggggcggcgtccacgcgcgttcgatagagctacgggtgctagctcaaaagataagggcacgagagagagcgggagggagaacggaggaggcactaccgagccgggcgcagtgatgggcggccgacggcgcggggcgagctctccggcctcgggccggggaaggggaaggagaagggtggccggagtccgcgtcagctcctcgtgcgcacgccggcttcaccagcacgcgcgacggtggagggaggcgaggacggcggcaagatggcggggatggtggttcggcggcaatggcgctgtgggaggaaacgagtgggaggtcgagacgctgagggggctcgggtttttatagcggagggggagaggtcggtttggaggagggaaaccgacattggcggtcaagggatgcaggggcgacgagctggcggtcgtcgacgcgtgcagccaaggcggcggcaggtgatgacgctggcggtgtcgggcaaaagtggaaaaggaggggaaaaaaagggggctctgctctttgccgagttggggagggagagggatgggagcgggagctcggcctcacggttttggcaggacacgcgtggagcggctcgggcatgcgctgcagagctcgcggcaggcagcggggccgagcggcagcgcggcgcaggcgctgacggtggcggcgaccgggcggtcggccacgaccggcgcgtgcgcgggaaccgaaggcggtggcgggttcaaatggcggcggcgggaatcggtgacggggagagaggaacagagagagcgagagagagagagaaccgagaggaaggagagagctttctctcccgagcggctcgcgtgcggcgcacgtgagaagggggaaggcagctgagggagggaggagggctgagggagagaagtgggctgatgggaggaaatccggcccatccaaaacaagaggaggcaaaatagacttttgctgggaaatctgatttggagagaaatttgatatggagtttgaatttgaatgcaaaatgggaatttggatatttttggagtcgtgcggatatttggcaaggttttcaagagaggatttgaatctcgaatacttgaatcggaatagggatttcgaggagaaggatttgatggcgacgagagggatcaaggacagatttgaattgagatccacggcacaacttagactcgcacacaaggaacaaaaattttcgcaattaggattttgccgaattagtttttaacgtctcacgaaaagcggagcgttacagaggagtagtaagctggtgtgtgcaatgtgttataggcttatagctagaggcttaataaaggggcagtaaaatgtggtagatgctacttggaaaatcatctagcactcctatctgaaataaatggacatcttggcatcacctccctatcgccactaatcacctagtaacttgcatggaattcggtataagagatatggcctttttttaattaaaaaataaacatgtgtttagaaccaacagaatgagtacaagtttgtgttaacatgaaaatgggatagtatacatgaacgtattaaggaaatacatcaagctgctaattaaggacaaaaaggaagagcacatgatcaagtgagttcaacaggcaacagcaaactttacttccatagtttcactatcatcttaaacactgctatgatattctctgtcctcaatgcgactgtaccagataacaacacaactcttgttattattcgtggagaccccatattgcagaatttcaatcacttggtactaccggccactactcccagccaaggctccgagcatcaactactcgccaagagcttcagtcacctgcccagcactgcgcagcccagatatcatcatcaagtaggtgaccatgtctggctgtccggggctataccattcgccaccatccaacacacaacctcattggcagagtcaaaacaatcactggaggcgtacaacccgacgagcatcgtgcacgccgagtcgggcgaaatgccatccgcagccgtagcgtccagcacggcgagcagtgcgcccgggtgggaagcgtaagagagcgccgcggtggccgtggtgaagcaggcgtgcggcgccggaggatgcccatttcgtcgagcaggtggaaggcgcggtccgcgctcgcgccgttccccgacttgtagttgcaggggttcggcgaccgtagtgcggctgtgtcagggtaggcgacgtaggccggaaggacagctgcttggcgaggtcgacgaatcggaggaggaaccggtggtctcggaggaggaggcgatggaagggggagcgcatgggtggtgcggaaggaggatgcggcggaggcgacatctatcggagagcggtggttggttgtagccttgcaggatgcagctcacggcggagcgcgctacgtttgggcggcggacaacggccgaacgacgggaggagcagcgctggcggcgaagcgagaggagtccgactggcggagctgccgaagatggccgagttcagattaacgcttttgcaaaaaaaccctccgcaaactacgtactccttccgtcccataatacaagagattttgagtttttatttgcattgtttgaccactcgtcttattcaaaaaatttatgtaaatataaaaaataaaaagttgtgcttaaagtaatttgaataataaagtatgtcaaaaaaatgaataataattccaatttttttttgaattagacgagtggtcaaatagtgaaaaaaaactcagaatcacttatattataggacggagggagtatattgcaacgaggtccaccgcacgagatgagacccgatggctgcgcgcgactcaatccgcctgcgccacgtggcgccgctaatcgcccggtaatttgcatggaattcggtactcctgccaccctcagaaatttctagaacagcctacggctataactacacgccatgttccgtggcatgcctggtgacctgtaaattctctttcctctcttggctgagtttgatgagaaggggattgataagattggaaagatacgcaaaacgagatgagtcattagtgtatgattaatttattattaactattttaaattttaaaataaatcaatatgattttctaaagcaactttcctatagatttttttttcaaaaaacacactatttagtagttcgggaagcgtgcgcgcagaaaacgaaacaaacaaactcacaatgtcattgtgccgaacacagccggtcggctgtttgccgacccggcgaaataattcccagaaggggagagagactccgtaatctatcatggtctttggggttaatgaagagaacgtgaccaatgtaaaatacaaaattaaacattgaactgtacaaaatatacttagtaatttgagacagaaattaaagcatgagagaacaaacacacaagataatcatgttgaaaaaagaattacaactaagattcaattatatggcaacgggggcaaggtttcacaacatttaacttaactgtggaaggaacttttcgttcaatttatgtttcgatagccaacatagccctgttggctttagggatcatggccttgtccataggaaagcattggctgtgtttacctgtagaacagctataaacaccacgagtagtatccagtgtaaggtactcaagtgacgttgtacagtcaagaatacaacatgttagctcgatcaagctcttcgcggagcagaaacaagtgatcaccacactctggaggttgtcatgacgatattcttgcatctgcctcatatttgaggaatctccaaaaattgagtcatcctccatgctgtcctttggtatctggagatgaaaagccaaatatactttaattgatggttactaccatagacactagataactttgcagaatgaaaattatcttacacccagaagtaaagtctccaagaaaggagaagcatcaagaaaagaaactagagagaaataatcatatgcatgggaaacttcagcaagatcgatagtcaaacacttgagatggaggaatttgctaggcaacattggtgtgttaaccatctgcataaatatgatgatcatcagactggagacattcttctaatgtgtaagtattgttatatgaataccgcaagtgtattttcgagtttttgagtgtacctcgtgatacgagcaaatggtgagagtttcaagatttggcacattgggtatagactctacacgagcataatagacagcgttgcaatagtattgcaaagatagtgtcttcatctgcaacgattcaccaagcaagagttgtacgtgtttacctccaaaatcaaaactgcaaatatttggagccttattctctattacttgcagcattctgcattcaaacactttcaggtgattgaggcgttgcaactgacaaggtaccttcatgcaaactatttcatcacaatgctcaagttccaaccactccaaagcataacaactgaagagaaggcaccctaactcatctcctgtaatatggacattaaacagatgcaacttcatcaggcttctcaagtcaaggttgattgtgggatggaagctacaactgccaagataaagatgtcgcattgagcttgctctcccatcagacagaattgtgcatggtaagttgtactccacattttatgaataatgagatagcctaagggagagtttttcgatccatggtgtaatagcaatatgaagccaactatcaaaatgatggctgatgctagtgctccttctagtattgtaagaactatcatattcaaagtttaccgacttgatgccaatgcctgagtggtttttcacaatgcgatcaaatttgttgatgaaatccgagcccagtattccaatacaaaatataagattgggatggcattgccaggaacgatgaaaagcacgagacacacatgtagcacgggcggcatctttgaatgccattagggagtgtatatggcaccagatttcctgcatgcacaagcaaggataaaagattaaaaaacaaactattgtgaaggtaaacaactggttctattggaagagaaaacaatactagtagcttataaggcataggagcactaaagatccattcacaaaattttatctaggtgacatactgacataggaccaccggtgtgcacagttagaggctactagcagtcatagactcatagtgaatcctcacttctaatatcttagaggctacttagagtcttccattgtcggcttttggtgacatacctctggaaggtctagccctgaatatcttgtttttttgttgccttcagaatttgcaacttgttgacagagtgatccctttcttttagccgctgaatcaatcgaaccgtctgcagatacatcaggcatggttatgtacagacatgaacagggaaataaaatagtaaggtggtgtccttaacagctgtcctatacccaaaacctccttatatgctttcaaccaaagcagggtactagtaatctcttgcttcaatagaaaaaagtagtgaactgtgtcaagttcttgcttatattggtcattggaagcaacaaatgcaatatagttttatgggtgcttagcttcatcggttcccccatggagacattgcactccttcctagttcctcccaacttaaccccatatttacccccatacaacccatactacagtaaaactaggcacggaggctcccatgttatctttgggagatttgctccgatccaataaaaagtacatcgagctaccggtaccgtgagacatcaaatcgtttttaatcgttggaacggagcaaatctcttggatctaacaatgccaatcctacctaactagatctaacgatcaaaaatgatttgatatcatgaggtaccggtaactcgatatactttttgctagaccggagcaaatatctatcttttcacacctaaagtcgatctcatattttttttagtgcatggatgatgacagtcaaaataaacattgctcatcgcactactgcacgattgattttactggatgcccccctttttgtttccatgcggtccataagtggaaccacacggaaaaatagggaaccggcgctagggtgtcgcccgcacgggaaaattgattttccggtgcggacgtcctaatccaaccacacgggatattcctccctcctttccctcacacccacttcaaatttttcctatctctctcttcctttttcccctttattccctctcaatcactcccctttctctctaccttatctcttcttttatcccgtcctctctctcagcctccctcaaccctctctctataccttatctcttctccctcaaccactccctcaactggctggggcgaggtggcggcgctcgggcgcggcggcggcctaggtgaggcgggggccaggccgaggtggtggccgggcgaggcggccaccgggccgaggccggtggttgggcgtgaggcggcggtcgggcgtggtggcggctgggcgaggcggccgccgggccgaggcggcggctgggcgatgcggcagtcgggcacggcggctgcctgggcgaggcggcagtcgggcacggcggctgcctgggcgaggcggcggccgggcgcgacggcgagcagtgaggcggccgtcaagacgtcgccgagggcgctgaccgcatggccctcaccgtcgacgaccacggggctgtagccgacgacttctgcggcgccaccgcctcaccttccaccaccgccacaccttccaccacctcgtcgagaacgcctacctcccccacgtcctcgccgagggccgcgccgtcaccgtccgcaaccgccagcgccgcctcttcaccaacgggtgcggcggtcgggcgcggcagcggcgtgggcgaggcggcggcgagcagcgaggcaaggcttcgtcgtcgcttgtcgtcctcctcatggtcgtcacgtgcatcgtcaaggcagcgatgcggcggccgacggcgatttttgcttttttttttttggttttttttttgttccgggtggaataacacaaccgaacggatatatcggtcgttctgcccgcacacaaaaatgctgattttcacagacacccggctgcagacgggccgtacaaccgcacggggaaatcttgtctgtagtagtgtcggtctaacaaaaagaaaactgcgaatatcacacaaacattgccgagtaaatgttgttgcgacggccgacagtaatatgaacaggttacagatggcaaagacggtatatatggagattagattagagaggcaggaggcacgatggagggaagcttaccacggcctcggatgtgccgccgcttccccatgacgctgacgcggcggagggatccgatatcaagcagagaaatcgacgatttcgccgctcttctccctctctctccgcctatatatttcgcttgttcaaggggagaggaggaggaggagatgagaactcgccggaggccgtacgtcgtcgtcgccctgatctggagcctcgcggagttgcgctgctaggtgcgagagaaaggagatatttaactcatcgtaatatggaacggagggatttgtagtactacggtctgatactctgatctattcaggttcatagtcctaataccgaataaaaaccttccatagatgatactagtatctttgaattttgcccagatcattaatgaactgataaaatctggacaaatgtcgttttaataaaaaaacaaaaaaaatcagcttttttttttgacttacggagaaacacgtacggccgctgcatcttatccagtcctgttaagtttcttctcattttcctagcaaagatggcgattctgacacttcgtttgtcggatgggaatgtttggtcgcaccagtcattgcgagattagatcttactctttactctctccgtcccttaatataagaaattttgacatttattatattgttttacctttgtcctattcaaaaaactttggaattatttttttttgacttgctttattatccaaagtattttaagcataactttttgttttttatatttacacaattttttcaaaataaaacacgtgatcaaacagtacaaataaaatatcaaaattccttgtattaaggtacaggggagtagtttctttggttttccttcctttatcatgtccccttccccccttttgtattatccctgtaaataacttttacttctccttgatacaaaatgtgcttcttatgtattccaaaaaaaaacattattttcattttatttgaatcttggtcgttcatattttctaatgataaaacggaaacttgcaaatattctccgcgcgtcagttttggttacacctttttttttgttaacctgacactttagaacaaatattttcccttctttctgttaatataagggaacttgcaatacatctgatgcaccatggttaaaatttcacaagcaaaagttatagtaattgtattatcctgttcaagatttgatgataaaagcaaaactatataattatctattggacagttctaattagtagttcaagagagaaagcaccggacactttaaaatcaccgaattaccaagaaaattaagttgaagaaaaataataattacaaatatgattcaacagcatggcaacggctgcaaggcttcacaacatttagcttgaccgtggaaggaacttttcgctcgatgtatgtttggatagccaggactgcccttttggcttccgttatcatgattttgtccataggaaagcatctgtcgtgttcacctgtagaacagctgaaaaaaccacgagttgtatccagtgtaaggtacttgagtgcaactgtattgtcaagaatataacatgttagctcgatcaagctctttgcagagtagaaaccggtgatctccacactccggaggttgtcatgacggtgtcctggcatttgcctcatatgtgaggaatctccaataatcgagtcatgctccatgtggttctgcgatatctggacatgaaaaccaataataaactttttcatttgatgggctagtcacttaatcataagtttgcaggattaaaattgacttacacccaaaaggaaagtctccaaggaagggcaagcgtcgagaaaataaaccaggtaaagataattataagctggggaagatgagataatggtatgatcaatggtcaagcacttgagatggaggaatttgctaggcaatattggtgtatcaaccatctgcataaaaagcataaagatcatcaggctgaaggcatgaatattgttatatggacatcacaagtctatgatcatttatgttttttgagtaccttgtcagtcgagcatcagagggtgagagtttcaagatttggcgcattggatggaagctttgcatgagcataatacatagcatcggggtagtgcaaggatagtctcttcattcgcaacgattcgccaagtaagagttgtacctgcctacctccaaagtcaaaactgcaaagatttggagccttattctcaactacttgaattctgcaatcaaacacttctaggtggctgaggcactgcaacagggaaggtatcttcagacaaattattccattgcaatacataagttctaactgctccaaacaatgagaatttgagagaaggcaccctaactcatctcctgtaatatgtacattaatcagatgcaaccttgtcaggtttctcaagtcaaggttgattgtgggatggaatccacaattgccaagataaagatgccgcattgagcttgctctcccatcagctagaagtgagcatgggaagctgtactccatattgaatgaagatagagataggctaatggtgagttcttcgatccacggtgtaatagcaatctgatgccaactatcgaaatgatggctgatgctagtgctccttctagtattgtaaaaactattatattgaaactttaccgacttgatgccaattcctgagtgatttttcataatgcggtcaaatttgttgatgaaatccgagcccagtattccaatacaacatataagattgggatggcatcgccaggaatgacgaaaagcacgagacacgcatgctgcacgagcagcatctttgaatgacattagggagtgtatatggcaccagatttcctacaagcactagcaaggataaaagtttttttaaaagaattgtgaaggttcaattggaagggaaagcagtactattagtagcttataaggaatagctctttgggatttgtggtacgcaaactgaacggcacattttcatttttctccttttccctttcaaagttttcttagtggctatcgggaaaaagataaagcagattgtagccagtgactaattatgatcacatagtatgaaacctattcttgcttgaagtatgcagcggtagtcaacaatgttatgtatgaaatgatgcttttctccctacaatatcatcctataaattagtcaaaggtaatgaagaaaaaaataaacatgtatcttaaggacaaatcgcacattgggggttctggtaaacataaacattgatcatcaggaaactggtcgagaccagagtaatcacataaaagaagtacaggaacccgctgataagtgaggaagaacctttagaaagtgaactgccttaacaagattattaaggtgacgccatcacaaacaattttctgcttgagtgataaaggtgcaacagctagaacagagaaaaggtgccctcatgcagaattgtagaagattgcagctataaatatctgttcataaatctggatcaggctcctctaacttcaaaggcacgtgcctttgtcactaacatgtaggcccaatgaaccatggacccatctgtcagtgacaaagacatggtacctttgagtttgaaggtagaggatctcaatccttttgatctagccaccatatgaccaccagtgtgtagttagagactacttagagcagtcatagaatcatagtgacccactttgcttctaatataagtatttcttatcagcattaggtaccatacctctggaaggctaggcactgaatatcttgttcttttggcgccttcagaatctgcaacgtggtgacagaatgagcccttccttttagccagtgaagcaattgaacaaacacatcatttgcgtggttatatgcagacatcaatcaacaggggaaaacatcagatcaaagcacatgaatgaacacgaacaattcaatttggttcagttgtccagctttttgtgaaaagagcgggtattcactccaatttgtttcattacttcctacaaatcaaattcaaccgagcattgctaccttttacctcccaaaagaaaaaaacaattctacactattttgttcctaaattccacagatcataatgtcccattgccccttcttgaattgcttgcaagcgagatgctctttttttccccaaaaaagcaatcgtggctatcaaacacaattgctgaagaagaagaaggtaggagagggagggctactgcggggtcggagttgccgtcgccgccgacggcgatgccgctcctgtcgcgcagacatgagacgcttcggatccagcatcttccccatggcaacgcggcgaatacctcgccggaattcgcgccgtcgccggattcgcctcgctgccaccgccgcagcagaggtggagtccgaagacctaagggcaaagggagtccgacatgggccggtcctgtgctgatatgggctttctgggctgtgatgggctcggacgatagagtccggccttcacaaccaggcccatgtcggtggcagcttgacaaactgagtctattcttttttgttaatgaaattcatttctgatcttcacttcaaagaaatcacaactaattactacaaggttatacacggctataaaattagaaaaagtgatactacctccatttcatattataaaacattttaactgttttagtcaaacttatttaggttcgaccaaatttataaaaaaaatattagcaacatgtacaacaataaattaggttcattagatgcaacattaaatatattttgataatatgtctgtttagttttataaaatgttgctatatttttctttaaacatgatcaaacttaaagaagtttgattagaaaaaaaaatcgaaacgagttataatataaaacgggggagtaggcacatgaatactagccgaggcggatcaatgttacgttgacaattcaagagatggtgaatgaccatgcatgagattgaattagctgcaaattaagctaaagggacacacttggttaagggtatgtcttcacataacgtgttgtagaagtgattagagcctttgatgttcagggacgaatatactccctccttccctaaatgtttgtcaccgttgacttttttaaacatgtttgaccgttcgttttattcaaaaacttttgtgatatgtgtaaaactatatgtatacataaaagtatatttaacaataaatcaaatgatagaaaatgaattaacaattacttaaattttttgaataagacgaacggtcaaacattttttaaaaagtcaacggcgtcaaatattttaggatggaggtagtatatagctagtctgttgcaagtcaataccctcggagaaactgccttggatgaaattccttccttccctataaattattacaccaaactatacagataacataggcagtgacacgaatcatggcatatccgaagcataactcgcaattagtccgcgacaccgaccaatacgcaaataatctaaattcttacgagtacgtgacatgggatcagcggatatatcatatatgaaccggctaattaatctaaaactctaaacttcataactctcttttctttccccaagactaacgcaaaatcatatacacacgcaaaatttaggaggaaattgaacctatcgatttattttggccgtcgaatgcatgctgagattatggatacgcgctgaaagcctgtttggcacagctccaacttcagttccacctctcctcaagctggagctcagccaaacagtttcagctccatctaaaattagtgtggagctgggtggagctctctcacaaaatgaacgagaggtggatttaggtttaaatagcttcacaactccactccagacttaactcttgcagctaaatttaagagttggagctttaccaaacagaccctatgattcgtgtaagttgtaagggagaaaaatcgcgtgcgggggatgactataaaatgcccttgctccagagcgagcaaattaagcaaaagaacttggtgggcacctagcactagcagcgactgtggtatatatgggaggaggaggcggcggcggcggcgcagcctggctggcgtggctgctcgtcgtcgtcgcggccatcgccgccgtggggcacggcggcggcgtgcagccgctgtcgcgggtggccatccaccgcgcgcgcgtcgcgctcgacgcgtccgccgccgtgcgggcgtcgccgtcgctcctcggcgcgcaggtacgtacgtgagcgtgcgcgtcctttaatccagcttttgctgtgcgccctccgttcctgccgctctctgcgttctctgcaacgcacggcaaagctactacctccgtctcaaaataagtgatgtcataagtatccgtctcaaaataagtgatgtcgtaagtatctgtgttcaacgtttaaccgtttattttatttaaaaaaattaaaaaaaatagtcacacataaaatactatttatgttttaccatctaataataaaaaaataatcataaaatttttttaaataaaatgaacggtcaaacgtttgttttgaaacgagtgaagtactcgaccacactacgcagtagcaacattgcgcgtacctaattaggtatactcgctccattacatcttacaagtagctttaaccttttctactcaaactttttttgagtttgatagtatcactagaaacatttagctacatttataacatcaaatttaaattagttttattaaatttaacatttaatatattgtgataatatttttgtctttgttgctataactttgtataaatttgatcaaactttaaaaaaattgattagaaaaagttaaaataacttataatgttaaatggagagagtttgcattagcttctcagttggctactaccccgtatttcgtaagtgcattatccaaaccattaagttatatttttttaaaaaaaacttttgtacgtaattttttattaaattatgtttaatttataataattaatattcaattaatcgttgggtaataactgttcgtacgtaccaaggaaaagccatccattccgttgtatcaaaccgagcctagcagtgtttgaggaaaaagaaatgagaagatattcaaaacgagataaacaattagcacatgatattttaaacttgaaaaataattactatgaactatttaaacaagtttcctatatttttttaaatttaaaagacatattcctccatctcaaaataagtgcagccgtatgattcaaatttgaactacagcgttacacttattttcgaacgaaaggtgtatcgtttaacagttttaaaaacatgcactactgtaaccactcatctgaaacgcagccttagcgacaccacacaagccaagcctggtttagttcccaacgttttcttttcaaacttctaacttttccatcacatcaaaaattttatacacacataaactttcaacttttccgtcacatcattctaatttcaattaaacttcaaattttggcgtgaactaaacacacccgagcgatttacttcaaattttagaggatcagatccgacgaaattcaaactaatcaaatgaaagtgtaaaaatccttcatcacaagtaatgcgaataaaaatagtgaccggtcaaacaataccgcgcgtcgagtcaactcccggccccaaaacttatcaatctgtccccgcgcatgtgaactcaaacccatccgatcggttgactcgcaactgatcatgcgtagtaccccccgaatattcggacgagatgatcacatcatcacgcgtcccctagaaaaacccactccgccgccgccgtcgtcgcgtcgcacgcggcgccctaaaacagcagccgccgcgccggccgctcgccacattcacacgagcggggccggcctctctcacgagagcaaaccaacaaactagttcggcgagcgagctcggtcaatcgggataccgccaaagagtgcgtgcgagtggcaatggcgatgccgctgggtgggattctcctcctcttcctcgtgctcctcgccgccgccgcggcgggcggcggcggcggcgtgtgggcgttctcctcgtcgtcgtcgtcgtcgtcgtattccaggatcggcgagcagccgctgtcgctgatcggcatccaccgcgcgacggtcggcatcgacgccgcggcttccgtgcaagcgtcgcctcggcttctcggtgtcaaggtaggtacacactcgtctcttcgccctgctcgccggaatcccgagctccggcggtggttcgccggccggtttcgtcttagctcagctcgccgttgtgtttggcgcggcgaggagagacgacgacgtgtttgcgcgatgaaccgtacaaaatttggatagataagccaatcgccgtcgccgttgcagttcggaacgaaatcaaatttctcaatatctcaaacatctcctaatgatatcaatcgttcttcctctcgccagattggattttcttttttttttaaaaaaaatggagaagatgattacatcactagcctctgcatgagtcatgaacaaaagctggggatcggggccctgtttagattccaacatttttcttcaaacttctaacttttctattacatcgaactttcctacacacataaattttcaactttccgtcacatcgtccaatttcttcaaaattccaattttagtagtgatgccatgtttttagtggcgaaatgtaccatggatattcttcgaaattgattgattgattgattggtggatgggtttgagtgtattgcccatgcttgtgctagattgctagtgtggtcacaggccacatggaattgcttcccacgcctgatagggtcaaatggtatttgcttcgactttccatttgtcagtgtacggttttgatgcactacgatctgcatgattgatcccatttcgtttttatcttaaattattgttgctcctattggtattcgatgtgatcgaatcaagatttgtctcctcgtaaaaagaaaatcaggatttctttgacccatttccattgtttatctgacactgttgtggatacagggggaagatactgcctgggtaactgttgatttcgcagctccgcatgcgagtgacggcgattggatcggagtattctctccttcaaatttcaagtatgaaacaagtatatttgccatggatttcaaaatttgaatagtgagaccatgtgatgtgagtttgtagattacaatcacaatgaccatgatctgatgaactcttgcactttcctgcagcgcgtccacatgccccggtccttctggatcagactcaggacctgttatatgctctgcaccaataaaggtttgtaggaataatagcatcatgtttgtaaaagttctgcaaatgaactcctaaactgattttttttgtatgtctggtttcagtatcagcttgcaaattattcttcagattatggcaagacaggaaaaggcactctcaagtttcagttgatcaatcagaggcaggacttctcctttgcactgttcactggtggtctctcaaatgtgagttcaaaacatcacattgtaatttttttttagataattcacattgtaattttatccagtccttattactaaagaaatggcaactgacttaatgtatttcatttccagccaaagcttatcgcagtatcaaataagatcgccttcgcaaacccgaaagctccggtttaccctcgtctagctcaaggcaaatcctggaatgaggtgaattatcttcttctctctgactcacatttgcaaatcatcctcttctctctgactcacatttgcaaatctagatatacagatctaatatgagatgcatcctagcttaaaacgtcaaatctctgaagaatttgttgctttgtcttgctagatgactgtcacatggactagtggttatgacatcaaagaggcatatccctttgttgaatggggcatgaaatggagccctcctacgcgcacagcagctggcaccgtcacttttgatcgcgaaagcttatgcggtatggaccgtataaaagatcccttttatgcattatcttctgtatatgcatataatagcatgaaatttgtgaggagcttgcaaaaatgtcaaaattacacaatcctagatgtccaatcttgatgccctgatgtggtttaaattgtctgaagttagtacattgtgttcctcacagtagtttttgcttgtgcaggagaacctgcccgtactgttggttggagagatccaggtttcatacacacagcattcctgactgatttatggccaaataaagagtaaattacttcctatggctctatcaacattttttttcaattgtgaatactggtcttctgactatgccatttttcctgctagatactattacaagattggacatatgctacctgatggaaaaattgtatggggcaaattttactccttcaaagcacctccttttcctgggcaaaagtcactgcagagggttgtcatttttggtgatatgggaaaggtaaaatatacaccagcgcaaaatgtatcgatagttttagtactctctccttcaaaaataattactccctctggtcaaaaatatttatcgtttgggacaagatttagttaaacttttaagttcactgcttagctcagtcctgaagcaaaactacctcatgtttcttctgaattcacatggttttatcacttgcaggccgagagggatggaagcaacgagtacagcaactaccagcctggatcactgaacacaactgacacactgatcaaggaccttgacaacatcgacattgtatttcacatcggtgacattacctatgccaacgggtacatttcccagtgggatcagttcactcagcaagtcgagccgatcactgctcgagtcccctacatgattgcaaggtctttcttgatgaacatctttggtttattaaatctccaagccggttaactaattctatgataattactaacatgtttgatacgattggtttgattcagtggaaaccatgaacgggattggccaaacagtggatctttcttcaatgggacagattctggaggggagtgtggggtgcttgctgagaccatgtactacacacccacagagaacagggcaaactactggtaagtctcagactctctctgtatatataatcaactcaaatttcaatttccatttttttaaaaaaaaattgaatacgtttgtactgaattttgaatatttttttctaaattttagttggaggcacattcttagtttataaaaccaacagaaaaggcatttttgtttttgaaaaccggatgtttcgagtaaggtcgagatcacaaactggctcggtgatgctcaaaaagttcaaactaaatctgaattttgttggcaaaatttggtcaaatttcatcggtagtcaacggatttcatgaaaaaaaaataggggaaaccgtttcagaaagcagttcagttttgcggactctgcacgtcctactgggatccaccgacctgaaattttcattccgaaattgtgaaccctgctgtcaactggttgccattgtagaccggaatgcctgaattttgaacaaacaatcttttattttttttgctaaaatttaaaatattcgaaatttgttctgaactttgttgggcaggtacaagacggactacgggatgttcagattctgcgtggcggacagcgagcacgactggcgggaaggcacggagcagtacgcgttcatcgagagctgcctcgccacggtggaccggaagaagcagccatggctggtgttcatcgcgcaccgcgtcctcggctactcctcgggcttcttctacggcgccggcggcgccttcgcggagccgacggcaaggcagagcctccagaggctatggcagcggcaccgcgtcgacctcgccttctacggccacgtccacaactacgagcggacgtgcccggtctacgacgggcggtgcgcgtcgccggagaggtcgcgctactccggcgcggtgggcggcaccatccacgcggtggtcggcggcggcggcagccacctgagcaacttcaccgccgaggcgccgccgtggagcgtgtacagggagatggactacggcttcgtcaagctcacggcgttcaactacacgtcgctgctctacgagtacaggcggtccagcgacggcgaggtgcacgacagcttcaccgtccaccgggagtaccgcgacgtgctcgcctgcgtcgccgacagctgcccgccgaccatcccgccggcgacgtgatccagctccggtgattccgccggcgagtctgccggcgacgtgtgcactattgctgcttggtggtgcttgcgggcctcgtctgtaatcttgacttgtcaatcgtgtgtaaattgaattgcgaaatatttcgaaattaagtcaaataaagaaatgttacaaaattatgtgttttaaatccttaattactcctcgtctgaaaattaaacaagttattttcaaatttgaatgcaaacgaagcagatccccacctctccgggcttgatccgcaccgcacaatgtggatcggacggttcatggccctcaagggggttcggcgaataaatctccgaacccctcctcgcctcgactcgtactggttttggttggatcggggcaagaggaattcacaacccagtgaactataattaaaatatttagaaatatatatatatatatatatatatatatatatatatatatataatcaaacaattaaatccttaattacctcgtagaattcacaactcagtcagctaattcattataatatgaacagttttcctactgatctactccatgttcatgtgaaattcaaatttttaatttgaatttggtgaggcgacgattagttagttggccaaggtgtgggggtcgcaggcgtcgacggcgcaggcgagcacgtccttgtagcccctggtgatggagaacgcgtcgagcacctcgccgtcgtcgctgcggatgaactcgagctccagccgcgagtggtcgcgcgccgtgagcttcacgtacccgtagctctcgctcctcgccgcgctccactgcggccactcgccgccggcgtaccccctcagcctggcgccgcccgtgccggccacgacgtggatcgtgccgcccagcgcgccggtgtacgccgccgccggcgagctcccgttcccgccgccccccgccgccgccggcgccgccgtgcaggtgttctcgtagaccgggcacgtccgctcgtagttgtggacgtggccgtagacggcgaggtcgacgcggtgcttctgccacagcggctgcagcgtccgccccatgggctccgagaaggagccctccctggcgtagtactcgttcgacgagtagccgagcgggcggtgcgcggcgaacaccagccacggctggtgcttacggtccgccgccgcgaagcaaccgtccaggaacgcgtgctgcgccgtgccggggcgccagtcgtgctccgtgtcgccgacgcagaagcggaacatgccgtggtcggcggcgtaccagggcttgccgcggttcgccgccgccggcgcgcggaagtaggtctccgcggggacgccgcactcgccgtgcgagtcgtcgccgccgtagaagccgccggtgtcccgggacgtgcgctcgtggttgccgctcgccaccatgtagggcacccgggaggcgaccggcgagatctgcgccgtgaactggtcccactgcgccaggaagccattggcgtaggagaggtcgccgatgtggaagacggcgtcgtagttgggcaggtccttgatcagccgctccgtcgtcacctgcgcccccggctgaaatccggcgagctcattgctcccatcactttgcccctgtcccaacaaaaaaaaaaaaactcagccaatacactccaaattcaaatttacacaaaaaaaaacatgtatagacagtatattttaaatttaaacagaaactcttagccactacgtattaaatttaaatttaaatttaaacagaaactcttagcttctacacttcaaatttaaatttaaaaaggaactcttagatactacactttaggtttaaatttaaagttagacaccaaggaatgacttagtgtcaatggttttaatggtttcaaggagaagcaaatattcctagtgagcgtgctcaacaagaatcgaatcaatggtttttcttccttgttttttttatctttattttcttccttccttggcataggccggtctggctgagtgcgtcatgtaacaaaaactatattcttctaatatattgacgtgcaatccttttgcgcgttcgcaaaaaaaaaaggtgcatgccggcaactcctgccacaacgctatgagcgcatctcagaattaaatttaaacagaaactcttagctgctacactttaaatttaaaatttaaagcatattacaagtctacaacatatggaaacagatcagcacgcattttcaaataaaatgtgaacattgtcatcagaatgtgcacaagtttgatgaaattcttacgagtcccatgtctccgaaaatgacaattcgctggagtgaagcttgtccaggggaaggtgatgcacggaaggtggacgacttgccccatactatagttccgtctagtagctcgtgcccaatctgataagaatacctaaaacaaaagcatgaaaattacatgaatattgtaaattaaaattgttgctgagaagctcaatgcatgttctctcagtgttcttactccctgtttggccacaagttcttcaggaaagctgtgtggatgaagcctgggtctctgtaaccttctgcattagctggtttacctgaaaatttttccagcaaaacagagtcaacttacctgtaattctgaattgagcttttgtactatatgtaaaagttttttttaacatgatttggatgttttttcagtaagttgctctgaactttaccacacaaatggtttcttgtgaaggtgagggtgtcggccggcgaccgtctagctctagcattctccttctcgttcattgtccactccacaaaggggtaagcttcatcaacgttgtaaccacttgtccatgtcacagccatctgttatgaacaccaattacatcaagaaaccaactaaaaatttatgcaaattatgcaaactcacctcattccatccttttccttgtgagagacgagggaagactggagctttcgggttggcgaaagagatcttgtttgaaactgcaacgagtttaggctgcaaaagaatcatacaattagctacattatcctagctcctagctgctgtttttcagcaaagaagatcaaatcctaatcatagttccaatgttctaaagtcatgcagtgtaaatctgaactcacattgtccttgccaccggagaacagcccgaaagcataatcgtagcgctggttgatcagaagaaagctggtgtcgccgctgccggagctcatgaaactcggcgagatgttagcaaacttgtactgatgaaacagacaacaaaaacaatcaaaacaatcaatgtcatccagccattgagatgtacacacaatctgtatcagaatatacatcttgtttttcttcccccctactactccctccgggttgataatatttatcgttttggacaagagcacggtcttcgaaaaataactttgaccattatttttaattataatatgtataaaagtgttaacaaatatatgattttattacagtatttttaggactaatctatatatgtagtcaccatatttaaaagacaaatatattaaaaatgattcataataaaaaattataaagtttgacctcacctttaaatatattaaaaatgattcataattaaagattctaaagtttgatctcgcccatgtctaaaagggccagtattatcatgccggagcaagtaatcaccaaccttgatgggagcgatgggtaatccagcaggtgcttcatcttcacctgctgcattgattctgctactgctctgcttccctcccatgatcaaactgcagcatcacacacagagtggaggggtcgtcagattggattaggaaatttgaagctaacaatgttcagttgatcgatcttgatcttgagatggataacgagtttactcgaaatcggcaggggagaagagcgcgatccagtgcccgtcggtgggcgccggcgtcgtgaagttgacggtgtcccagaccgaatcctcgccctgccggccgccgcgagaagaaaaacaggtgagattcagagatctcataagcttgcattgcgcgaggctgtgtgatactcacgttggtgccgaggagctccggcgaggcgcggatggcggagccggcgtccatggcgacgcgcgcggcggccatgttgagcgtcaagagcggctggatgttgtccagcgtcgcagacgtcgagttcaccgccgccgccgccgcggggctcaccagcaagaagtcagcgtcgccgccggcgagaagaagcgccgcctggagcacgccgcgcgcggcgcccatcgtcctctctgctcgccggcgaacacacggcgaggcttgaagaagaaaactatggcggggaggaggaggaggttgaaggctttgcaggtcacgaatttatagggattttgctaaaagtttgcatgaaattcgtgtcgttagtcgttaggcatctggttattctggttagtttcgtttgaaattttatcccgaactaacgacgcagataatctacgtgattttctcaaggctttgctataaaatctgaaacgtctctcctacctcgatcttgaccgcacgatttagatcggacggtaatgtaggcccagttctgggttacctatcctccgaggggcaaatggtaatattcaacaattctagggtcctatatgcaaatgtcgcgacgccctttctcccgcgccgatctgcaccgtgcaagatggatctgacggctgtaagcctatgttaggggtacggagaataaatctccgaactcctccttatcctactccctccgacaaaaaaaagataaacatgggtttccgtgtccaacatttgactatcccgtaattagtattttcattattgttagatgataaaacatgattaatattttatgcgtgacttatctttttattttttttcataatttttttaaataagacggacggtaaaatgttggacatggaaaccaagatttgtcttttttttgacggagggagtacggcgcaaaagctc

SEQ ID NO: 8800 - DNA, 12699 bp, Oryza sativa
ccttgtcttctagcttgcaaatcttaccacgattccgatcttcacgatcttgagccgctaacacagtctccgcacgactttcatccatagcccacagcatctcaaccaaatgccttgtggtagcatcattctcaattccttcagtctcaaggtagctgccacggtcacttccctggggttgacgaggatgatagcgatactcagtatcggccaactgatcactgtaacgatcgcggagctctcctatggcgatccttgccacctcctgacttgcatggatgtagtttcttcctccagcttcgaacatcactgaggggatatcttcactattactgttcaaggtgactttgactcggcacttctcttcatgacgatcatgaggaatctgggcataaaaaggggcagtcccaaatccaatgacaaaggacattgtacgcaactcctggacaaaaccctcaacaccaaacaagtactcaggcttgtagcgcggcatctaaagacaagtgaaaagagggagttaagacatttatccaattaatagcacaagttttgggattaatttgaataaagtttagaagatcaaagtaaaaggtaattaaataaagtaaaccaagcttgcaagataagttgaaacagttggaaatgaattttgtacttttgaacatcaggttccaaaagaaataaaagaaagttataaaatcaacatgttaaatttattttattgcagcaagattaaataaaacaatattgtaaaacttttgctggtaaaatgagccattagtacagtaatagatgtacagtactaataacactggaataaatttttgaacgagaaccattaaaacagattatgaagtgcatgtgctattagtttggtttaattaaaagagaaagggaggagaacagttctatttttccaacatttttagagggcttctatgggtaaccatttggcataacctagggtcaaggaagctctgataccaacttgtcacgcccggaatttctatccaaaattccaaacgcttacatgtgtgtgaaccctcgtccaggaatcagccgaggcacacaataacaaattgataatagagtacaattaatactctaatttaaacgaataaaatattattacagaggtagatagttcctctcaatcaataaagatctaagcagcggaaaataaaataaacggcgcggacggctccactccacaggcagcttgaccaaggctacacctaatcctccacaccatcagcctcattgtagaactcttcctctgatgaatgattgcaaggtgagtatatgacatactcagcaagtcacgcagcaaatatgcaagtgcacaaggataccaaaagatggcataatagggttttattttgcaaaagcagcatttagtaaacatttgagaatttaataaaacagtgaagtattaaacaatattaaaccaacgctatacaacataccctgttgtataggcccaaccattctgaacaaccattcccggctgaacagatctaatctccaaaccaggaattaaccattccaaaccaggagctaaacaaattataaccaaataaagcatcatttactatggtgagaaatgtgagactaatcacgaaaaacattgttagacccgcccataaccgcgggcacggctattcgaatagttttactctgatcagaggtgtaccactgtacccacaagacacagccccacatcatgtcaccatgtgccttagtaccaccacggtacctcggaaaggagctgtgacattaccttgctggccttggaactcttcaaactcttctccggcgaaaacgaactctccgaaaacgacggaatctaagcagaaaagagcaaaatcaccaaaacagcacataaacaagcatgaacagtacatgtggatatttttaacatgtagatctcaattttagaaaaatttagagacttgaaccaactaaatcggagctaagatgaattagttatgaatttttaaagattaaatcggattaaaacacttaaaccggttttaattgaattatgacgcaataaagaattatttttgaaaaggaaaaggggatttattgcgtcagcggctagggtttgcggtggaccgagcgcacaggcggcggttcatgcgaacggacggccgagatcgatccatccaaaacggacggccgagatcgatcgggtccacgacggctcacggcggacggccccgataacgtcagcgatgacgtcatcatcggcggcggcggctcggcggctcggacggctcgggcggtgcacactcgccggcgaacggcggcacgaggacgcaaacggagggcaccaacgggtagcggacggcacggcgaactcaccggcgaccaaaacgacggcggaaacccaacggacggcggcggcgacgaagaagaagcggcggagctcttcggttcgacgacggcgatggtgctccggcggtctccgacggcggcgaagcaacggacgaggacggcggcgacttggcgatcccaacggtggccttcccgagcgacggtgacggctggaacggcggcggcgcacggctggagcgacggcggcgacggctgagctagggcgcacggcgctagggcttctccgacgacgagaggcgaaggcgaagggggcgacgggtagaggagagctcggggggtccttttaaaggggctcggaggcggcggcgaaggcccacggcgaccggcgacgagaaggaaagatcgggctcaaagccgatccgaatcgacctcgaacccatcggtttccaaaccgatttagccgaagattccaaaggagaaaaggtcgaggagatcccggagatcatttcccctctattgattcggccggaaacggaaaggggcggccggatttggaaaggaacggcggcggcggcggcggctagggtttcgggcggaggccgacgccaggaagacgacgacctgacaggtgggacccacctgtcagcgaccgaacgcgcgcgcgcggctgcggactgggtcggctgggccgaggagagagaaaagagaggtttttgagccgactttcggcccaaagccaaaagaagatttttaaaacctttttcaatttaaattattttttaaatgcaattccatttattaaaaatacttccttagctcaaataaatctcagaaaaatctaggaattatagaattaagcaaagtatttaatgaaattttatctggccccattttatattggaatttatttttaaaattagatcttcttttcaagacttttaaaaataaattctaaaaattccttttaaacaacaatttataaattttgaattttcaaggtgtgacacttgcccgatggtactccgaacgtgcacttctctggattgagcataaggcgatatcgtcggaggttgtcgaacgtttcccgcagatcgtcaatcaatgagtcgcttgtcttggtcttgacaacaatgtcatcgacgtaagcctcgacattgtttccgagctggtcactaagtgcaccttggaccgtgcgctggaaagtgtttcctgtggttattagtccgaatggcatcttaacgtagcagaataccccgaacggcgtgatgaatgctgtcttatcctcgtcctcttttgccatgcttatttggtggtaaccggagtaagcgtcgaggaagctcaacaactcgcaaccggctgttgagtccaccagttggtctattcgaggaagaggaaagtgatccttgggacacgccttgttgaggtggtgaaatcgacacacattctccacttcccgttggccttccgtaccatgactgggttggctagccactctggatggagtacctctctgatgaaaccggctttgagaagcttgtcgagctcttctcgtatggcttgttttcgatatggtgcaaatctccgcagtttttgctttattggcttggcatcgggtcgcaccatgagtttgtgctcaatcacctccctgggtacccccggcatgtcggacggctgccaagcgaacacgttagcattgtcgcggaggaaggtgatgagcgcgagttcctatttctcgcctagtgatgccccgatcttgacggtcttgtcggggttggcactggagagtggaacgatcttgattgcgccgtccggcttcggcgtcttgtttgttttgctcactttcttgggtggctcagctgtggcgggtaggctgggcgtgtgctcgaccatgtcgaggctccacttgtcgcattgtactgccagcttagcgttcccttgaatagtgattgttcccttcggtcctggcatcttgagcacttgatacgcgtagtgagatgcggccatgaacttcgcgagtgaagttctcccaatgatggcattgtatgctgtatcaaattcagcgacatcaaaggtgatctgttccgttcggaagtagtttgcttggccgaaagtcacaggcaacgtaattttgcccaatggtttggacgatgactgaggagtaattccatggaagggttgatcggtgggtgtcaactcgtttcgtgggatccccatcgcgtccaaggcgctggcgaagagaaggttgattgagctaccgccgtcgatcaggactcgtgcgaccttgatattatgaatagtgggttcgactacgatcagatattgccctgggatgacagcaatcttggggtggtcctcttctgagaattctatcttctgctcggaccacttcatcttgggcgcagccccctgccacgtcgaacagacttcacgttccactttcttgtattctcgctttgaggagtatgccgtggaacctccaaagatgtgtgagacatgaagatcggaatctgggtatgctgagtccgattcctgagtaggcgcctcagcatccttctcaaccacgtgtactcgcttgcctttttccgatgtcatgtgttttgcgagcgactttttgaagacgaggcaatcttctagagagtgtctgtccgacttgtgtatagggcaccatgctttcttcgtatcgctgccttgtgggtctgggcgcttgggagggtccgcgtattctgttgcgagaacttccgattgagctttccttttcctactcttgcgaattttcttcttgcttgactcaggtgcatccttggctggtttcttctctcctccagtcttcggtttgtcgttcttgcgtctcagtgcgtcatccgcatgagcgcatcgatcgacaatttcgaataatctccgagtagtcgtgacgcgcctcgttgccaactcttgagtagtatagcgatctctgacactggatttgaaagcgcgaattacagaagcgtcggtgatctcggggattgtgtttctgcactcgttaaagcgccgaacataatccctcaaggattcacccgggttctgtgtcaacgcatgtaggtcgtcttcgatcgcgtggcgcttgtaagttccttggaagttggctacgaactgctgccacaagtctgcccacgaagagatcgagtaggggggagatgcatcagccatgaacgtgcagagcctttcaatgtggttggcaagtaattcaccaacgcattgtcgtccgctccggcagcgtagagtaccgtggagtaaaccagaaggaactcttctgggttggtgctcccatcgtatttctctattgctccaggtcggaatctttcaggctatcggacatcccgaagtgaacgatcgaaagctctacacccagcgctgggggcggtgggttgtcggcgatcatacgcccttcgtggatgtctatctgatgatgaagatgaggaagatgatgacgatgacgatgggtcgctcggttccggcgtgcggttacgaggacgtcggccgggttctcgagaaccttgttgtcgtcgcccgttgttgtctcggcgccgatctccatcatcgtcgtcattatggcgacgtcctcgaccagtatcgcccagcacccgccgttcgtgatcgtcatgatcgcagcggttgtggcggttatcatggcctcggtcttcgcttgaacggcctcctcgatcttcgttatcgtgacgtcgtgaagagatgcgatgttgagaacggttctcgttgtcacttgtgcgtcgcgcctctcggcggccattcaggtgatcgcggagatcgccggtgccgcgaggtgaaggggtggctcgatgaggcaattcccggtgttcaggatcttcaccattagcatcgccagttggtggctgttctgggtgcactgcagcagcggcttctttgaacgcgttgctgaggttggtcactgattcccgtagtcgttctgtccatcgtgcgagatcgtcgttcagaatgggatcgtagggggtttccctcagtattgcgttgacggctctgatgtgctgggccagtgtagtcgcttgattttccgcttccgcattggtgcgcgctgatgtgccgacatcgtcgatagccaatacctcacgcggcgtactcgttgtcgatgatccatagtcttcgagcaggtgcaagactgatggttcgtggggatctatgtcgattaccccaacgaatcgatctgaaatcagcgtcgctccttgttccttgtgttcatccctgatggggatgcgtgactgctggaccttagaaggtggcgtcttcatggcgctgagaaagaccttgcagctcgagaggttgtgattctttgtcttgtgaattggacaatagacatcacgagttggagaggtacgctgaattccacgctctttgcaggcacgaatttcagcatggacgttgagaaagacccagcaggcttgcagggtgtgtttcctggttttgtggataggacaccaggaccttgtcacctcggaagtaatcctcgtcggctcgtgattcctgtcggaaagacaaggcttggccgcactaggatccttctcgggctcggatgttgtcgacgttcctatctccgcttcggcgggaggatccttcgacatggagtcgccctgggttgtagccactgcattctcgtttccggccattggcggaccagctgagatcggcactgtggtgtaaaccggaaagacgatttcgccgacctgagtccacaccagtgttgttgaagtaggaactccttggttgaggttggtgttgacactgttgtcgacaaagctggatgtcatagtagtagaaccttgagcaccaagtccacctacctggcacgccactgtcgacggggaatacccgtagaccggatatagagggtattggggtacgctggtacgaggatctacgtagtacgacatcaagcaaacaggaaacagagattatactggttcaggccccttggtaggtaatagccctaatccagttgatatgggattatatgatgaaaaccacagattacaaagggaacagtggaactcgacgataccgacaagatcgtagtcgagttgatccgactagatctcccggcgacttggctccgataagctccggcttcgtaggctgtggtggagttggctctgagattcgatgctttaggtcctcccgggggtcccttttatatcgcaggtcacctgtctcccagttggactcggagaaaccggaccgaacacgacacaatgacgacccagttctgaccgagtaggactccttccatctgtgaaatccatgatgaatttccttaacgtatgccgaaaacatccgtatatgcgtgaacataccatatcgatatgtgacgtatatcgaagggtagagggtataccttactcgtaaccctgacagtagccccccgacttctgcttaaatgaactggtgaaactgatcgcgacttcacatgtcgaaattgtcgttgttctcggtgtgaggacggagagacaaggagtgatcgacaacatcgagtgaagttcaacggtcatgagtgaatttaaattgaagtccgaaaaactgccacgcgtaacggacccagaaattcgcaccggcggaggtgcgtctatttaagggagttttggggatccaatttgaggtctgcccgttgaaaaaactctccagcttccaagcgtccctcgtcttcttcgctcccgcaaaaaccctagccaactcatctcggtcctttctccggcgatctccggtggccatggatcttgacaagtctacctccaccagtgtgtcactgaagaaactgcaggaggatggcgcccttcccagtcgcgggaccgcggagagggaagtaggaggtactgaaccccagcctgtcctgggtcgcatggttgcggttgaggactttattctctgcggttttcttcctccgccttctgaatttctccttttggtcttaaatttctatggtctttccttgctccatttgaaccccaactccatcgccttcctgagtatttttcacctttgtgaggcctacattggggtagagccgtttcttgacctcttccgcttttactatgagttacgctggatggaatccaaaaaggtgtccgggtgtgttggtttccgacttcgggatggcctgaagtcacgatacatcccctttcagtgcccctcatctcgcagcaaatggcgggggaggtggttctatcttcaggtagaggattcggatcctgccttcgttgttcctgaggagcagccagacaaggttccatcttggaccaccaaacctgccttgaccccgtccctccaatctttcatcgatatcgttgacgacctccgagaacgggggttgtcggggtatgaagttgctgccgatttcattggtaggcggatccagccgcttcaggctcgagcccttcctgcctttgattattatgggccagaggacgcgacccgggtttctcctcgaggtatttcctttttagttaaattgactcccttatgcgcatgttcttcccggcttatcggattctgttctcgatctacaggcttgaatagtgcaaccgtggagcgccgcgtcagccaactgatgatcagcggcccgacaacggcgagcaacgtccccgtccccctttgcgagaaaggggcagccgagcgtgacgctgccatcaatgtaagtgtacttagcggtccttttgcatttttcttccgggatcgcattatgacttcatgaaacataggctcttcctctgactgatatcatcgggccgctcgtggaccatcaggtggcagcgtcgctgaaggagaaggtcgccaaggaggcgtctgacactgctgctgccgctgccacgacgagtggcagcgatgttccgaaaaaggggaggaaattctcctctgtagtcggacattgtcggaagacacccaccccctcggtaagttctcctgttatttgatcacgtagtcggaaaacttccacctcacatcatatcgattgtactccaggcctcggacgcgtctcccccgcctccgcgatggcagcggcttgtgacgctcagcgagaagtaagtgaatgaatttgaggtttcgtgatttcgtcgaactctgtctcaatcgcagcctttcgcagggcggcgcgggcgaaggcagcgcaagatgggtctgggggacctccaacgcgtctcctgccgtggcctcaacggatgtcgttgtcgtgcccaggagccatgaggcgacggatgtctgggggatcttgtggctgattgtggttcgccggctgccgtcctcacctgggaggagctccaggttgagatggggcgcctcctcgaggctggtgctcgcggtgttagccacgaaatcgcggaggcgagggcggcggctgcgtcgtcggcgaacaagcacgccgatcggctagcgcgcgacctggcggaggttcgcgaggacctccagaagatgagggaactggtggccggcaacgagcgacaacggcaggggctcgagcatcgcatgtcggagcttgagaacaacttgtcggaaatccatggctcattgcgggtcacctatactggtctgcaccagctcgccggggagtgcggtatcaagtccaccatcccggcgaatcccgatgagttctcgctgacgtcttctcttgcggagctggtgacggtgatggaggagatcccctccaagcatgcggccaggatcggagaggagacgtctaatgggatctacaccggggtgtgccacgtccttgcatgtgtgaggctggcgcaccctgaactcgatctgtggaagatcttggatcagggggcggttagcgacgcgcgcaaggatgtgatggaggaggtcggcgatctgggggagtccgtcctctcgctttttgaagagtagggtcttagctctcttgtactctttagtcatgctttgtaaaacttttattggtctcaaccgccctagtgtgtgcggtcattgccttagctttatttagcattttgatcttgagtactttgttgtcctttgttaccatttcctttgcccttccgtctggatcgacttgatttgttgtgttctcgggagagaagagcagcttgacttagtcgtttccatgctgagcagatctcgagagtgcgcttgctgaccaggatcgtcgcatccagtattggaggacgaagtttgaggtcgcggaactcgagaggactatgctggaggtgagaaaggaccaggccgtagagacactccggggtcgtgaggtgtggttcaactcgtatctgaagagttgctgcacatccatgtcgagagtctgtagagagctccgaataccccgtggggatcccgaggaatcggctgccggatacatctcatggctgaatggggcctatgcccagctcgaaggcatcggtcaacatatcgacgaggccttgaagcaggagtgtcgtcgctcaagccgatatgccggggggcacgtgttggcctgcatacgagatcatcgttcgcagctgcatctcgagttcctccgcgaagggttttctcgttcccagagaactcctacggagatagatggcctggcaaagtcgatggcgccgctggcggagaaggttttccagtcgatggactagcgttgtccttcctggtagtctccgtatcctgtgacaaatgtctttggaaaaagtgtaatatagttttgaattttgatggaattgtaagaaatacttgtggaatagaaaagaaatctatcttactaagctttcttactctggacgtagtgtgtatgagtgtcttctcacttcgcgacttcgatcagtcgtttgagttatacactctccctagcctccagccttgtcatcggagaattcttctcggaagataaggctcttggacctttgacctgcctcggttgaacaagcactgatcctagcccccagccgtgaagttggaaagtttatttccgattacacggcttggttaatacgcacggcgagaactcttacacaaccagatcttacatggtctttcgtctctacaggatccgacaaggccttatcggctctgggtgtccccgccgaagttcccttaggttcctcggaggccttgtcaagacggcgtaaagagacatgaggataggtttcaacgttaggtgtcatctgggtaagggatcatcgaaaaggaacactttgattgtagtctgtacctaaaaaataggctttattgaggctgtaagatgtcttacaagtatggatactattgacttatacatagaatttacgtaattgatcaatgttccaggaatttgccaactcgcgaccatcgccatctgcgattttgaatgcacctggccgcaaaacttgcgtgatcgtgtacggtccttcccatttgggtgagagcttgttgcgccctgcttggctttgaacccgtcggaggacgtagtcgccgatcgaaagcatgcgtgctcggatgcgcttctcgtggtaacggcgaagggcttgttggtagctggctgctcgaacggcaactcgttcgcgatgttcctcgagtagattcacatcgtcgtatcgctgctcttcctgatcctcatcggaatacttctgtactcgtgtactttgatgtcgtagctcggtggggagcatcgcctctgagccgtacacgaggaagaagggtgtctccttgttggacgttgtcggtgtggtacgcacggcccatagtactgatggaagttcctcgacccaattcttgtcgtgtgacatgagcctgtcgtagacgcgggtcttgattccttgtagtattatgccgttgccctctcgacttgtcaattgctctgagggtgagaaaccgaggcgaagcagatcttgactcccagcctgatgcagtaatcctggaaatcggcactgatgaactgggagccgttgtctgttatgatacggtggggcaatccgaatttgcagaatatccctttgatgaatttgatggcgttgtcggccttgatttcccccgtgggtgtcgcttcaatccacttggtgaatttgtcgatcgccacgaataggaacctgtagccgccctgtcctcgtgggaatggcctgagtatatctagcccccagcacgataacggccaagtgaaagggatagtctggagtgcttgcgctggcagctttgtgtgtttactgtggaattgacaggcttcacactgttgaaccatgtcgcaggcgtctttgagggcgtttggccagaaaaacccttgttggaaagcttttccgactaatgtccgaccggcggcatgtgacccacagatctcttcatgtatgtcgaggaggaggtgtctgccgtcgtcggacaagatgcattttagga
